United States Patent Application Publication US 2024/0066114 A1 - sequence listing, part 22

SEQ ID NO: 25809 - RNA, 4017 nt, Artificial Sequence
  SARS-CoV-2/Wuhan/WIV05/2019__EPI_ISL_402128 spike protein mRNA gc mod (1-1273)(K986P_V987P_A222V_D614G)
aggagaaagcuuaccauguucguguuccuggugcugcugccucugguguccagccagugugugaaccugaccaccagaacacagcugccuccagccuacaccaacagcuuuaccagaggcguguacuaccccgacaagguguucagauccagcgugcugcacucuacccaggaccuguuccugccuuucuucagcaacgugaccugguuccacgccauccacguguccggcaccaauggcaccaagagauucgacaaccccgugcugcccuucaacgacgggguguacuuugccagcaccgagaaguccaacaucaucagaggcuggaucuucggcaccacacuggacagcaagacccagagccugcugaucgugaacaacgccaccaacguggucaucaaagugugcgaguuccaguucugcaacgaccccuuccugggcgucuacuaccacaagaacaacaagagcuggauggaaagcgaguuccggguguacagcagcgccaacaacugcaccuucgaguacgugucccagccuuuccugauggaccuggaaggcaagcagggcaacuucaagaaccugcgcgaguucguguuuaagaacaucgacggcuacuucaagaucuacagcaagcacaccccuaucaaccucgugcgggaucugccucagggcuucucugugcuggaaccccugguggaucugcccaucggcaucaacaucacccgguuucagacacugcuggcccugcacagaagcuaccugacaccuggcgauagcagcagcggauggacagcuggugccgccgcuuacuaugugggcuaccugcagccuagaaccuuccugcugaaguacaacgagaacggcaccaucaccgacgccguggauugugcucuggauccucugagcgagacaaagugcacccugaaguccuucaccguggaaaagggcaucuaccagaccagcaacuuccgggugcagcccaccgaauccaucgugcgguuccccaauaucaccaaucugugccccuucggcgagguguucaaugccaccagauucgccucuguguacgccuggaaccggaagcggaucagcaauugcguggccgacuacuccgugcuguacaacuccgccagcuucagcaccuucaagugcuacggcguguccccuaccaagcugaacgaccugugcuucacaaacguguacgccgacagcuucgugauccggggagaugaagugcggcagauugccccuggacagacaggcaagaucgccgacuacaacuacaagcugcccgacgacuucaccggcugugugauugccuggaacagcaacaaccuggacuccaaagucggcggcaacuacaauuaccuguaccggcuguuccggaaguccaaucugaagcccuucgagcgggacaucuccaccgagaucuaucaggccggcagcaccccuuguaacggcguggaaggcuucaacugcuacuucccacugcaguccuacggcuuucagcccacaaauggcgugggcuaucagcccuacagagugguggugcugagcuucgaacugcugcaugccccugccacagugugcggcccuaagaaaagcaccaaucucgugaagaacaaaugcgugaacuucaacuucaacggccugaccggcaccggcgugcugacagagagcaacaagaaguuccugccauuccagcaguuuggccgggauaucgccgauaccacagacgccguuagagauccccagacacuggaaauccuggacaucaccccuugcagcuucggcggagugucugugaucaccccuggcaccaacaccagcaaucagguggcagugcuguaccagggcgugaacuguaccgaagugcccguggccauucacgccgaucagcugacaccuacauggcggguguacuccaccggcagcaauguguuucagaccagagccggcugucugaucggagccgagcacgugaacaauagcuacgagugcgacauccccaucggcgcuggaaucugcgccagcuaccagacacagacaaacagcccucggagagccagaagcguggccagccagagcaucauugccuacacaaugucucugggcgccgagaacagcguggccuacuccaacaacucuaucgcuauccccaccaacuucaccaucagcgugaccacagagauccugccuguguccaugaccaagaccagcguggacugcaccauguacaucugcggcgauuccaccgagugcuccaaccugcugcugcaguacggcagcuucugcacccagcugaauagagcccugacagggaucgccguggaacaggacaagaacacccaagagguguucgcccaagugaagcagaucuacaagaccccuccuaucaaggacuucggcggcuucaauuucagccagauucugcccgauccuagcaagcccagcaagcggagcuucaucgaggaccugcuguucaacaaagugacacuggccgacgccggcuucaucaagcaguauggcgauugucugggcgacauugccgccagggaucugauuugcgcccagaaguuuaacggacugacagugcugccuccucugcugaccgaugagaugaucgcccaguacacaucugcccugcuggccggcacaaucacaagcggcuggacauuuggagcaggcgccgcucugcagauccccuuugcuaugcagauggccuaccgguucaacggcaucggagugacccagaaugugcuguacgagaaccagaagcugaucgccaaccaguucaacagcgccaucggcaagauccaggacagccugagcagcacagcaagcgcccugggaaagcugcaggacguggucaaccagaaugcccaggcacugaacacccuggucaagcagcuguccuccaacuucggcgccaucagcucugugcugaacgauauccugagcagacuggacccuccugaggccgaggugcagaucgacagacugaucacaggcagacugcagagccuccagacauacgugacccagcagcugaucagagccgccgagauuagagccucugccaaucuggccgccaccaagaugucugagugugugcugggccagagcaagagaguggacuuuugcggcaagggcuaccaccugaugagcuucccucagucugccccucacggcgugguguuucugcacgugacauaugugcccgcucaagagaagaauuucaccaccgcuccagccaucugccacgacggcaaagcccacuuuccuagagaaggcguguucguguccaacggcacccauugguucgugacacagcggaacuucuacgagccccagaucaucaccaccgacaacaccuucgugucuggcaacugcgacgucgugaucggcauugugaacaauaccguguacgacccucugcagcccgagcuggacagcuucaaagaggaacuggacaaguacuuuaagaaccacacaagccccgacguggaccugggcgauaucagcggaaucaaugccagcgucgugaacauccagaaagagaucgaccggcugaacgagguggccaagaaucugaacgagagccugaucgaccugcaagaacuggggaaguacgagcaguacaucaaguggcccugguacaucuggcugggcuuuaucgccggacugauugccaucgugauggucacaaucaugcuguguugcaugaccagcugcuguagcugccugaagggcuguuguagcuguggcagcugcugcaaguucgacgaggacgauucugagcccgugcugaagggcgugaaacugcacuacacaugaggacuaguuauaagacugacuagcccgaugggccucccaacgggcccuccuccccuccuugcaccgagauuaauagaucuaaaaaaaaaaaaaaaaaaaaaaaaaaaaaaaaaaaaaaaaaaaaaaaaaaaaaaaaaaaaaaaaaaaaaaaaaaaaaaaaaaaaaaaaaaaaaaaaaaaa

SEQ ID NO: 25810 - RNA, 4017 nt, Artificial Sequence
  SARS-CoV-2/Wuhan/WIV05/2019__EPI_ISL_402128 spike protein mRNA gc mod (1-1273)(K986P_V987P_N439K_D614G)
aggagaaagcuuaccauguucguguuccuggugcugcugccucugguguccagccagugugugaaccugaccaccagaacacagcugccuccagccuacaccaacagcuuuaccagaggcguguacuaccccgacaagguguucagauccagcgugcugcacucuacccaggaccuguuccugccuuucuucagcaacgugaccugguuccacgccauccacguguccggcaccaauggcaccaagagauucgacaaccccgugcugcccuucaacgacgggguguacuuugccagcaccgagaaguccaacaucaucagaggcuggaucuucggcaccacacuggacagcaagacccagagccugcugaucgugaacaacgccaccaacguggucaucaaagugugcgaguuccaguucugcaacgaccccuuccugggcgucuacuaccacaagaacaacaagagcuggauggaaagcgaguuccggguguacagcagcgccaacaacugcaccuucgaguacgugucccagccuuuccugauggaccuggaaggcaagcagggcaacuucaagaaccugcgcgaguucguguuuaagaacaucgacggcuacuucaagaucuacagcaagcacaccccuaucaaccucgugcgggaucugccucagggcuucucugcucuggaaccccugguggaucugcccaucggcaucaacaucacccgguuucagacacugcuggcccugcacagaagcuaccugacaccuggcgauagcagcagcggauggacagcuggugccgccgcuuacuaugugggcuaccugcagccuagaaccuuccugcugaaguacaacgagaacggcaccaucaccgacgccguggauugugcucuggauccucugagcgagacaaagugcacccugaaguccuucaccguggaaaagggcaucuaccagaccagcaacuuccgggugcagcccaccgaauccaucgugcgguuccccaauaucaccaaucugugccccuucggcgagguguucaaugccaccagauucgccucuguguacgccuggaaccggaagcggaucagcaauugcguggccgacuacuccgugcuguacaacuccgccagcuucagcaccuucaagugcuacggcguguccccuaccaagcugaacgaccugugcuucacaaacguguacgccgacagcuucgugauccggggagaugaagugcggcagauugccccuggacagacaggcaagaucgccgacuacaacuacaagcugcccgacgacuucaccggcugugugauugccuggaacagcaagaaccuggacuccaaagucggcggcaacuacaauuaccuguaccggcuguuccggaaguccaaucugaagcccuucgagcgggacaucuccaccgagaucuaucaggccggcagcaccccuuguaacggcguggaaggcuucaacugcuacuucccacugcaguccuacggcuuucagcccacaaauggcgugggcuaucagcccuacagagugguggugcugagcuucgaacugcugcaugccccugccacagugugcggcccuaagaaaagcaccaaucucgugaagaacaaaugcgugaacuucaacuucaacggccugaccggcaccggcgugcugacagagagcaacaagaaguuccugccauuccagcaguuuggccgggauaucgccgauaccacagacgccguuagagauccccagacacuggaaauccuggacaucaccccuugcagcuucggcggagugucugugaucaccccuggcaccaacaccagcaaucagguggcagugcuguaccagggcgugaacuguaccgaagugcccguggccauucacgccgaucagcugacaccuacauggcggguguacuccaccggcagcaauguguuucagaccagagccggcugucugaucggagccgagcacgugaacaauagcuacgagugcgacauccccaucggcgcuggaaucugcgccagcuaccagacacagacaaacagcccucggagagccagaagcguggccagccagagcaucauugccuacacaaugucucugggcgccgagaacagcguggccuacuccaacaacucuaucgcuauccccaccaacuucaccaucagcgugaccacagagauccugccuguguccaugaccaagaccagcguggacugcaccauguacaucugcggcgauuccaccgagugcuccaaccugcugcugcaguacggcagcuucugcacccagcugaauagagcccugacagggaucgccguggaacaggacaagaacacccaagagguguucgcccaagugaagcagaucuacaagaccccuccuaucaaggacuucggcggcuucaauuucagccagauucugcccgauccuagcaagcccagcaagcggagcuucaucgaggaccugcuguucaacaaagugacacuggccgacgccggcuucaucaagcaguauggcgauugucugggcgacauugccgccagggaucugauuugcgcccagaaguuuaacggacugacagugcugccuccucugcugaccgaugagaugaucgcccaguacacaucugcccugcuggccggcacaaucacaagcggcuggacauuuggagcaggcgccgcucugcagauccccuuugcuaugcagauggccuaccgguucaacggcaucggagugacccagaaugugcuguacgagaaccagaagcugaucgccaaccaguucaacagcgccaucggcaagauccaggacagccugagcagcacagcaagcgcccugggaaagcugcaggacguggucaaccagaaugcccaggcacugaacacccuggucaagcagcuguccuccaacuucggcgccaucagcucugugcugaacgauauccugagcagacuggacccuccugaggccgaggugcagaucgacagacugaucacaggcagacugcagagccuccagacauacgugacccagcagcugaucagagccgccgagauuagagccucugccaaucuggccgccaccaagaugucugagugugugcugggccagagcaagagaguggacuuuugcggcaagggcuaccaccugaugagcuucccucagucugccccucacggcgugguguuucugcacgugacauaugugcccgcucaagagaagaauuucaccaccgcuccagccaucugccacgacggcaaagcccacuuuccuagagaaggcguguucguguccaacggcacccauugguucgugacacagcggaacuucuacgagccccagaucaucaccaccgacaacaccuucgugucuggcaacugcgacgucgugaucggcauugugaacaauaccguguacgacccucugcagcccgagcuggacagcuucaaagaggaacuggacaaguacuuuaagaaccacacaagccccgacguggaccugggcgauaucagcggaaucaaugccagcgucgugaacauccagaaagagaucgaccggcugaacgagguggccaagaaucugaacgagagccugaucgaccugcaagaacuggggaaguacgagcaguacaucaaguggcccugguacaucuggcugggcuuuaucgccggacugauugccaucgugauggucacaaucaugcuguguugcaugaccagcugcuguagcugccugaagggcuguuguagcuguggcagcugcugcaaguucgacgaggacgauucugagcccgugcugaagggcgugaaacugcacuacacaugaggacuaguuauaagacugacuagcccgaugggccucccaacgggcccuccuccccuccuugcaccgagauuaauagaucuaaaaaaaaaaaaaaaaaaaaaaaaaaaaaaaaaaaaaaaaaaaaaaaaaaaaaaaaaaaaaaaaaaaaaaaaaaaaaaaaaaaaaaaaaaaaaaaaaaaa

SEQ ID NO: 25811 - RNA, 4017 nt, Artificial Sequence
  SARS-CoV-2/Wuhan/WIV05/2019__EPI_ISL_402128 spike protein mRNA gc mod (1-1273)(K986P_V987P_S477N_D614G)
aggagaaagcuuaccauguucguguuccuggugcugcugccucugguguccagccagugugugaaccugaccaccagaacacagcugccuccagccuacaccaacagcuuuaccagaggcguguacuaccccgacaagguguucagauccagcgugcugcacucuacccaggaccuguuccugccuuucuucagcaacgugaccugguuccacgccauccacguguccggcaccaauggcaccaagagauucgacaaccccgugcugcccuucaacgacgggguguacuuugccagcaccgagaaguccaacaucaucagaggcuggaucuucggcaccacacuggacagcaagacccagagccugcugaucgugaacaacgccaccaacguggucaucaaagugugcgaguuccaguucugcaacgaccccuuccugggcgucuacuaccacaagaacaacaagagcuggauggaaagcgaguuccggguguacagcagcgccaacaacugcaccuucgaguacgugucccagccuuuccugauggaccuggaaggcaagcagggcaacuucaagaaccugcgcgaguucguguuuaagaacaucgacggcuacuucaagaucuacagcaagcacaccccuaucaaccucgugcgggaucugccucagggcuucucugcucuggaaccccugguggaucugcccaucggcaucaacaucacccgguuucagacacugcuggcccugcacagaagcuaccugacaccuggcgauagcagcagcggauggacagcuggugccgccgcuuacuaugugggcuaccugcagccuagaaccuuccugcugaaguacaacgagaacggcaccaucaccgacgccguggauugugcucuggauccucugagcgagacaaagugcacccugaaguccuucaccguggaaaagggcaucuaccagaccagcaacuuccgggugcagcccaccgaauccaucgugcgguuccccaauaucaccaaucugugccccuucggcgagguguucaaugccaccagauucgccucuguguacgccuggaaccggaagcggaucagcaauugcguggccgacuacuccgugcuguacaacuccgccagcuucagcaccuucaagugcuacggcguguccccuaccaagcugaacgaccugugcuucacaaacguguacgccgacagcuucgugauccggggagaugaagugcggcagauugccccuggacagacaggcaagaucgccgacuacaacuacaagcugcccgacgacuucaccggcugugugauugccuggaacagcaacaaccuggacuccaaagucggcggcaacuacaauuaccuguaccggcuguuccggaaguccaaucugaagcccuucgagcgggacaucuccaccgagaucuaucaggccggcaacaccccuuguaacggcguggaaggcuucaacugcuacuucccacugcaguccuacggcuuucagcccacaaauggcgugggcuaucagcccuacagagugguggugcugagcuucgaacugcugcaugccccugccacagugugcggcccuaagaaaagcaccaaucucgugaagaacaaaugcgugaacuucaacuucaacggccugaccggcaccggcgugcugacagagagcaacaagaaguuccugccauuccagcaguuuggccgggauaucgccgauaccacagacgccguuagagauccccagacacuggaaauccuggacaucaccccuugcagcuucggcggagugucugugaucaccccuggcaccaacaccagcaaucagguggcagugcuguaccagggcgugaacuguaccgaagugcccguggccauucacgccgaucagcugacaccuacauggcggguguacuccaccggcagcaauguguuucagaccagagccggcugucugaucggagccgagcacgugaacaauagcuacgagugcgacauccccaucggcgcuggaaucugcgccagcuaccagacacagacaaacagcccucggagagccagaagcguggccagccagagcaucauugccuacacaaugucucugggcgccgagaacagcguggccuacuccaacaacucuaucgcuauccccaccaacuucaccaucagcgugaccacagagauccugccuguguccaugaccaagaccagcguggacugcaccauguacaucugcggcgauuccaccgagugcuccaaccugcugcugcaguacggcagcuucugcacccagcugaauagagcccugacagggaucgccguggaacaggacaagaacacccaagagguguucgcccaagugaagcagaucuacaagaccccuccuaucaaggacuucggcggcuucaauuucagccagauucugcccgauccuagcaagcccagcaagcggagcuucaucgaggaccugcuguucaacaaagugacacuggccgacgccggcuucaucaagcaguauggcgauugucugggcgacauugccgccagggaucugauuugcgcccagaaguuuaacggacugacagugcugccuccucugcugaccgaugagaugaucgcccaguacacaucugcccugcuggccggcacaaucacaagcggcuggacauuuggagcaggcgccgcucugcagauccccuuugcuaugcagauggccuaccgguucaacggcaucggagugacccagaaugugcuguacgagaaccagaagcugaucgccaaccaguucaacagcgccaucggcaagauccaggacagccugagcagcacagcaagcgcccugggaaagcugcaggacguggucaaccagaaugcccaggcacugaacacccuggucaagcagcuguccuccaacuucggcgccaucagcucugugcugaacgauauccugagcagacuggacccuccugaggccgaggugcagaucgacagacugaucacaggcagacugcagagccuccagacauacgugacccagcagcugaucagagccgccgagauuagagccucugccaaucuggccgccaccaagaugucugagugugugcugggccagagcaagagaguggacuuuugcggcaagggcuaccaccugaugagcuucccucagucugccccucacggcgugguguuucugcacgugacauaugugcccgcucaagagaagaauuucaccaccgcuccagccaucugccacgacggcaaagcccacuuuccuagagaaggcguguucguguccaacggcacccauugguucgugacacagcggaacuucuacgagccccagaucaucaccaccgacaacaccuucgugucuggcaacugcgacgucgugaucggcauugugaacaauaccguguacgacccucugcagcccgagcuggacagcuucaaagaggaacuggacaaguacuuuaagaaccacacaagccccgacguggaccugggcgauaucagcggaaucaaugccagcgucgugaacauccagaaagagaucgaccggcugaacgagguggccaagaaucugaacgagagccugaucgaccugcaagaacuggggaaguacgagcaguacaucaaguggcccugguacaucuggcugggcuuuaucgccggacugauugccaucgugauggucacaaucaugcuguguugcaugaccagcugcuguagcugccugaagggcuguuguagcuguggcagcugcugcaaguucgacgaggacgauucugagcccgugcugaagggcgugaaacugcacuacacaugaggacuaguuauaagacugacuagcccgaugggccucccaacgggcccuccuccccuccuugcaccgagauuaauagaucuaaaaaaaaaaaaaaaaaaaaaaaaaaaaaaaaaaaaaaaaaaaaaaaaaaaaaaaaaaaaaaaaaaaaaaaaaaaaaaaaaaaaaaaaaaaaaaaaaaaa

SEQ ID NO: 25812 - RNA, 4017 nt, Artificial Sequence
  SARS-CoV-2/Wuhan/WIV05/2019__EPI_ISL_402128 spike protein mRNA gc mod (1-1273)(K986P_V987P_N501Y_D614G)
aggagaaagcuuaccauguucguguuccuggugcugcugccucugguguccagccagugugugaaccugaccaccagaacacagcugccuccagccuacaccaacagcuuuaccagaggcguguacuaccccgacaagguguucagauccagcgugcugcacucuacccaggaccuguuccugccuuucuucagcaacgugaccugguuccacgccauccacguguccggcaccaauggcaccaagagauucgacaaccccgugcugcccuucaacgacgggguguacuuugccagcaccgagaaguccaacaucaucagaggcuggaucuucggcaccacacuggacagcaagacccagagccugcugaucgugaacaacgccaccaacguggucaucaaagugugcgaguuccaguucugcaacgaccccuuccugggcgucuacuaccacaagaacaacaagagcuggauggaaagcgaguuccggguguacagcagcgccaacaacugcaccuucgaguacgugucccagccuuuccugauggaccuggaaggcaagcagggcaacuucaagaaccugcgcgaguucguguuuaagaacaucgacggcuacuucaagaucuacagcaagcacaccccuaucaaccucgugcgggaucugccucagggcuucucugcucuggaaccccugguggaucugcccaucggcaucaacaucacccgguuucagacacugcuggcccugcacagaagcuaccugacaccuggcgauagcagcagcggauggacagcuggugccgccgcuuacuaugugggcuaccugcagccuagaaccuuccugcugaaguacaacgagaacggcaccaucaccgacgccguggauugugcucuggauccucugagcgagacaaagugcacccugaaguccuucaccguggaaaagggcaucuaccagaccagcaacuuccgggugcagcccaccgaauccaucgugcgguuccccaauaucaccaaucugugccccuucggcgagguguucaaugccaccagauucgccucuguguacgccuggaaccggaagcggaucagcaauugcguggccgacuacuccgugcuguacaacuccgccagcuucagcaccuucaagugcuacggcguguccccuaccaagcugaacgaccugugcuucacaaacguguacgccgacagcuucgugauccggggagaugaagugcggcagauugccccuggacagacaggcaagaucgccgacuacaacuacaagcugcccgacgacuucaccggcugugugauugccuggaacagcaacaaccuggacuccaaagucggcggcaacuacaauuaccuguaccggcuguuccggaaguccaaucugaagcccuucgagcgggacaucuccaccgagaucuaucaggccggcagcaccccuuguaacggcguggaaggcuucaacugcuacuucccacugcaguccuacggcuuucagcccacauacggcgugggcuaucagcccuacagagugguggugcugagcuucgaacugcugcaugccccugccacagugugcggcccuaagaaaagcaccaaucucgugaagaacaaaugcgugaacuucaacuucaacggccugaccggcaccggcgugcugacagagagcaacaagaaguuccugccauuccagcaguuuggccgggauaucgccgauaccacagacgccguuagagauccccagacacuggaaauccuggacaucaccccuugcagcuucggcggagugucugugaucaccccuggcaccaacaccagcaaucagguggcagugcuguaccagggcgugaacuguaccgaagugcccguggccauucacgccgaucagcugacaccuacauggcggguguacuccaccggcagcaauguguuucagaccagagccggcugucugaucggagccgagcacgugaacaauagcuacgagugcgacauccccaucggcgcuggaaucugcgccagcuaccagacacagacaaacagcccucggagagccagaagcguggccagccagagcaucauugccuacacaaugucucugggcgccgagaacagcguggccuacuccaacaacucuaucgcuauccccaccaacuucaccaucagcgugaccacagagauccugccuguguccaugaccaagaccagcguggacugcaccauguacaucugcggcgauuccaccgagugcuccaaccugcugcugcaguacggcagcuucugcacccagcugaauagagcccugacagggaucgccguggaacaggacaagaacacccaagagguguucgcccaagugaagcagaucuacaagaccccuccuaucaaggacuucggcggcuucaauuucagccagauucugcccgauccuagcaagcccagcaagcggagcuucaucgaggaccugcuguucaacaaagugacacuggccgacgccggcuucaucaagcaguauggcgauugucugggcgacauugccgccagggaucugauuugcgcccagaaguuuaacggacugacagugcugccuccucugcugaccgaugagaugaucgcccaguacacaucugcccugcuggccggcacaaucacaagcggcuggacauuuggagcaggcgccgcucugcagauccccuuugcuaugcagauggccuaccgguucaacggcaucggagugacccagaaugugcuguacgagaaccagaagcugaucgccaaccaguucaacagcgccaucggcaagauccaggacagccugagcagcacagcaagcgcccugggaaagcugcaggacguggucaaccagaaugcccaggcacugaacacccuggucaagcagcuguccuccaacuucggcgccaucagcucugugcugaacgauauccugagcagacuggacccuccugaggccgaggugcagaucgacagacugaucacaggcagacugcagagccuccagacauacgugacccagcagcugaucagagccgccgagauuagagccucugccaaucuggccgccaccaagaugucugagugugugcugggccagagcaagagaguggacuuuugcggcaagggcuaccaccugaugagcuucccucagucugccccucacggcgugguguuucugcacgugacauaugugcccgcucaagagaagaauuucaccaccgcuccagccaucugccacgacggcaaagcccacuuuccuagagaaggcguguucguguccaacggcacccauugguucgugacacagcggaacuucuacgagccccagaucaucaccaccgacaacaccuucgugucuggcaacugcgacgucgugaucggcauugugaacaauaccguguacgacccucugcagcccgagcuggacagcuucaaagaggaacuggacaaguacuuuaagaaccacacaagccccgacguggaccugggcgauaucagcggaaucaaugccagcgucgugaacauccagaaagagaucgaccggcugaacgagguggccaagaaucugaacgagagccugaucgaccugcaagaacuggggaaguacgagcaguacaucaaguggcccugguacaucuggcugggcuuuaucgccggacugauugccaucgugauggucacaaucaugcuguguugcaugaccagcugcuguagcugccugaagggcuguuguagcuguggcagcugcugcaaguucgacgaggacgauucugagcccgugcugaagggcgugaaacugcacuacacaugaggacuaguuauaagacugacuagcccgaugggccucccaacgggcccuccuccccuccuugcaccgagauuaauagaucuaaaaaaaaaaaaaaaaaaaaaaaaaaaaaaaaaaaaaaaaaaaaaaaaaaaaaaaaaaaaaaaaaaaaaaaaaaaaaaaaaaaaaaaaaaaaaaaaaaaa

SEQ ID NO: 25813 - RNA, 4011 nt, Artificial Sequence
  SARS-CoV-2/Wuhan/WIV05/2019__EPI_ISL_402128 spike protein mRNA gc mod (1-1273)(K986P_V987P_H69del_V70del_D614G)
aggagaaagcuuaccauguucguguuccuggugcugcugccucugguguccagccagugugugaaccugaccaccagaacacagcugccuccagccuacaccaacagcuuuaccagaggcguguacuaccccgacaagguguucagauccagcgugcugcacucuacccaggaccuguuccugccuuucuucagcaacgugaccugguuccacgccaucuccggcaccaauggcaccaagagauucgacaaccccgugcugcccuucaacgacgggguguacuuugccagcaccgagaaguccaacaucaucagaggcuggaucuucggcaccacacuggacagcaagacccagagccugcugaucgugaacaacgccaccaacguggucaucaaagugugcgaguuccaguucugcaacgaccccuuccugggcgucuacuaccacaagaacaacaagagcuggauggaaagcgaguuccggguguacagcagcgccaacaacugcaccuucgaguacgugucccagccuuuccugauggaccuggaaggcaagcagggcaacuucaagaaccugcgcgaguucguguuuaagaacaucgacggcuacuucaagaucuacagcaagcacaccccuaucaaccucgugcgggaucugccucagggcuucucugcucuggaaccccugguggaucugcccaucggcaucaacaucacccgguuucagacacugcuggcccugcacagaagcuaccugacaccuggcgauagcagcagcggauggacagcuggugccgccgcuuacuaugugggcuaccugcagccuagaaccuuccugcugaaguacaacgagaacggcaccaucaccgacgccguggauugugcucuggauccucugagcgagacaaagugcacccugaaguccuucaccguggaaaagggcaucuaccagaccagcaacuuccgggugcagcccaccgaauccaucgugcgguuccccaauaucaccaaucugugccccuucggcgagguguucaaugccaccagauucgccucuguguacgccuggaaccggaagcggaucagcaauugcguggccgacuacuccgugcuguacaacuccgccagcuucagcaccuucaagugcuacggcguguccccuaccaagcugaacgaccugugcuucacaaacguguacgccgacagcuucgugauccggggagaugaagugcggcagauugccccuggacagacaggcaagaucgccgacuacaacuacaagcugcccgacgacuucaccggcugugugauugccuggaacagcaacaaccuggacuccaaagucggcggcaacuacaauuaccuguaccggcuguuccggaaguccaaucugaagcccuucgagcgggacaucuccaccgagaucuaucaggccggcagcaccccuuguaacggcguggaaggcuucaacugcuacuucccacugcaguccuacggcuuucagcccacaaauggcgugggcuaucagcccuacagagugguggugcugagcuucgaacugcugcaugccccugccacagugugcggcccuaagaaaagcaccaaucucgugaagaacaaaugcgugaacuucaacuucaacggccugaccggcaccggcgugcugacagagagcaacaagaaguuccugccauuccagcaguuuggccgggauaucgccgauaccacagacgccguuagagauccccagacacuggaaauccuggacaucaccccuugcagcuucggcggagugucugugaucaccccuggcaccaacaccagcaaucagguggcagugcuguaccagggcgugaacuguaccgaagugcccguggccauucacgccgaucagcugacaccuacauggcggguguacuccaccggcagcaauguguuucagaccagagccggcugucugaucggagccgagcacgugaacaauagcuacgagugcgacauccccaucggcgcuggaaucugcgccagcuaccagacacagacaaacagcccucggagagccagaagcguggccagccagagcaucauugccuacacaaugucucugggcgccgagaacagcguggccuacuccaacaacucuaucgcuauccccaccaacuucaccaucagcgugaccacagagauccugccuguguccaugaccaagaccagcguggacugcaccauguacaucugcggcgauuccaccgagugcuccaaccugcugcugcaguacggcagcuucugcacccagcugaauagagcccugacagggaucgccguggaacaggacaagaacacccaagagguguucgcccaagugaagcagaucuacaagaccccuccuaucaaggacuucggcggcuucaauuucagccagauucugcccgauccuagcaagcccagcaagcggagcuucaucgaggaccugcuguucaacaaagugacacuggccgacgccggcuucaucaagcaguauggcgauugucugggcgacauugccgccagggaucugauuugcgcccagaaguuuaacggacugacagugcugccuccucugcugaccgaugagaugaucgcccaguacacaucugcccugcuggccggcacaaucacaagcggcuggacauuuggagcaggcgccgcucugcagauccccuuugcuaugcagauggccuaccgguucaacggcaucggagugacccagaaugugcuguacgagaaccagaagcugaucgccaaccaguucaacagcgccaucggcaagauccaggacagccugagcagcacagcaagcgcccugggaaagcugcaggacguggucaaccagaaugcccaggcacugaacacccuggucaagcagcuguccuccaacuucggcgccaucagcucugugcugaacgauauccugagcagacuggacccuccugaggccgaggugcagaucgacagacugaucacaggcagacugcagagccuccagacauacgugacccagcagcugaucagagccgccgagauuagagccucugccaaucuggccgccaccaagaugucugagugugugcugggccagagcaagagaguggacuuuugcggcaagggcuaccaccugaugagcuucccucagucugccccucacggcgugguguuucugcacgugacauaugugcccgcucaagagaagaauuucaccaccgcuccagccaucugccacgacggcaaagcccacuuuccuagagaaggcguguucguguccaacggcacccauugguucgugacacagcggaacuucuacgagccccagaucaucaccaccgacaacaccuucgugucuggcaacugcgacgucgugaucggcauugugaacaauaccguguacgacccucugcagcccgagcuggacagcuucaaagaggaacuggacaaguacuuuaagaaccacacaagccccgacguggaccugggcgauaucagcggaaucaaugccagcgucgugaacauccagaaagagaucgaccggcugaacgagguggccaagaaucugaacgagagccugaucgaccugcaagaacuggggaaguacgagcaguacaucaaguggcccugguacaucuggcugggcuuuaucgccggacugauugccaucgugauggucacaaucaugcuguguugcaugaccagcugcuguagcugccugaagggcuguuguagcuguggcagcugcugcaaguucgacgaggacgauucugagcccgugcugaagggcgugaaacugcacuacacaugaggacuaguuauaagacugacuagcccgaugggccucccaacgggcccuccuccccuccuugcaccgagauuaauagaucuaaaaaaaaaaaaaaaaaaaaaaaaaaaaaaaaaaaaaaaaaaaaaaaaaaaaaaaaaaaaaaaaaaaaaaaaaaaaaaaaaaaaaaaaaaaaaaaaaaaa

SEQ ID NO: 25814 - RNA, 4017 nt, Artificial Sequence
  SARS-CoV-2/Wuhan/WIV05/2019__EPI_ISL_402128 spike protein mRNA gc mod (1-1273)(K986P_V987P_Y453F_D614G)
aggagaaagcuuaccauguucguguuccuggugcugcugccucugguguccagccagugugugaaccugaccaccagaacacagcugccuccagccuacaccaacagcuuuaccagaggcguguacuaccccgacaagguguucagauccagcgugcugcacucuacccaggaccuguuccugccuuucuucagcaacgugaccugguuccacgccauccacguguccggcaccaauggcaccaagagauucgacaaccccgugcugcccuucaacgacgggguguacuuugccagcaccgagaaguccaacaucaucagaggcuggaucuucggcaccacacuggacagcaagacccagagccugcugaucgugaacaacgccaccaacguggucaucaaagugugcgaguuccaguucugcaacgaccccuuccugggcgucuacuaccacaagaacaacaagagcuggauggaaagcgaguuccggguguacagcagcgccaacaacugcaccuucgaguacgugucccagccuuuccugauggaccuggaaggcaagcagggcaacuucaagaaccugcgcgaguucguguuuaagaacaucgacggcuacuucaagaucuacagcaagcacaccccuaucaaccucgugcgggaucugccucagggcuucucugcucuggaaccccugguggaucugcccaucggcaucaacaucacccgguuucagacacugcuggcccugcacagaagcuaccugacaccuggcgauagcagcagcggauggacagcuggugccgccgcuuacuaugugggcuaccugcagccuagaaccuuccugcugaaguacaacgagaacggcaccaucaccgacgccguggauugugcucuggauccucugagcgagacaaagugcacccugaaguccuucaccguggaaaagggcaucuaccagaccagcaacuuccgggugcagcccaccgaauccaucgugcgguuccccaauaucaccaaucugugccccuucggcgagguguucaaugccaccagauucgccucuguguacgccuggaaccggaagcggaucagcaauugcguggccgacuacuccgugcuguacaacuccgccagcuucagcaccuucaagugcuacggcguguccccuaccaagcugaacgaccugugcuucacaaacguguacgccgacagcuucgugauccggggagaugaagugcggcagauugccccuggacagacaggcaagaucgccgacuacaacuacaagcugcccgacgacuucaccggcugugugauugccuggaacagcaacaaccuggacuccaaagucggcggcaacuacaauuaccuguuccggcuguuccggaaguccaaucugaagcccuucgagcgggacaucuccaccgagaucuaucaggccggcagcaccccuuguaacggcguggaaggcuucaacugcuacuucccacugcaguccuacggcuuucagcccacaaauggcgugggcuaucagcccuacagagugguggugcugagcuucgaacugcugcaugccccugccacagugugcggcccuaagaaaagcaccaaucucgugaagaacaaaugcgugaacuucaacuucaacggccugaccggcaccggcgugcugacagagagcaacaagaaguuccugccauuccagcaguuuggccgggauaucgccgauaccacagacgccguuagagauccccagacacuggaaauccuggacaucaccccuugcagcuucggcggagugucugugaucaccccuggcaccaacaccagcaaucagguggcagugcuguaccagggcgugaacuguaccgaagugcccguggccauucacgccgaucagcugacaccuacauggcggguguacuccaccggcagcaauguguuucagaccagagccggcugucugaucggagccgagcacgugaacaauagcuacgagugcgacauccccaucggcgcuggaaucugcgccagcuaccagacacagacaaacagcccucggagagccagaagcguggccagccagagcaucauugccuacacaaugucucugggcgccgagaacagcguggccuacuccaacaacucuaucgcuauccccaccaacuucaccaucagcgugaccacagagauccugccuguguccaugaccaagaccagcguggacugcaccauguacaucugcggcgauuccaccgagugcuccaaccugcugcugcaguacggcagcuucugcacccagcugaauagagcccugacagggaucgccguggaacaggacaagaacacccaagagguguucgcccaagugaagcagaucuacaagaccccuccuaucaaggacuucggcggcuucaauuucagccagauucugcccgauccuagcaagcccagcaagcggagcuucaucgaggaccugcuguucaacaaagugacacuggccgacgccggcuucaucaagcaguauggcgauugucugggcgacauugccgccagggaucugauuugcgcccagaaguuuaacggacugacagugcugccuccucugcugaccgaugagaugaucgcccaguacacaucugcccugcuggccggcacaaucacaagcggcuggacauuuggagcaggcgccgcucugcagauccccuuugcuaugcagauggccuaccgguucaacggcaucggagugacccagaaugugcuguacgagaaccagaagcugaucgccaaccaguucaacagcgccaucggcaagauccaggacagccugagcagcacagcaagcgcccugggaaagcugcaggacguggucaaccagaaugcccaggcacugaacacccuggucaagcagcuguccuccaacuucggcgccaucagcucugugcugaacgauauccugagcagacuggacccuccugaggccgaggugcagaucgacagacugaucacaggcagacugcagagccuccagacauacgugacccagcagcugaucagagccgccgagauuagagccucugccaaucuggccgccaccaagaugucugagugugugcugggccagagcaagagaguggacuuuugcggcaagggcuaccaccugaugagcuucccucagucugccccucacggcgugguguuucugcacgugacauaugugcccgcucaagagaagaauuucaccaccgcuccagccaucugccacgacggcaaagcccacuuuccuagagaaggcguguucguguccaacggcacccauugguucgugacacagcggaacuucuacgagccccagaucaucaccaccgacaacaccuucgugucuggcaacugcgacgucgugaucggcauugugaacaauaccguguacgacccucugcagcccgagcuggacagcuucaaagaggaacuggacaaguacuuuaagaaccacacaagccccgacguggaccugggcgauaucagcggaaucaaugccagcgucgugaacauccagaaagagaucgaccggcugaacgagguggccaagaaucugaacgagagccugaucgaccugcaagaacuggggaaguacgagcaguacaucaaguggcccugguacaucuggcugggcuuuaucgccggacugauugccaucgugauggucacaaucaugcuguguugcaugaccagcugcuguagcugccugaagggcuguuguagcuguggcagcugcugcaaguucgacgaggacgauucugagcccgugcugaagggcgugaaacugcacuacacaugaggacuaguuauaagacugacuagcccgaugggccucccaacgggcccuccuccccuccuugcaccgagauuaauagaucuaaaaaaaaaaaaaaaaaaaaaaaaaaaaaaaaaaaaaaaaaaaaaaaaaaaaaaaaaaaaaaaaaaaaaaaaaaaaaaaaaaaaaaaaaaaaaaaaaaaa

SEQ ID NO: 25815 - RNA, 4017 nt, Artificial Sequence
  SARS-CoV-2/Wuhan/WIV05/2019__EPI_ISL_402128 spike protein mRNA gc mod (1-1273)(K986P_V987P_D614G_I692V)
aggagaaagcuuaccauguucguguuccuggugcugcugccucugguguccagccagugugugaaccugaccaccagaacacagcugccuccagccuacaccaacagcuuuaccagaggcguguacuaccccgacaagguguucagauccagcgugcugcacucuacccaggaccuguuccugccuuucuucagcaacgugaccugguuccacgccauccacguguccggcaccaauggcaccaagagauucgacaaccccgugcugcccuucaacgacgggguguacuuugccagcaccgagaaguccaacaucaucagaggcuggaucuucggcaccacacuggacagcaagacccagagccugcugaucgugaacaacgccaccaacguggucaucaaagugugcgaguuccaguucugcaacgaccccuuccugggcgucuacuaccacaagaacaacaagagcuggauggaaagcgaguuccggguguacagcagcgccaacaacugcaccuucgaguacgugucccagccuuuccugauggaccuggaaggcaagcagggcaacuucaagaaccugcgcgaguucguguuuaagaacaucgacggcuacuucaagaucuacagcaagcacaccccuaucaaccucgugcgggaucugccucagggcuucucugcucuggaaccccugguggaucugcccaucggcaucaacaucacccgguuucagacacugcuggcccugcacagaagcuaccugacaccuggcgauagcagcagcggauggacagcuggugccgccgcuuacuaugugggcuaccugcagccuagaaccuuccugcugaaguacaacgagaacggcaccaucaccgacgccguggauugugcucuggauccucugagcgagacaaagugcacccugaaguccuucaccguggaaaagggcaucuaccagaccagcaacuuccgggugcagcccaccgaauccaucgugcgguuccccaauaucaccaaucugugccccuucggcgagguguucaaugccaccagauucgccucuguguacgccuggaaccggaagcggaucagcaauugcguggccgacuacuccgugcuguacaacuccgccagcuucagcaccuucaagugcuacggcguguccccuaccaagcugaacgaccugugcuucacaaacguguacgccgacagcuucgugauccggggagaugaagugcggcagauugccccuggacagacaggcaagaucgccgacuacaacuacaagcugcccgacgacuucaccggcugugugauugccuggaacagcaacaaccuggacuccaaagucggcggcaacuacaauuaccuguaccggcuguuccggaaguccaaucugaagcccuucgagcgggacaucuccaccgagaucuaucaggccggcagcaccccuuguaacggcguggaaggcuucaacugcuacuucccacugcaguccuacggcuuucagcccacaaauggcgugggcuaucagcccuacagagugguggugcugagcuucgaacugcugcaugccccugccacagugugcggcccuaagaaaagcaccaaucucgugaagaacaaaugcgugaacuucaacuucaacggccugaccggcaccggcgugcugacagagagcaacaagaaguuccugccauuccagcaguuuggccgggauaucgccgauaccacagacgccguuagagauccccagacacuggaaauccuggacaucaccccuugcagcuucggcggagugucugugaucaccccuggcaccaacaccagcaaucagguggcagugcuguaccagggcgugaacuguaccgaagugcccguggccauucacgccgaucagcugacaccuacauggcggguguacuccaccggcagcaauguguuucagaccagagccggcugucugaucggagccgagcacgugaacaauagcuacgagugcgacauccccaucggcgcuggaaucugcgccagcuaccagacacagacaaacagcccucggagagccagaagcguggccagccagagcgugauugccuacacaaugucucugggcgccgagaacagcguggccuacuccaacaacucuaucgcuauccccaccaacuucaccaucagcgugaccacagagauccugccuguguccaugaccaagaccagcguggacugcaccauguacaucugcggcgauuccaccgagugcuccaaccugcugcugcaguacggcagcuucugcacccagcugaauagagcccugacagggaucgccguggaacaggacaagaacacccaagagguguucgcccaagugaagcagaucuacaagaccccuccuaucaaggacuucggcggcuucaauuucagccagauucugcccgauccuagcaagcccagcaagcggagcuucaucgaggaccugcuguucaacaaagugacacuggccgacgccggcuucaucaagcaguauggcgauugucugggcgacauugccgccagggaucugauuugcgcccagaaguuuaacggacugacagugcugccuccucugcugaccgaugagaugaucgcccaguacacaucugcccugcuggccggcacaaucacaagcggcuggacauuuggagcaggcgccgcucugcagauccccuuugcuaugcagauggccuaccgguucaacggcaucggagugacccagaaugugcuguacgagaaccagaagcugaucgccaaccaguucaacagcgccaucggcaagauccaggacagccugagcagcacagcaagcgcccugggaaagcugcaggacguggucaaccagaaugcccaggcacugaacacccuggucaagcagcuguccuccaacuucggcgccaucagcucugugcugaacgauauccugagcagacuggacccuccugaggccgaggugcagaucgacagacugaucacaggcagacugcagagccuccagacauacgugacccagcagcugaucagagccgccgagauuagagccucugccaaucuggccgccaccaagaugucugagugugugcugggccagagcaagagaguggacuuuugcggcaagggcuaccaccugaugagcuucccucagucugccccucacggcgugguguuucugcacgugacauaugugcccgcucaagagaagaauuucaccaccgcuccagccaucugccacgacggcaaagcccacuuuccuagagaaggcguguucguguccaacggcacccauugguucgugacacagcggaacuucuacgagccccagaucaucaccaccgacaacaccuucgugucuggcaacugcgacgucgugaucggcauugugaacaauaccguguacgacccucugcagcccgagcuggacagcuucaaagaggaacuggacaaguacuuuaagaaccacacaagccccgacguggaccugggcgauaucagcggaaucaaugccagcgucgugaacauccagaaagagaucgaccggcugaacgagguggccaagaaucugaacgagagccugaucgaccugcaagaacuggggaaguacgagcaguacaucaaguggcccugguacaucuggcugggcuuuaucgccggacugauugccaucgugauggucacaaucaugcuguguugcaugaccagcugcuguagcugccugaagggcuguuguagcuguggcagcugcugcaaguucgacgaggacgauucugagcccgugcugaagggcgugaaacugcacuacacaugaggacuaguuauaagacugacuagcccgaugggccucccaacgggcccuccuccccuccuugcaccgagauuaauagaucuaaaaaaaaaaaaaaaaaaaaaaaaaaaaaaaaaaaaaaaaaaaaaaaaaaaaaaaaaaaaaaaaaaaaaaaaaaaaaaaaaaaaaaaaaaaaaaaaaaaa

SEQ ID NO: 25816 - RNA, 4017 nt, Artificial Sequence
  SARS-CoV-2/Wuhan/WIV05/2019__EPI_ISL_402128 spike protein mRNA gc mod (1-1273)(K986P_V987P_D614G_M1229I)
aggagaaagcuuaccauguucguguuccuggugcugcugccucugguguccagccagugugugaaccugaccaccagaacacagcugccuccagccuacaccaacagcuuuaccagaggcguguacuaccccgacaagguguucagauccagcgugcugcacucuacccaggaccuguuccugccuuucuucagcaacgugaccugguuccacgccauccacguguccggcaccaauggcaccaagagauucgacaaccccgugcugcccuucaacgacgggguguacuuugccagcaccgagaaguccaacaucaucagaggcuggaucuucggcaccacacuggacagcaagacccagagccugcugaucgugaacaacgccaccaacguggucaucaaagugugcgaguuccaguucugcaacgaccccuuccugggcgucuacuaccacaagaacaacaagagcuggauggaaagcgaguuccggguguacagcagcgccaacaacugcaccuucgaguacgugucccagccuuuccugauggaccuggaaggcaagcagggcaacuucaagaaccugcgcgaguucguguuuaagaacaucgacggcuacuucaagaucuacagcaagcacaccccuaucaaccucgugcgggaucugccucagggcuucucugcucuggaaccccugguggaucugcccaucggcaucaacaucacccgguuucagacacugcuggcccugcacagaagcuaccugacaccuggcgauagcagcagcggauggacagcuggugccgccgcuuacuaugugggcuaccugcagccuagaaccuuccugcugaaguacaacgagaacggcaccaucaccgacgccguggauugugcucuggauccucugagcgagacaaagugcacccugaaguccuucaccguggaaaagggcaucuaccagaccagcaacuuccgggugcagcccaccgaauccaucgugcgguuccccaauaucaccaaucugugccccuucggcgagguguucaaugccaccagauucgccucuguguacgccuggaaccggaagcggaucagcaauugcguggccgacuacuccgugcuguacaacuccgccagcuucagcaccuucaagugcuacggcguguccccuaccaagcugaacgaccugugcuucacaaacguguacgccgacagcuucgugauccggggagaugaagugcggcagauugccccuggacagacaggcaagaucgccgacuacaacuacaagcugcccgacgacuucaccggcugugugauugccuggaacagcaacaaccuggacuccaaagucggcggcaacuacaauuaccuguaccggcuguuccggaaguccaaucugaagcccuucgagcgggacaucuccaccgagaucuaucaggccggcagcaccccuuguaacggcguggaaggcuucaacugcuacuucccacugcaguccuacggcuuucagcccacaaauggcgugggcuaucagcccuacagagugguggugcugagcuucgaacugcugcaugccccugccacagugugcggcccuaagaaaagcaccaaucucgugaagaacaaaugcgugaacuucaacuucaacggccugaccggcaccggcgugcugacagagagcaacaagaaguuccugccauuccagcaguuuggccgggauaucgccgauaccacagacgccguuagagauccccagacacuggaaauccuggacaucaccccuugcagcuucggcggagugucugugaucaccccuggcaccaacaccagcaaucagguggcagugcuguaccagggcgugaacuguaccgaagugcccguggccauucacgccgaucagcugacaccuacauggcggguguacuccaccggcagcaauguguuucagaccagagccggcugucugaucggagccgagcacgugaacaauagcuacgagugcgacauccccaucggcgcuggaaucugcgccagcuaccagacacagacaaacagcccucggagagccagaagcguggccagccagagcaucauugccuacacaaugucucugggcgccgagaacagcguggccuacuccaacaacucuaucgcuauccccaccaacuucaccaucagcgugaccacagagauccugccuguguccaugaccaagaccagcguggacugcaccauguacaucugcggcgauuccaccgagugcuccaaccugcugcugcaguacggcagcuucugcacccagcugaauagagcccugacagggaucgccguggaacaggacaagaacacccaagagguguucgcccaagugaagcagaucuacaagaccccuccuaucaaggacuucggcggcuucaauuucagccagauucugcccgauccuagcaagcccagcaagcggagcuucaucgaggaccugcuguucaacaaagugacacuggccgacgccggcuucaucaagcaguauggcgauugucugggcgacauugccgccagggaucugauuugcgcccagaaguuuaacggacugacagugcugccuccucugcugaccgaugagaugaucgcccaguacacaucugcccugcuggccggcacaaucacaagcggcuggacauuuggagcaggcgccgcucugcagauccccuuugcuaugcagauggccuaccgguucaacggcaucggagugacccagaaugugcuguacgagaaccagaagcugaucgccaaccaguucaacagcgccaucggcaagauccaggacagccugagcagcacagcaagcgcccugggaaagcugcaggacguggucaaccagaaugcccaggcacugaacacccuggucaagcagcuguccuccaacuucggcgccaucagcucugugcugaacgauauccugagcagacuggacccuccugaggccgaggugcagaucgacagacugaucacaggcagacugcagagccuccagacauacgugacccagcagcugaucagagccgccgagauuagagccucugccaaucuggccgccaccaagaugucugagugugugcugggccagagcaagagaguggacuuuugcggcaagggcuaccaccugaugagcuucccucagucugccccucacggcgugguguuucugcacgugacauaugugcccgcucaagagaagaauuucaccaccgcuccagccaucugccacgacggcaaagcccacuuuccuagagaaggcguguucguguccaacggcacccauugguucgugacacagcggaacuucuacgagccccagaucaucaccaccgacaacaccuucgugucuggcaacugcgacgucgugaucggcauugugaacaauaccguguacgacccucugcagcccgagcuggacagcuucaaagaggaacuggacaaguacuuuaagaaccacacaagccccgacguggaccugggcgauaucagcggaaucaaugccagcgucgugaacauccagaaagagaucgaccggcugaacgagguggccaagaaucugaacgagagccugaucgaccugcaagaacuggggaaguacgagcaguacaucaaguggcccugguacaucuggcugggcuuuaucgccggacugauugccaucgugaucgucacaaucaugcuguguugcaugaccagcugcuguagcugccugaagggcuguuguagcuguggcagcugcugcaaguucgacgaggacgauucugagcccgugcugaagggcgugaaacugcacuacacaugaggacuaguuauaagacugacuagcccgaugggccucccaacgggcccuccuccccuccuugcaccgagauuaauagaucuaaaaaaaaaaaaaaaaaaaaaaaaaaaaaaaaaaaaaaaaaaaaaaaaaaaaaaaaaaaaaaaaaaaaaaaaaaaaaaaaaaaaaaaaaaaaaaaaaaaa

SEQ ID NO: 25817 - RNA, 4011 nt, Artificial Sequence
  SARS-CoV-2/Wuhan/WIV05/2019__EPI_ISL_402128 spike protein mRNA gc mod (1-1273)(K986P_V987P_H69del_V70del_A222V_Y453F_S477N_D614G_I692V)
aggagaaagcuuaccauguucguguuccuggugcugcugccucugguguccagccagugugugaaccugaccaccagaacacagcugccuccagccuacaccaacagcuuuaccagaggcguguacuaccccgacaagguguucagauccagcgugcugcacucuacccaggaccuguuccugccuuucuucagcaacgugaccugguuccacgccaucuccggcaccaauggcaccaagagauucgacaaccccgugcugcccuucaacgacgggguguacuuugccagcaccgagaaguccaacaucaucagaggcuggaucuucggcaccacacuggacagcaagacccagagccugcugaucgugaacaacgccaccaacguggucaucaaagugugcgaguuccaguucugcaacgaccccuuccugggcgucuacuaccacaagaacaacaagagcuggauggaaagcgaguuccggguguacagcagcgccaacaacugcaccuucgaguacgugucccagccuuuccugauggaccuggaaggcaagcagggcaacuucaagaaccugcgcgaguucguguuuaagaacaucgacggcuacuucaagaucuacagcaagcacaccccuaucaaccucgugcgggaucugccucagggcuucucugugcuggaaccccugguggaucugcccaucggcaucaacaucacccgguuucagacacugcuggcccugcacagaagcuaccugacaccuggcgauagcagcagcggauggacagcuggugccgccgcuuacuaugugggcuaccugcagccuagaaccuuccugcugaaguacaacgagaacggcaccaucaccgacgccguggauugugcucuggauccucugagcgagacaaagugcacccugaaguccuucaccguggaaaagggcaucuaccagaccagcaacuuccgggugcagcccaccgaauccaucgugcgguuccccaauaucaccaaucugugccccuucggcgagguguucaaugccaccagauucgccucuguguacgccuggaaccggaagcggaucagcaauugcguggccgacuacuccgugcuguacaacuccgccagcuucagcaccuucaagugcuacggcguguccccuaccaagcugaacgaccugugcuucacaaacguguacgccgacagcuucgugauccggggagaugaagugcggcagauugccccuggacagacaggcaagaucgccgacuacaacuacaagcugcccgacgacuucaccggcugugugauugccuggaacagcaacaaccuggacuccaaagucggcggcaacuacaauuaccuguuccggcuguuccggaaguccaaucugaagcccuucgagcgggacaucuccaccgagaucuaucaggccggcaacaccccuuguaacggcguggaaggcuucaacugcuacuucccacugcaguccuacggcuuucagcccacaaauggcgugggcuaucagcccuacagagugguggugcugagcuucgaacugcugcaugccccugccacagugugcggcccuaagaaaagcaccaaucucgugaagaacaaaugcgugaacuucaacuucaacggccugaccggcaccggcgugcugacagagagcaacaagaaguuccugccauuccagcaguuuggccgggauaucgccgauaccacagacgccguuagagauccccagacacuggaaauccuggacaucaccccuugcagcuucggcggagugucugugaucaccccuggcaccaacaccagcaaucagguggcagugcuguaccagggcgugaacuguaccgaagugcccguggccauucacgccgaucagcugacaccuacauggcggguguacuccaccggcagcaauguguuucagaccagagccggcugucugaucggagccgagcacgugaacaauagcuacgagugcgacauccccaucggcgcuggaaucugcgccagcuaccagacacagacaaacagcccucggagagccagaagcguggccagccagagcgugauugccuacacaaugucucugggcgccgagaacagcguggccuacuccaacaacucuaucgcuauccccaccaacuucaccaucagcgugaccacagagauccugccuguguccaugaccaagaccagcguggacugcaccauguacaucugcggcgauuccaccgagugcuccaaccugcugcugcaguacggcagcuucugcacccagcugaauagagcccugacagggaucgccguggaacaggacaagaacacccaagagguguucgcccaagugaagcagaucuacaagaccccuccuaucaaggacuucggcggcuucaauuucagccagauucugcccgauccuagcaagcccagcaagcggagcuucaucgaggaccugcuguucaacaaagugacacuggccgacgccggcuucaucaagcaguauggcgauugucugggcgacauugccgccagggaucugauuugcgcccagaaguuuaacggacugacagugcugccuccucugcugaccgaugagaugaucgcccaguacacaucugcccugcuggccggcacaaucacaagcggcuggacauuuggagcaggcgccgcucugcagauccccuuugcuaugcagauggccuaccgguucaacggcaucggagugacccagaaugugcuguacgagaaccagaagcugaucgccaaccaguucaacagcgccaucggcaagauccaggacagccugagcagcacagcaagcgcccugggaaagcugcaggacguggucaaccagaaugcccaggcacugaacacccuggucaagcagcuguccuccaacuucggcgccaucagcucugugcugaacgauauccugagcagacuggacccuccugaggccgaggugcagaucgacagacugaucacaggcagacugcagagccuccagacauacgugacccagcagcugaucagagccgccgagauuagagccucugccaaucuggccgccaccaagaugucugagugugugcugggccagagcaagagaguggacuuuugcggcaagggcuaccaccugaugagcuucccucagucugccccucacggcgugguguuucugcacgugacauaugugcccgcucaagagaagaauuucaccaccgcuccagccaucugccacgacggcaaagcccacuuuccuagagaaggcguguucguguccaacggcacccauugguucgugacacagcggaacuucuacgagccccagaucaucaccaccgacaacaccuucgugucuggcaacugcgacgucgugaucggcauugugaacaauaccguguacgacccucugcagcccgagcuggacagcuucaaagaggaacuggacaaguacuuuaagaaccacacaagccccgacguggaccugggcgauaucagcggaaucaaugccagcgucgugaacauccagaaagagaucgaccggcugaacgagguggccaagaaucugaacgagagccugaucgaccugcaagaacuggggaaguacgagcaguacaucaaguggcccugguacaucuggcugggcuuuaucgccggacugauugccaucgugauggucacaaucaugcuguguugcaugaccagcugcuguagcugccugaagggcuguuguagcuguggcagcugcugcaaguucgacgaggacgauucugagcccgugcugaagggcgugaaacugcacuacacaugaggacuaguuauaagacugacuagcccgaugggccucccaacgggcccuccuccccuccuugcaccgagauuaauagaucuaaaaaaaaaaaaaaaaaaaaaaaaaaaaaaaaaaaaaaaaaaaaaaaaaaaaaaaaaaaaaaaaaaaaaaaaaaaaaaaaaaaaaaaaaaaaaaaaaaaa

SEQ ID NO: 25818 - RNA, 4011 nt, Artificial Sequence
  SARS-CoV-2/Wuhan/WIV05/2019__EPI_ISL_402128 spike protein mRNA gc mod (1-1273)(K986P_V987P_H69del_V70del_Y453F_D614G_I692V_M1229I)
aggagaaagcuuaccauguucguguuccuggugcugcugccucugguguccagccagugugugaaccugaccaccagaacacagcugccuccagccuacaccaacagcuuuaccagaggcguguacuaccccgacaagguguucagauccagcgugcugcacucuacccaggaccuguuccugccuuucuucagcaacgugaccugguuccacgccaucuccggcaccaauggcaccaagagauucgacaaccccgugcugcccuucaacgacgggguguacuuugccagcaccgagaaguccaacaucaucagaggcuggaucuucggcaccacacuggacagcaagacccagagccugcugaucgugaacaacgccaccaacguggucaucaaagugugcgaguuccaguucugcaacgaccccuuccugggcgucuacuaccacaagaacaacaagagcuggauggaaagcgaguuccggguguacagcagcgccaacaacugcaccuucgaguacgugucccagccuuuccugauggaccuggaaggcaagcagggcaacuucaagaaccugcgcgaguucguguuuaagaacaucgacggcuacuucaagaucuacagcaagcacaccccuaucaaccucgugcgggaucugccucagggcuucucugcucuggaaccccugguggaucugcccaucggcaucaacaucacccgguuucagacacugcuggcccugcacagaagcuaccugacaccuggcgauagcagcagcggauggacagcuggugccgccgcuuacuaugugggcuaccugcagccuagaaccuuccugcugaaguacaacgagaacggcaccaucaccgacgccguggauugugcucuggauccucugagcgagacaaagugcacccugaaguccuucaccguggaaaagggcaucuaccagaccagcaacuuccgggugcagcccaccgaauccaucgugcgguuccccaauaucaccaaucugugccccuucggcgagguguucaaugccaccagauucgccucuguguacgccuggaaccggaagcggaucagcaauugcguggccgacuacuccgugcuguacaacuccgccagcuucagcaccuucaagugcuacggcguguccccuaccaagcugaacgaccugugcuucacaaacguguacgccgacagcuucgugauccggggagaugaagugcggcagauugccccuggacagacaggcaagaucgccgacuacaacuacaagcugcccgacgacuucaccggcugugugauugccuggaacagcaacaaccuggacuccaaagucggcggcaacuacaauuaccuguuccggcuguuccggaaguccaaucugaagcccuucgagcgggacaucuccaccgagaucuaucaggccggcagcaccccuuguaacggcguggaaggcuucaacugcuacuucccacugcaguccuacggcuuucagcccacaaauggcgugggcuaucagcccuacagagugguggugcugagcuucgaacugcugcaugccccugccacagugugcggcccuaagaaaagcaccaaucucgugaagaacaaaugcgugaacuucaacuucaacggccugaccggcaccggcgugcugacagagagcaacaagaaguuccugccauuccagcaguuuggccgggauaucgccgauaccacagacgccguuagagauccccagacacuggaaauccuggacaucaccccuugcagcuucggcggagugucugugaucaccccuggcaccaacaccagcaaucagguggcagugcuguaccagggcgugaacuguaccgaagugcccguggccauucacgccgaucagcugacaccuacauggcggguguacuccaccggcagcaauguguuucagaccagagccggcugucugaucggagccgagcacgugaacaauagcuacgagugcgacauccccaucggcgcuggaaucugcgccagcuaccagacacagacaaacagcccucggagagccagaagcguggccagccagagcgugauugccuacacaaugucucugggcgccgagaacagcguggccuacuccaacaacucuaucgcuauccccaccaacuucaccaucagcgugaccacagagauccugccuguguccaugaccaagaccagcguggacugcaccauguacaucugcggcgauuccaccgagugcuccaaccugcugcugcaguacggcagcuucugcacccagcugaauagagcccugacagggaucgccguggaacaggacaagaacacccaagagguguucgcccaagugaagcagaucuacaagaccccuccuaucaaggacuucggcggcuucaauuucagccagauucugcccgauccuagcaagcccagcaagcggagcuucaucgaggaccugcuguucaacaaagugacacuggccgacgccggcuucaucaagcaguauggcgauugucugggcgacauugccgccagggaucugauuugcgcccagaaguuuaacggacugacagugcugccuccucugcugaccgaugagaugaucgcccaguacacaucugcccugcuggccggcacaaucacaagcggcuggacauuuggagcaggcgccgcucugcagauccccuuugcuaugcagauggccuaccgguucaacggcaucggagugacccagaaugugcuguacgagaaccagaagcugaucgccaaccaguucaacagcgccaucggcaagauccaggacagccugagcagcacagcaagcgcccugggaaagcugcaggacguggucaaccagaaugcccaggcacugaacacccuggucaagcagcuguccuccaacuucggcgccaucagcucugugcugaacgauauccugagcagacuggacccuccugaggccgaggugcagaucgacagacugaucacaggcagacugcagagccuccagacauacgugacccagcagcugaucagagccgccgagauuagagccucugccaaucuggccgccaccaagaugucugagugugugcugggccagagcaagagaguggacuuuugcggcaagggcuaccaccugaugagcuucccucagucugccccucacggcgugguguuucugcacgugacauaugugcccgcucaagagaagaauuucaccaccgcuccagccaucugccacgacggcaaagcccacuuuccuagagaaggcguguucguguccaacggcacccauugguucgugacacagcggaacuucuacgagccccagaucaucaccaccgacaacaccuucgugucuggcaacugcgacgucgugaucggcauugugaacaauaccguguacgacccucugcagcccgagcuggacagcuucaaagaggaacuggacaaguacuuuaagaaccacacaagccccgacguggaccugggcgauaucagcggaaucaaugccagcgucgugaacauccagaaagagaucgaccggcugaacgagguggccaagaaucugaacgagagccugaucgaccugcaagaacuggggaaguacgagcaguacaucaaguggcccugguacaucuggcugggcuuuaucgccggacugauugccaucgugaucgucacaaucaugcuguguugcaugaccagcugcuguagcugccugaagggcuguuguagcuguggcagcugcugcaaguucgacgaggacgauucugagcccgugcugaagggcgugaaacugcacuacacaugaggacuaguuauaagacugacuagcccgaugggccucccaacgggcccuccuccccuccuugcaccgagauuaauagaucuaaaaaaaaaaaaaaaaaaaaaaaaaaaaaaaaaaaaaaaaaaaaaaaaaaaaaaaaaaaaaaaaaaaaaaaaaaaaaaaaaaaaaaaaaaaaaaaaaaaa

SEQ ID NO: 25819 - RNA, 4008 nt, Artificial Sequence
  SARS-CoV-2/Wuhan/WIV05/2019__EPI_ISL_402128 spike protein mRNA gc mod (1-1273)(K986P_V987P_K986P_V987P_H69del_V70del_Y144del_N501Y_A570 D_D614G_P681H_T716I_S982A_D1118H)
aggagaaagcuuaccauguucguguuccuggugcugcugccucugguguccagccagugugugaaccugaccaccagaacacagcugccuccagccuacaccaacagcuuuaccagaggcguguacuaccccgacaagguguucagauccagcgugcugcacucuacccaggaccuguuccugccuuucuucagcaacgugaccugguuccacgccaucuccggcaccaauggcaccaagagauucgacaaccccgugcugcccuucaacgacgggguguacuuugccagcaccgagaaguccaacaucaucagaggcuggaucuucggcaccacacuggacagcaagacccagagccugcugaucgugaacaacgccaccaacguggucaucaaagugugcgaguuccaguucugcaacgaccccuuccugggcgucuaccacaagaacaacaagagcuggauggaaagcgaguuccggguguacagcagcgccaacaacugcaccuucgaguacgugucccagccuuuccugauggaccuggaaggcaagcagggcaacuucaagaaccugcgcgaguucguguuuaagaacaucgacggcuacuucaagaucuacagcaagcacaccccuaucaaccucgugcgggaucugccucagggcuucucugcucuggaaccccugguggaucugcccaucggcaucaacaucacccgguuucagacacugcuggcccugcacagaagcuaccugacaccuggcgauagcagcagcggauggacagcuggugccgccgcuuacuaugugggcuaccugcagccuagaaccuuccugcugaaguacaacgagaacggcaccaucaccgacgccguggauugugcucuggauccucugagcgagacaaagugcacccugaaguccuucaccguggaaaagggcaucuaccagaccagcaacuuccgggugcagcccaccgaauccaucgugcgguuccccaauaucaccaaucugugccccuucggcgagguguucaaugccaccagauucgccucuguguacgccuggaaccggaagcggaucagcaauugcguggccgacuacuccgugcuguacaacuccgccagcuucagcaccuucaagugcuacggcguguccccuaccaagcugaacgaccugugcuucacaaacguguacgccgacagcuucgugauccggggagaugaagugcggcagauugccccuggacagacaggcaagaucgccgacuacaacuacaagcugcccgacgacuucaccggcugugugauugccuggaacagcaacaaccuggacuccaaagucggcggcaacuacaauuaccuguaccggcuguuccggaaguccaaucugaagcccuucgagcgggacaucuccaccgagaucuaucaggccggcagcaccccuuguaacggcguggaaggcuucaacugcuacuucccacugcaguccuacggcuuucagcccacauacggcgugggcuaucagcccuacagagugguggugcugagcuucgaacugcugcaugccccugccacagugugcggcccuaagaaaagcaccaaucucgugaagaacaaaugcgugaacuucaacuucaacggccugaccggcaccggcgugcugacagagagcaacaagaaguuccugccauuccagcaguuuggccgggauaucgacgauaccacagacgccguuagagauccccagacacuggaaauccuggacaucaccccuugcagcuucggcggagugucugugaucaccccuggcaccaacaccagcaaucagguggcagugcuguaccagggcgugaacuguaccgaagugcccguggccauucacgccgaucagcugacaccuacauggcggguguacuccaccggcagcaauguguuucagaccagagccggcugucugaucggagccgagcacgugaacaauagcuacgagugcgacauccccaucggcgcuggaaucugcgccagcuaccagacacagacaaacagccaccggagagccagaagcguggccagccagagcaucauugccuacacaaugucucugggcgccgagaacagcguggccuacuccaacaacucuaucgcuauccccaucaacuucaccaucagcgugaccacagagauccugccuguguccaugaccaagaccagcguggacugcaccauguacaucugcggcgauuccaccgagugcuccaaccugcugcugcaguacggcagcuucugcacccagcugaauagagcccugacagggaucgccguggaacaggacaagaacacccaagagguguucgcccaagugaagcagaucuacaagaccccuccuaucaaggacuucggcggcuucaauuucagccagauucugcccgauccuagcaagcccagcaagcggagcuucaucgaggaccugcuguucaacaaagugacacuggccgacgccggcuucaucaagcaguauggcgauugucugggcgacauugccgccagggaucugauuugcgcccagaaguuuaacggacugacagugcugccuccucugcugaccgaugagaugaucgcccaguacacaucugcccugcuggccggcacaaucacaagcggcuggacauuuggagcaggcgccgcucugcagauccccuuugcuaugcagauggccuaccgguucaacggcaucggagugacccagaaugugcuguacgagaaccagaagcugaucgccaaccaguucaacagcgccaucggcaagauccaggacagccugagcagcacagcaagcgcccugggaaagcugcaggacguggucaaccagaaugcccaggcacugaacacccuggucaagcagcuguccuccaacuucggcgccaucagcucugugcugaacgauauccuggccagacuggacccuccugaggccgaggugcagaucgacagacugaucacaggcagacugcagagccuccagacauacgugacccagcagcugaucagagccgccgagauuagagccucugccaaucuggccgccaccaagaugucugagugugugcugggccagagcaagagaguggacuuuugcggcaagggcuaccaccugaugagcuucccucagucugccccucacggcgugguguuucugcacgugacauaugugcccgcucaagagaagaauuucaccaccgcuccagccaucugccacgacggcaaagcccacuuuccuagagaaggcguguucguguccaacggcacccauugguucgugacacagcggaacuucuacgagccccagaucaucaccacccacaacaccuucgugucuggcaacugcgacgucgugaucggcauugugaacaauaccguguacgacccucugcagcccgagcuggacagcuucaaagaggaacuggacaaguacuuuaagaaccacacaagccccgacguggaccugggcgauaucagcggaaucaaugccagcgucgugaacauccagaaagagaucgaccggcugaacgagguggccaagaaucugaacgagagccugaucgaccugcaagaacuggggaaguacgagcaguacaucaaguggcccugguacaucuggcugggcuuuaucgccggacugauugccaucgugauggucacaaucaugcuguguugcaugaccagcugcuguagcugccugaagggcuguuguagcuguggcagcugcugcaaguucgacgaggacgauucugagcccgugcugaagggcgugaaacugcacuacacaugaggacuaguuauaagacugacuagcccgaugggccucccaacgggcccuccuccccuccuugcaccgagauuaauagaucuaaaaaaaaaaaaaaaaaaaaaaaaaaaaaaaaaaaaaaaaaaaaaaaaaaaaaaaaaaaaaaaaaaaaaaaaaaaaaaaaaaaaaaaaaaaaaaaaaaaa

SEQ ID NO: 25820 - RNA, 4017 nt, Artificial Sequence
  SARS-CoV-2/Wuhan/WIV05/2019__EPI_ISL_402128 spike protein mRNA gc mod (1-1273)(K986P_V987P_K986P_V987P_K417N_E484K_N501Y_D614G)
aggagaaagcuuaccauguucguguuccuggugcugcugccucugguguccagccagugugugaaccugaccaccagaacacagcugccuccagccuacaccaacagcuuuaccagaggcguguacuaccccgacaagguguucagauccagcgugcugcacucuacccaggaccuguuccugccuuucuucagcaacgugaccugguuccacgccauccacguguccggcaccaauggcaccaagagauucgacaaccccgugcugcccuucaacgacgggguguacuuugccagcaccgagaaguccaacaucaucagaggcuggaucuucggcaccacacuggacagcaagacccagagccugcugaucgugaacaacgccaccaacguggucaucaaagugugcgaguuccaguucugcaacgaccccuuccugggcgucuacuaccacaagaacaacaagagcuggauggaaagcgaguuccggguguacagcagcgccaacaacugcaccuucgaguacgugucccagccuuuccugauggaccuggaaggcaagcagggcaacuucaagaaccugcgcgaguucguguuuaagaacaucgacggcuacuucaagaucuacagcaagcacaccccuaucaaccucgugcgggaucugccucagggcuucucugcucuggaaccccugguggaucugcccaucggcaucaacaucacccgguuucagacacugcuggcccugcacagaagcuaccugacaccuggcgauagcagcagcggauggacagcuggugccgccgcuuacuaugugggcuaccugcagccuagaaccuuccugcugaaguacaacgagaacggcaccaucaccgacgccguggauugugcucuggauccucugagcgagacaaagugcacccugaaguccuucaccguggaaaagggcaucuaccagaccagcaacuuccgggugcagcccaccgaauccaucgugcgguuccccaauaucaccaaucugugccccuucggcgagguguucaaugccaccagauucgccucuguguacgccuggaaccggaagcggaucagcaauugcguggccgacuacuccgugcuguacaacuccgccagcuucagcaccuucaagugcuacggcguguccccuaccaagcugaacgaccugugcuucacaaacguguacgccgacagcuucgugauccggggagaugaagugcggcagauugccccuggacagacaggcaacaucgccgacuacaacuacaagcugcccgacgacuucaccggcugugugauugccuggaacagcaacaaccuggacuccaaagucggcggcaacuacaauuaccuguaccggcuguuccggaaguccaaucugaagcccuucgagcgggacaucuccaccgagaucuaucaggccggcagcaccccuuguaacggcgugaagggcuucaacugcuacuucccacugcaguccuacggcuuucagcccacauacggcgugggcuaucagcccuacagagugguggugcugagcuucgaacugcugcaugccccugccacagugugcggcccuaagaaaagcaccaaucucgugaagaacaaaugcgugaacuucaacuucaacggccugaccggcaccggcgugcugacagagagcaacaagaaguuccugccauuccagcaguuuggccgggauaucgccgauaccacagacgccguuagagauccccagacacuggaaauccuggacaucaccccuugcagcuucggcggagugucugugaucaccccuggcaccaacaccagcaaucagguggcagugcuguaccagggcgugaacuguaccgaagugcccguggccauucacgccgaucagcugacaccuacauggcggguguacuccaccggcagcaauguguuucagaccagagccggcugucugaucggagccgagcacgugaacaauagcuacgagugcgacauccccaucggcgcuggaaucugcgccagcuaccagacacagacaaacagcccucggagagccagaagcguggccagccagagcaucauugccuacacaaugucucugggcgccgagaacagcguggccuacuccaacaacucuaucgcuauccccaccaacuucaccaucagcgugaccacagagauccugccuguguccaugaccaagaccagcguggacugcaccauguacaucugcggcgauuccaccgagugcuccaaccugcugcugcaguacggcagcuucugcacccagcugaauagagcccugacagggaucgccguggaacaggacaagaacacccaagagguguucgcccaagugaagcagaucuacaagaccccuccuaucaaggacuucggcggcuucaauuucagccagauucugcccgauccuagcaagcccagcaagcggagcuucaucgaggaccugcuguucaacaaagugacacuggccgacgccggcuucaucaagcaguauggcgauugucugggcgacauugccgccagggaucugauuugcgcccagaaguuuaacggacugacagugcugccuccucugcugaccgaugagaugaucgcccaguacacaucugcccugcuggccggcacaaucacaagcggcuggacauuuggagcaggcgccgcucugcagauccccuuugcuaugcagauggccuaccgguucaacggcaucggagugacccagaaugugcuguacgagaaccagaagcugaucgccaaccaguucaacagcgccaucggcaagauccaggacagccugagcagcacagcaagcgcccugggaaagcugcaggacguggucaaccagaaugcccaggcacugaacacccuggucaagcagcuguccuccaacuucggcgccaucagcucugugcugaacgauauccugagcagacuggacccuccugaggccgaggugcagaucgacagacugaucacaggcagacugcagagccuccagacauacgugacccagcagcugaucagagccgccgagauuagagccucugccaaucuggccgccaccaagaugucugagugugugcugggccagagcaagagaguggacuuuugcggcaagggcuaccaccugaugagcuucccucagucugccccucacggcgugguguuucugcacgugacauaugugcccgcucaagagaagaauuucaccaccgcuccagccaucugccacgacggcaaagcccacuuuccuagagaaggcguguucguguccaacggcacccauugguucgugacacagcggaacuucuacgagccccagaucaucaccaccgacaacaccuucgugucuggcaacugcgacgucgugaucggcauugugaacaauaccguguacgacccucugcagcccgagcuggacagcuucaaagaggaacuggacaaguacuuuaagaaccacacaagccccgacguggaccugggcgauaucagcggaaucaaugccagcgucgugaacauccagaaagagaucgaccggcugaacgagguggccaagaaucugaacgagagccugaucgaccugcaagaacuggggaaguacgagcaguacaucaaguggcccugguacaucuggcugggcuuuaucgccggacugauugccaucgugauggucacaaucaugcuguguugcaugaccagcugcuguagcugccugaagggcuguuguagcuguggcagcugcugcaaguucgacgaggacgauucugagcccgugcugaagggcgugaaacugcacuacacaugaggacuaguuauaagacugacuagcccgaugggccucccaacgggcccuccuccccuccuugcaccgagauuaauagaucuaaaaaaaaaaaaaaaaaaaaaaaaaaaaaaaaaaaaaaaaaaaaaaaaaaaaaaaaaaaaaaaaaaaaaaaaaaaaaaaaaaaaaaaaaaaaaaaaaaaa

SEQ ID NO: 25821 - RNA, 4008 nt, Artificial Sequence
  SARS-CoV-2/Wuhan/WIV05/2019__EPI_ISL_402128 spike protein mRNA gc mod (1-1273)(K986P_V987P_K986P_V987P_L18F_D80A_D215G_L242del_A243del_ L244del_R246I_K417N_E484K_N501Y_D614G_A701V)
aggagaaagcuuaccauguucguguuccuggugcugcugccucugguguccagccagugugugaacuucaccaccagaacacagcugccuccagccuacaccaacagcuuuaccagaggcguguacuaccccgacaagguguucagauccagcgugcugcacucuacccaggaccuguuccugccuuucuucagcaacgugaccugguuccacgccauccacguguccggcaccaauggcaccaagagauucgccaaccccgugcugcccuucaacgacgggguguacuuugccagcaccgagaaguccaacaucaucagaggcuggaucuucggcaccacacuggacagcaagacccagagccugcugaucgugaacaacgccaccaacguggucaucaaagugugcgaguuccaguucugcaacgaccccuuccugggcgucuacuaccacaagaacaacaagagcuggauggaaagcgaguuccggguguacagcagcgccaacaacugcaccuucgaguacgugucccagccuuuccugauggaccuggaaggcaagcagggcaacuucaagaaccugcgcgaguucguguuuaagaacaucgacggcuacuucaagaucuacagcaagcacaccccuaucaaccucgugcggggccugccucagggcuucucugcucuggaaccccugguggaucugcccaucggcaucaacaucacccgguuucagacacugcacaucagcuaccugacaccuggcgauagcagcagcggauggacagcuggugccgccgcuuacuaugugggcuaccugcagccuagaaccuuccugcugaaguacaacgagaacggcaccaucaccgacgccguggauugugcucuggauccucugagcgagacaaagugcacccugaaguccuucaccguggaaaagggcaucuaccagaccagcaacuuccgggugcagcccaccgaauccaucgugcgguuccccaauaucaccaaucugugccccuucggcgagguguucaaugccaccagauucgccucuguguacgccuggaaccggaagcggaucagcaauugcguggccgacuacuccgugcuguacaacuccgccagcuucagcaccuucaagugcuacggcguguccccuaccaagcugaacgaccugugcuucacaaacguguacgccgacagcuucgugauccggggagaugaagugcggcagauugccccuggacagacaggcaacaucgccgacuacaacuacaagcugcccgacgacuucaccggcugugugauugccuggaacagcaacaaccuggacuccaaagucggcggcaacuacaauuaccuguaccggcuguuccggaaguccaaucugaagcccuucgagcgggacaucuccaccgagaucuaucaggccggcagcaccccuuguaacggcgugaagggcuucaacugcuacuucccacugcaguccuacggcuuucagcccacauacggcgugggcuaucagcccuacagagugguggugcugagcuucgaacugcugcaugccccugccacagugugcggcccuaagaaaagcaccaaucucgugaagaacaaaugcgugaacuucaacuucaacggccugaccggcaccggcgugcugacagagagcaacaagaaguuccugccauuccagcaguuuggccgggauaucgccgauaccacagacgccguuagagauccccagacacuggaaauccuggacaucaccccuugcagcuucggcggagugucugugaucaccccuggcaccaacaccagcaaucagguggcagugcuguaccagggcgugaacuguaccgaagugcccguggccauucacgccgaucagcugacaccuacauggcggguguacuccaccggcagcaauguguuucagaccagagccggcugucugaucggagccgagcacgugaacaauagcuacgagugcgacauccccaucggcgcuggaaucugcgccagcuaccagacacagacaaacagcccucggagagccagaagcguggccagccagagcaucauugccuacacaaugucucugggcguggagaacagcguggccuacuccaacaacucuaucgcuauccccaccaacuucaccaucagcgugaccacagagauccugccuguguccaugaccaagaccagcguggacugcaccauguacaucugcggcgauuccaccgagugcuccaaccugcugcugcaguacggcagcuucugcacccagcugaauagagcccugacagggaucgccguggaacaggacaagaacacccaagagguguucgcccaagugaagcagaucuacaagaccccuccuaucaaggacuucggcggcuucaauuucagccagauucugcccgauccuagcaagcccagcaagcggagcuucaucgaggaccugcuguucaacaaagugacacuggccgacgccggcuucaucaagcaguauggcgauugucugggcgacauugccgccagggaucugauuugcgcccagaaguuuaacggacugacagugcugccuccucugcugaccgaugagaugaucgcccaguacacaucugcccugcuggccggcacaaucacaagcggcuggacauuuggagcaggcgccgcucugcagauccccuuugcuaugcagauggccuaccgguucaacggcaucggagugacccagaaugugcuguacgagaaccagaagcugaucgccaaccaguucaacagcgccaucggcaagauccaggacagccugagcagcacagcaagcgcccugggaaagcugcaggacguggucaaccagaaugcccaggcacugaacacccuggucaagcagcuguccuccaacuucggcgccaucagcucugugcugaacgauauccugagcagacuggacccuccugaggccgaggugcagaucgacagacugaucacaggcagacugcagagccuccagacauacgugacccagcagcugaucagagccgccgagauuagagccucugccaaucuggccgccaccaagaugucugagugugugcugggccagagcaagagaguggacuuuugcggcaagggcuaccaccugaugagcuucccucagucugccccucacggcgugguguuucugcacgugacauaugugcccgcucaagagaagaauuucaccaccgcuccagccaucugccacgacggcaaagcccacuuuccuagagaaggcguguucguguccaacggcacccauugguucgugacacagcggaacuucuacgagccccagaucaucaccaccgacaacaccuucgugucuggcaacugcgacgucgugaucggcauugugaacaauaccguguacgacccucugcagcccgagcuggacagcuucaaagaggaacuggacaaguacuuuaagaaccacacaagccccgacguggaccugggcgauaucagcggaaucaaugccagcgucgugaacauccagaaagagaucgaccggcugaacgagguggccaagaaucugaacgagagccugaucgaccugcaagaacuggggaaguacgagcaguacaucaaguggcccugguacaucuggcugggcuuuaucgccggacugauugccaucgugauggucacaaucaugcuguguugcaugaccagcugcuguagcugccugaagggcuguuguagcuguggcagcugcugcaaguucgacgaggacgauucugagcccgugcugaagggcgugaaacugcacuacacaugaggacuaguuauaagacugacuagcccgaugggccucccaacgggcccuccuccccuccuugcaccgagauuaauagaucuaaaaaaaaaaaaaaaaaaaaaaaaaaaaaaaaaaaaaaaaaaaaaaaaaaaaaaaaaaaaaaaaaaaaaaaaaaaaaaaaaaaaaaaaaaaaaaaaaaaa

SEQ ID NO: 25822 - RNA, 4017 nt, Artificial Sequence
  SARS-CoV-2/Wuhan/WIV05/2019__EPI_ISL_402128 spike protein mRNA gc mod (1-1273)(K986P_V987P_K986P_V987P_E484K_D614G)
aggagaaagcuuaccauguucguguuccuggugcugcugccucugguguccagccagugugugaaccugaccaccagaacacagcugccuccagccuacaccaacagcuuuaccagaggcguguacuaccccgacaagguguucagauccagcgugcugcacucuacccaggaccuguuccugccuuucuucagcaacgugaccugguuccacgccauccacguguccggcaccaauggcaccaagagauucgacaaccccgugcugcccuucaacgacgggguguacuuugccagcaccgagaaguccaacaucaucagaggcuggaucuucggcaccacacuggacagcaagacccagagccugcugaucgugaacaacgccaccaacguggucaucaaagugugcgaguuccaguucugcaacgaccccuuccugggcgucuacuaccacaagaacaacaagagcuggauggaaagcgaguuccggguguacagcagcgccaacaacugcaccuucgaguacgugucccagccuuuccugauggaccuggaaggcaagcagggcaacuucaagaaccugcgcgaguucguguuuaagaacaucgacggcuacuucaagaucuacagcaagcacaccccuaucaaccucgugcgggaucugccucagggcuucucugcucuggaaccccugguggaucugcccaucggcaucaacaucacccgguuucagacacugcuggcccugcacagaagcuaccugacaccuggcgauagcagcagcggauggacagcuggugccgccgcuuacuaugugggcuaccugcagccuagaaccuuccugcugaaguacaacgagaacggcaccaucaccgacgccguggauugugcucuggauccucugagcgagacaaagugcacccugaaguccuucaccguggaaaagggcaucuaccagaccagcaacuuccgggugcagcccaccgaauccaucgugcgguuccccaauaucaccaaucugugccccuucggcgagguguucaaugccaccagauucgccucuguguacgccuggaaccggaagcggaucagcaauugcguggccgacuacuccgugcuguacaacuccgccagcuucagcaccuucaagugcuacggcguguccccuaccaagcugaacgaccugugcuucacaaacguguacgccgacagcuucgugauccggggagaugaagugcggcagauugccccuggacagacaggcaagaucgccgacuacaacuacaagcugcccgacgacuucaccggcugugugauugccuggaacagcaacaaccuggacuccaaagucggcggcaacuacaauuaccuguaccggcuguuccggaaguccaaucugaagcccuucgagcgggacaucuccaccgagaucuaucaggccggcagcaccccuuguaacggcgugaagggcuucaacugcuacuucccacugcaguccuacggcuuucagcccacaaauggcgugggcuaucagcccuacagagugguggugcugagcuucgaacugcugcaugccccugccacagugugcggcccuaagaaaagcaccaaucucgugaagaacaaaugcgugaacuucaacuucaacggccugaccggcaccggcgugcugacagagagcaacaagaaguuccugccauuccagcaguuuggccgggauaucgccgauaccacagacgccguuagagauccccagacacuggaaauccuggacaucaccccuugcagcuucggcggagugucugugaucaccccuggcaccaacaccagcaaucagguggcagugcuguaccagggcgugaacuguaccgaagugcccguggccauucacgccgaucagcugacaccuacauggcggguguacuccaccggcagcaauguguuucagaccagagccggcugucugaucggagccgagcacgugaacaauagcuacgagugcgacauccccaucggcgcuggaaucugcgccagcuaccagacacagacaaacagcccucggagagccagaagcguggccagccagagcaucauugccuacacaaugucucugggcgccgagaacagcguggccuacuccaacaacucuaucgcuauccccaccaacuucaccaucagcgugaccacagagauccugccuguguccaugaccaagaccagcguggacugcaccauguacaucugcggcgauuccaccgagugcuccaaccugcugcugcaguacggcagcuucugcacccagcugaauagagcccugacagggaucgccguggaacaggacaagaacacccaagagguguucgcccaagugaagcagaucuacaagaccccuccuaucaaggacuucggcggcuucaauuucagccagauucugcccgauccuagcaagcccagcaagcggagcuucaucgaggaccugcuguucaacaaagugacacuggccgacgccggcuucaucaagcaguauggcgauugucugggcgacauugccgccagggaucugauuugcgcccagaaguuuaacggacugacagugcugccuccucugcugaccgaugagaugaucgcccaguacacaucugcccugcuggccggcacaaucacaagcggcuggacauuuggagcaggcgccgcucugcagauccccuuugcuaugcagauggccuaccgguucaacggcaucggagugacccagaaugugcuguacgagaaccagaagcugaucgccaaccaguucaacagcgccaucggcaagauccaggacagccugagcagcacagcaagcgcccugggaaagcugcaggacguggucaaccagaaugcccaggcacugaacacccuggucaagcagcuguccuccaacuucggcgccaucagcucugugcugaacgauauccugagcagacuggacccuccugaggccgaggugcagaucgacagacugaucacaggcagacugcagagccuccagacauacgugacccagcagcugaucagagccgccgagauuagagccucugccaaucuggccgccaccaagaugucugagugugugcugggccagagcaagagaguggacuuuugcggcaagggcuaccaccugaugagcuucccucagucugccccucacggcgugguguuucugcacgugacauaugugcccgcucaagagaagaauuucaccaccgcuccagccaucugccacgacggcaaagcccacuuuccuagagaaggcguguucguguccaacggcacccauugguucgugacacagcggaacuucuacgagccccagaucaucaccaccgacaacaccuucgugucuggcaacugcgacgucgugaucggcauugugaacaauaccguguacgacccucugcagcccgagcuggacagcuucaaagaggaacuggacaaguacuuuaagaaccacacaagccccgacguggaccugggcgauaucagcggaaucaaugccagcgucgugaacauccagaaagagaucgaccggcugaacgagguggccaagaaucugaacgagagccugaucgaccugcaagaacuggggaaguacgagcaguacaucaaguggcccugguacaucuggcugggcuuuaucgccggacugauugccaucgugauggucacaaucaugcuguguugcaugaccagcugcuguagcugccugaagggcuguuguagcuguggcagcugcugcaaguucgacgaggacgauucugagcccgugcugaagggcgugaaacugcacuacacaugaggacuaguuauaagacugacuagcccgaugggccucccaacgggcccuccuccccuccuugcaccgagauuaauagaucuaaaaaaaaaaaaaaaaaaaaaaaaaaaaaaaaaaaaaaaaaaaaaaaaaaaaaaaaaaaaaaaaaaaaaaaaaaaaaaaaaaaaaaaaaaaaaaaaaaaa

SEQ ID NO: 25823 - RNA, 4017 nt, Artificial Sequence
  SARS-CoV-2/Wuhan/WIV05/2019__EPI_ISL_402128 spike protein mRNA gc mod (1-1273)(K986P_V987P_K986P_V987P_L18F_T20N_P26S_D138Y_R190S_K417T _E484K_N501Y_D614G_H655Y_T1027I)
aggagaaagcuuaccauguucguguuccuggugcugcugccucugguguccagccagugugugaacuucaccaacagaacacagcugccuagcgccuacaccaacagcuuuaccagaggcguguacuaccccgacaagguguucagauccagcgugcugcacucuacccaggaccuguuccugccuuucuucagcaacgugaccugguuccacgccauccacguguccggcaccaauggcaccaagagauucgacaaccccgugcugcccuucaacgacgggguguacuuugccagcaccgagaaguccaacaucaucagaggcuggaucuucggcaccacacuggacagcaagacccagagccugcugaucgugaacaacgccaccaacguggucaucaaagugugcgaguuccaguucugcaacuaccccuuccugggcgucuacuaccacaagaacaacaagagcuggauggaaagcgaguuccggguguacagcagcgccaacaacugcaccuucgaguacgugucccagccuuuccugauggaccuggaaggcaagcagggcaacuucaagaaccugagcgaguucguguuuaagaacaucgacggcuacuucaagaucuacagcaagcacaccccuaucaaccucgugcgggaucugccucagggcuucucugcucuggaaccccugguggaucugcccaucggcaucaacaucacccgguuucagacacugcuggcccugcacagaagcuaccugacaccuggcgauagcagcagcggauggacagcuggugccgccgcuuacuaugugggcuaccugcagccuagaaccuuccugcugaaguacaacgagaacggcaccaucaccgacgccguggauugugcucuggauccucugagcgagacaaagugcacccugaaguccuucaccguggaaaagggcaucuaccagaccagcaacuuccgggugcagcccaccgaauccaucgugcgguuccccaauaucaccaaucugugccccuucggcgagguguucaaugccaccagauucgccucuguguacgccuggaaccggaagcggaucagcaauugcguggccgacuacuccgugcuguacaacuccgccagcuucagcaccuucaagugcuacggcguguccccuaccaagcugaacgaccugugcuucacaaacguguacgccgacagcuucgugauccggggagaugaagugcggcagauugccccuggacagacaggcaccaucgccgacuacaacuacaagcugcccgacgacuucaccggcugugugauugccuggaacagcaacaaccuggacuccaaagucggcggcaacuacaauuaccuguaccggcuguuccggaaguccaaucugaagcccuucgagcgggacaucuccaccgagaucuaucaggccggcagcaccccuuguaacggcgugaagggcuucaacugcuacuucccacugcaguccuacggcuuucagcccacauacggcgugggcuaucagcccuacagagugguggugcugagcuucgaacugcugcaugccccugccacagugugcggcccuaagaaaagcaccaaucucgugaagaacaaaugcgugaacuucaacuucaacggccugaccggcaccggcgugcugacagagagcaacaagaaguuccugccauuccagcaguuuggccgggauaucgccgauaccacagacgccguuagagauccccagacacuggaaauccuggacaucaccccuugcagcuucggcggagugucugugaucaccccuggcaccaacaccagcaaucagguggcagugcuguaccagggcgugaacuguaccgaagugcccguggccauucacgccgaucagcugacaccuacauggcggguguacuccaccggcagcaauguguuucagaccagagccggcugucugaucggagccgaguacgugaacaauagcuacgagugcgacauccccaucggcgcuggaaucugcgccagcuaccagacacagacaaacagcccucggagagccagaagcguggccagccagagcaucauugccuacacaaugucucugggcgccgagaacagcguggccuacuccaacaacucuaucgcuauccccaccaacuucaccaucagcgugaccacagagauccugccuguguccaugaccaagaccagcguggacugcaccauguacaucugcggcgauuccaccgagugcuccaaccugcugcugcaguacggcagcuucugcacccagcugaauagagcccugacagggaucgccguggaacaggacaagaacacccaagagguguucgcccaagugaagcagaucuacaagaccccuccuaucaaggacuucggcggcuucaauuucagccagauucugcccgauccuagcaagcccagcaagcggagcuucaucgaggaccugcuguucaacaaagugacacuggccgacgccggcuucaucaagcaguauggcgauugucugggcgacauugccgccagggaucugauuugcgcccagaaguuuaacggacugacagugcugccuccucugcugaccgaugagaugaucgcccaguacacaucugcccugcuggccggcacaaucacaagcggcuggacauuuggagcaggcgccgcucugcagauccccuuugcuaugcagauggccuaccgguucaacggcaucggagugacccagaaugugcuguacgagaaccagaagcugaucgccaaccaguucaacagcgccaucggcaagauccaggacagccugagcagcacagcaagcgcccugggaaagcugcaggacguggucaaccagaaugcccaggcacugaacacccuggucaagcagcuguccuccaacuucggcgccaucagcucugugcugaacgauauccugagcagacuggacccuccugaggccgaggugcagaucgacagacugaucacaggcagacugcagagccuccagacauacgugacccagcagcugaucagagccgccgagauuagagccucugccaaucuggccgccaucaagaugucugagugugugcugggccagagcaagagaguggacuuuugcggcaagggcuaccaccugaugagcuucccucagucugccccucacggcgugguguuucugcacgugacauaugugcccgcucaagagaagaauuucaccaccgcuccagccaucugccacgacggcaaagcccacuuuccuagagaaggcguguucguguccaacggcacccauugguucgugacacagcggaacuucuacgagccccagaucaucaccaccgacaacaccuucgugucuggcaacugcgacgucgugaucggcauugugaacaauaccguguacgacccucugcagcccgagcuggacagcuucaaagaggaacuggacaaguacuuuaagaaccacacaagccccgacguggaccugggcgauaucagcggaaucaaugccagcgucgugaacauccagaaagagaucgaccggcugaacgagguggccaagaaucugaacgagagccugaucgaccugcaagaacuggggaaguacgagcaguacaucaaguggcccugguacaucuggcugggcuuuaucgccggacugauugccaucgugauggucacaaucaugcuguguugcaugaccagcugcuguagcugccugaagggcuguuguagcuguggcagcugcugcaaguucgacgaggacgauucugagcccgugcugaagggcgugaaacugcacuacacaugaggacuaguuauaagacugacuagcccgaugggccucccaacgggcccuccuccccuccuugcaccgagauuaauagaucuaaaaaaaaaaaaaaaaaaaaaaaaaaaaaaaaaaaaaaaaaaaaaaaaaaaaaaaaaaaaaaaaaaaaaaaaaaaaaaaaaaaaaaaaaaaaaaaaaaaa

SEQ ID NO: 25824 - RNA, 4017 nt, Artificial Sequence
  SARS-CoV-2/Wuhan/WIV05/2019__EPI_ISL_402128 spike protein mRNA gc mod (1-1273)(K986P_V987P_K986P_V987P_S13I_W152C_L452R_D614G)
aggagaaagcuuaccauguucguguuccuggugcugcugccucugguguccauccagugugugaaccugaccaccagaacacagcugccuccagccuacaccaacagcuuuaccagaggcguguacuaccccgacaagguguucagauccagcgugcugcacucuacccaggaccuguuccugccuuucuucagcaacgugaccugguuccacgccauccacguguccggcaccaauggcaccaagagauucgacaaccccgugcugcccuucaacgacgggguguacuuugccagcaccgagaaguccaacaucaucagaggcuggaucuucggcaccacacuggacagcaagacccagagccugcugaucgugaacaacgccaccaacguggucaucaaagugugcgaguuccaguucugcaacgaccccuuccugggcgucuacuaccacaagaacaacaagagcugcauggaaagcgaguuccggguguacagcagcgccaacaacugcaccuucgaguacgugucccagccuuuccugauggaccuggaaggcaagcagggcaacuucaagaaccugcgcgaguucguguuuaagaacaucgacggcuacuucaagaucuacagcaagcacaccccuaucaaccucgugcgggaucugccucagggcuucucugcucuggaaccccugguggaucugcccaucggcaucaacaucacccgguuucagacacugcuggcccugcacagaagcuaccugacaccuggcgauagcagcagcggauggacagcuggugccgccgcuuacuaugugggcuaccugcagccuagaaccuuccugcugaaguacaacgagaacggcaccaucaccgacgccguggauugugcucuggauccucugagcgagacaaagugcacccugaaguccuucaccguggaaaagggcaucuaccagaccagcaacuuccgggugcagcccaccgaauccaucgugcgguuccccaauaucaccaaucugugccccuucggcgagguguucaaugccaccagauucgccucuguguacgccuggaaccggaagcggaucagcaauugcguggccgacuacuccgugcuguacaacuccgccagcuucagcaccuucaagugcuacggcguguccccuaccaagcugaacgaccugugcuucacaaacguguacgccgacagcuucgugauccggggagaugaagugcggcagauugccccuggacagacaggcaagaucgccgacuacaacuacaagcugcccgacgacuucaccggcugugugauugccuggaacagcaacaaccuggacuccaaagucggcggcaacuacaauuaccgcuaccggcuguuccggaaguccaaucugaagcccuucgagcgggacaucuccaccgagaucuaucaggccggcagcaccccuuguaacggcguggaaggcuucaacugcuacuucccacugcaguccuacggcuuucagcccacaaauggcgugggcuaucagcccuacagagugguggugcugagcuucgaacugcugcaugccccugccacagugugcggcccuaagaaaagcaccaaucucgugaagaacaaaugcgugaacuucaacuucaacggccugaccggcaccggcgugcugacagagagcaacaagaaguuccugccauuccagcaguuuggccgggauaucgccgauaccacagacgccguuagagauccccagacacuggaaauccuggacaucaccccuugcagcuucggcggagugucugugaucaccccuggcaccaacaccagcaaucagguggcagugcuguaccagggcgugaacuguaccgaagugcccguggccauucacgccgaucagcugacaccuacauggcggguguacuccaccggcagcaauguguuucagaccagagccggcugucugaucggagccgagcacgugaacaauagcuacgagugcgacauccccaucggcgcuggaaucugcgccagcuaccagacacagacaaacagcccucggagagccagaagcguggccagccagagcaucauugccuacacaaugucucugggcgccgagaacagcguggccuacuccaacaacucuaucgcuauccccaccaacuucaccaucagcgugaccacagagauccugccuguguccaugaccaagaccagcguggacugcaccauguacaucugcggcgauuccaccgagugcuccaaccugcugcugcaguacggcagcuucugcacccagcugaauagagcccugacagggaucgccguggaacaggacaagaacacccaagagguguucgcccaagugaagcagaucuacaagaccccuccuaucaaggacuucggcggcuucaauuucagccagauucugcccgauccuagcaagcccagcaagcggagcuucaucgaggaccugcuguucaacaaagugacacuggccgacgccggcuucaucaagcaguauggcgauugucugggcgacauugccgccagggaucugauuugcgcccagaaguuuaacggacugacagugcugccuccucugcugaccgaugagaugaucgcccaguacacaucugcccugcuggccggcacaaucacaagcggcuggacauuuggagcaggcgccgcucugcagauccccuuugcuaugcagauggccuaccgguucaacggcaucggagugacccagaaugugcuguacgagaaccagaagcugaucgccaaccaguucaacagcgccaucggcaagauccaggacagccugagcagcacagcaagcgcccugggaaagcugcaggacguggucaaccagaaugcccaggcacugaacacccuggucaagcagcuguccuccaacuucggcgccaucagcucugugcugaacgauauccugagcagacuggacccuccugaggccgaggugcagaucgacagacugaucacaggcagacugcagagccuccagacauacgugacccagcagcugaucagagccgccgagauuagagccucugccaaucuggccgccaccaagaugucugagugugugcugggccagagcaagagaguggacuuuugcggcaagggcuaccaccugaugagcuucccucagucugccccucacggcgugguguuucugcacgugacauaugugcccgcucaagagaagaauuucaccaccgcuccagccaucugccacgacggcaaagcccacuuuccuagagaaggcguguucguguccaacggcacccauugguucgugacacagcggaacuucuacgagccccagaucaucaccaccgacaacaccuucgugucuggcaacugcgacgucgugaucggcauugugaacaauaccguguacgacccucugcagcccgagcuggacagcuucaaagaggaacuggacaaguacuuuaagaaccacacaagccccgacguggaccugggcgauaucagcggaaucaaugccagcgucgugaacauccagaaagagaucgaccggcugaacgagguggccaagaaucugaacgagagccugaucgaccugcaagaacuggggaaguacgagcaguacaucaaguggcccugguacaucuggcugggcuuuaucgccggacugauugccaucgugauggucacaaucaugcuguguugcaugaccagcugcuguagcugccugaagggcuguuguagcuguggcagcugcugcaaguucgacgaggacgauucugagcccgugcugaagggcgugaaacugcacuacacaugaggacuaguuauaagacugacuagcccgaugggccucccaacgggcccuccuccccuccuugcaccgagauuaauagaucuaaaaaaaaaaaaaaaaaaaaaaaaaaaaaaaaaaaaaaaaaaaaaaaaaaaaaaaaaaaaaaaaaaaaaaaaaaaaaaaaaaaaaaaaaaaaaaaaaaaa

SEQ ID NO: 25825 - RNA, 1341 nt, Artificial Sequence
  SARS-CoV-2/Wuhan/WIV05/2019__EPI_ISL_402128 spike protein mRNA gc (1-15,334-528) Ferritin construct
aggagaaagcuuaccauguucguguuccugguccuccugccccuggugagcucccagugcaaccugugccccuucggcgagguguucaacgccacccgguucgccagcgucuacgccuggaaccgcaagcggaucuccaacugcguggcggacuacagcgugcuguacaacuccgccagcuucuccacguucaagugcuacggcgucagccccaccaagcucaacgaccugugcuucaccaacguguacgccgacuccuucgugauccgcggggacgagguccggcagaucgcccccggccagaccgggaagaucgccgacuacaacuacaagcugccggacgacuucacgggcugcgugaucgcguggaacagcaacaaccucgacuccaaggucgggggcaacuacaacuaccuguaccgccuguuccgcaagagcaaccucaagcccuucgagcgggacaucuccaccgagaucuaccaggccggcagcacccccugcaacgggguggagggcuucaacugcuacuucccccugcaguccuacggguuccagccgaccaacggcgugggguaccagcccuaccggguggucgugcugagcuucgagcuccugcacgcccccgccacggugugcggccccaagggcggggguggaagcggcggggguggaagugacaucaucaagcuccugaacgagcaggucaacaaggagaugcaguccagcaaccuguacauguccaugagcuccuggugcuacacccacagccucgacggcgccgggcuguuccuguucgaccacgccgcggaggaguacgagcacgccaagaagcucaucaucuuccugaacgagaacaacgugcccgugcagcugaccuccaucagcgccccggagcacaaguucgagggccucacgcagaucuuccagaaggccuacgagcacgagcagcacaucuccgagagcaucaacaacaucguggaccacgccaucaaguccaaggaccacgcgaccuucaacuuccugcagugguacgucgccgagcagcacgaggaggaggugcuguucaaggacauccucgacaagaucgagcugaucgggaacgagaaccacggccuguaccucgccgaccaguacgugaaggggaucgccaagagccgcaaguccugaggacuaguuauaagacugacuagcccgaugggccucccaacgggcccuccuccccuccuugcaccgagagaucuaaaaaaaaaaaaaaaaaaaaaaaaaaaaaaaaaaaaaaaaaaaaaaaaaaaaaaaaaaaaaaaaaaaaaaaaaaaaaaaaaaaaaaaaaaaaaaaaaaaa

SEQ ID NO: 25826 - RNA, 939 nt, Artificial Sequence
  SARS-CoV-2/Wuhan/WIV05/2019__EPI_ISL_402128 spike protein mRNA gc (334-528) Foldon construct
aggagaaagcuuaccaugcccaugggcagccugcagccgcucgccacccuguaccugcucgggaugcugguggccuccguccuggcgaaccugugccccuucggcgagguguucaacgccacccgguucgccagcgucuacgccuggaaccgcaagcggaucuccaacugcguggcggacuacagcgugcuguacaacuccgccagcuucuccacguucaagugcuacggcgucagccccaccaagcucaacgaccugugcuucaccaacguguacgccgacuccuucgugauccgcggggacgagguccggcagaucgcccccggccagaccgggaagaucgccgacuacaacuacaagcugccggacgacuucacgggcugcgugaucgcguggaacagcaacaaccucgacuccaaggucgggggcaacuacaacuaccuguaccgccuguuccgcaagagcaaccucaagcccuucgagcgggacaucuccaccgagaucuaccaggccggcagcacccccugcaacgggguggagggcuucaacugcuacuucccccugcaguccuacggguuccagccgaccaacggcgugggguaccagcccuaccggguggucgugcugagcuucgagcuccugcacgcccccgccacggugugcggccccaagggcagcggcggguacauccccgaggccccgcgcgacggccaggccuacgugcggaaggacggcgaguggguccugcugagcaccuuccucugaggacuaguuauaagacugacuagcccgaugggccucccaacgggcccuccuccccuccuugcaccgagagaucuaaaaaaaaaaaaaaaaaaaaaaaaaaaaaaaaaaaaaaaaaaaaaaaaaaaaaaaaaaaaaaaaaaaaaaaaaaaaaaaaaaaaaaaaaaaaaaaaaaaa

SEQ ID NO: 25827 - RNA, 1317 nt, Artificial Sequence
  SARS-CoV-2/Wuhan/WIV05/2019__EPI_ISL_402128 spike protein mRNA gc (1-15,334-528) LumSynth construct
aggagaaagcuuaccauguucguguuccugguccuccugccccuggugagcucccagugcaaccugugccccuucggcgagguguucaacgccacccgguucgccagcgucuacgccuggaaccgcaagcggaucuccaacugcguggcggacuacagcgugcuguacaacuccgccagcuucuccacguucaagugcuacggcgucagccccaccaagcucaacgaccugugcuucaccaacguguacgccgacuccuucgugauccgcggggacgagguccggcagaucgcccccggccagaccgggaagaucgccgacuacaacuacaagcugccggacgacuucacgggcugcgugaucgcguggaacagcaacaaccucgacuccaaggucgggggcaacuacaacuaccuguaccgccuguuccgcaagagcaaccucaagcccuucgagcgggacaucuccaccgagaucuaccaggccggcagcacccccugcaacgggguggagggcuucaacugcuacuucccccugcaguccuacggguuccagccgaccaacggcgugggguaccagcccuaccggguggucgugcugagcuucgagcuccugcacgcccccgccacggugugcggccccaagggcggcggcggcuccggaggcggagguagcgggggacagaucuacgagggcaagcugaccgccgaggggcuccgcuucggcaucguggccagccgguucaaccacgcgcuggucgaccgccugguggagggggccaucgacgccaucgugcggcacggcgggcgcgaggaggacaucacccucguccgggugcccggcuccugggagaucccgguggccgccggcgagcuggcccgcaaggaggacaucgacgcggucaucgccaucggggugcugauccggggcgccacgccccacuucgacuacaucgccagcgagguguccaaggggcucgcggaccugagccuggagcuccgcaagcccaucaccuucggcgucaucaccgccgacacccuggagcaggccaucgagcgggccgggacgaagcacggcaacaagggcugggaggccgcgcuguccgccaucgagauggccaaccucuucaagagccugcgcugaggacuaguuauaagacugacuagcccgaugggccucccaacgggcccuccuccccuccuugcaccgagagaucuaaaaaaaaaaaaaaaaaaaaaaaaaaaaaaaaaaaaaaaaaaaaaaaaaaaaaaaaaaaaaaaaaaaaaaaaaaaaaaaaaaaaaaaaaaaaaaaaaaaa

SEQ ID NO: 25828 - RNA, 1278 nt, Artificial Sequence
  SARS-CoV-2/Wuhan/WIV05/2019__EPI_ISL_402128 spike protein mRNA gc (334-528) LumSynth construct
aggagaaagcuuaccaugcagaucuacgagggcaagcugaccgccgaggggcuccgcuucggcaucguggccagccgguucaaccacgcgcuggucgaccgccugguggagggggccaucgacgccaucgugcggcacggcgggcgcgaggaggacaucacccucguccgggugcccggcuccugggagaucccgguggccgccggcgagcuggcccgcaaggaggacaucgacgcggucaucgccaucggggugcugauccggggcgccacgccccacuucgacuacaucgccagcgagguguccaaggggcucgcggaccugagccuggagcuccgcaagcccaucaccuucggcgucaucaccgccgacacccuggagcaggccaucgagcgggccgggacgaagcacggcaacaagggcugggaggccgcgcuguccgccaucgagauggccaaccucuucaagagccugcgcggcgggggcgggagcggcgggggcggcuccgggggcgggaaccugugccccuucggcgagguguucaacgccacccgguucgccagcgucuacgccuggaaccgcaagcggaucuccaacugcguggcggacuacagcgugcuguacaacuccgccagcuucuccacguucaagugcuacggcgucagccccaccaagcucaacgaccugugcuucaccaacguguacgccgacuccuucgugauccgcggggacgagguccggcagaucgcccccggccagaccgggaagaucgccgacuacaacuacaagcugccggacgacuucacgggcugcgugaucgcguggaacagcaacaaccucgacuccaaggucgggggcaacuacaacuaccuguaccgccuguuccgcaagagcaaccucaagcccuucgagcgggacaucuccaccgagaucuaccaggccggcagcacccccugcaacgggguggagggcuucaacugcuacuucccccugcaguccuacggguuccagccgaccaacggcgugggguaccagcccuaccggguggucgugcugagcuucgagcuccugcacgcccccgccacggugugcggccccaagugaggacuaguuauaagacugacuagcccgaugggccucccaacgggcccuccuccccuccuugcaccgagagaucuaaaaaaaaaaaaaaaaaaaaaaaaaaaaaaaaaaaaaaaaaaaaaaaaaaaaaaaaaaaaaaaaaaaaaaaaaaaaaaaaaaaaaaaaaaaaaaaaaaaa

SEQ ID NO: 25829 - RNA, 4011 nt, Artificial Sequence
  SARS-CoV-2/Wuhan/WIV05/2019__EPI_ISL_402128 spike protein mRNA gc (1-1273)
aggagaaagcuuaccauguucguguuccugguccuccugccccuggugagcucccagugcgugaaccucaccacccgcacgcagcugccgcccgccuacaccaacagcuucacccggggcgucuacuaccccgacaagguguuccgcuccagcgugcugcacuccacccaggaccucuuccugcccuucuucagcaacgucacgugguuccacgccauccacguguccgggaccaacggcaccaagcgguucgacaacccggugcugcccuucaacgacggggucuacuucgcgagcaccgagaaguccaacaucauccgcggcuggaucuucgggacgacccucgacagcaagacccagucccugcugaucgugaacaacgccaccaacguggucaucaaggugugcgaguuccaguucugcaacgaccccuuccucggcguguacuaccacaagaacaacaagagcuggauggaguccgaguuccgggucuacagcuccgccaacaacugcacguucgaguacgugagccagcccuuccugauggaccuggagggcaagcaggggaacuucaagaaccuccgcgaguucguguucaagaacaucgacggcuacuucaagaucuacuccaagcacaccccgaucaaccugguccgggaccugccccagggguucagcgcccucgagccccugguggaccugcccaucggcaucaacaucacccgcuuccagacccuccuggcccugcaccgguccuaccucacgccgggggacagcagcuccggcuggaccgcgggcgccgccgccuacuacgugggguaccugcagccccgcaccuuccugcucaaguacaacgagaacggcaccaucacggacgcggucgacugcgcccuggacccccugagcgagaccaagugcacccucaaguccuucaccguggagaaggggaucuaccagacgagcaacuuccgggugcagcccaccgaguccaucguccgcuucccgaacaucaccaaccugugccccuucggcgagguguucaacgccacccgguucgccagcgucuacgccuggaaccgcaagcggaucuccaacugcguggcggacuacagcgugcuguacaacuccgccagcuucuccacguucaagugcuacggcgucagccccaccaagcucaacgaccugugcuucaccaacguguacgccgacuccuucgugauccgcggggacgagguccggcagaucgcccccggccagaccgggaagaucgccgacuacaacuacaagcugccggacgacuucacgggcugcgugaucgcguggaacagcaacaaccucgacuccaaggucgggggcaacuacaacuaccuguaccgccuguuccgcaagagcaaccucaagcccuucgagcgggacaucuccaccgagaucuaccaggccggcagcacccccugcaacgggguggagggcuucaacugcuacuucccccugcaguccuacggguuccagccgaccaacggcgugggguaccagcccuaccggguggucgugcugagcuucgagcuccugcacgcccccgccacggugugcggccccaagaaguccaccaaccuggucaagaacaagugcgugaacuucaacuucaacggccucaccgggaccggcgugcugaccgagagcaacaagaaguuccugccguuccagcaguucgggcgcgacaucgccgacacgaccgacgcgguccgcgacccccagacccuggagauccucgacaucacccccugcagcuucggcgggguguccgugaucacgccgggcaccaacaccagcaaccaggucgccgugcuguaccaggacgugaacugcaccgagguccccguggccauccacgccgaccagcugacgcccaccuggcggguguacuccaccggcagcaacgucuuccagacccgcgccgggugccucaucggcgcggagcacgugaacaacuccuacgagugcgacauccccaucggggccggcaucugcgccagcuaccagacgcagaccaacuccccgcggcgcgcccggagcguggcgucccagagcaucaucgccuacaccaugucccugggcgccgagaacagcgucgccuacuccaacaacagcaucgccauccccaccaacuucacgaucuccgugaccaccgagauccugcccgugagcaugaccaagacgagcgucgacugcaccauguacaucugcggggacuccaccgagugcagcaaccuccugcugcaguacggcuccuucugcacccagcucaaccgcgcgcugacggggaucgccguggagcaggacaagaacacccaggagguguucgcccaggucaagcagaucuacaagacgcccccgaucaaggacuucggcggguucaacuucagccagauccugcccgaccccuccaagcccagcaagcgguccuucaucgaggaccuccuguucaacaaggugacccuggccgacgccggcuucaucaagcaguacggcgacugccucggggacaucgcggcccgcgaccugaucugcgcccagaaguucaacggccugaccgugcucccgccccugcugaccgacgagaugaucgcccaguacaccagcgcccuccuggcggggaccaucacguccggcuggaccuucggggccggcgccgcccugcagauccccuucgcgaugcagauggccuaccgguucaacggcaucggggucacccagaacgugcucuacgagaaccagaagcugaucgccaaccaguucaacagcgccaucggcaagauccaggacucccugagcuccaccgccagcgcgcucgggaagcugcaggacguggucaaccagaacgcccaggcccugaacacgcucgugaagcagcuguccagcaacuucggcgccaucuccagcgugcugaacgacauccucucccgccuggacaaggucgaggccgaggugcagaucgaccggcugaucaccgggcgccuccagagccugcagaccuacgugacccagcagcugauccgggcggccgagauccgcgccagcgccaaccucgccgcgaccaagauguccgagugcguccugggccagagcaagcggguggacuucugcggcaagggguaccaccugauguccuucccccagagcgccccgcacggcguggucuuccuccacgugacguacguccccgcccaggagaagaacuucaccaccgcccccgcgaucugccacgacgggaaggcccacuucccccgcgagggcguguucguguccaacgggacccacugguucgucacgcagcggaacuucuacgagccgcagaucaucaccaccgacaacaccuucgugagcggcaacugcgacguggucaucggcaucgugaacaacacgguguacgacccccugcagcccgagcuggacuccuucaaggaggagcucgacaaguacuucaagaaccacaccagccccgacgucgaccugggggacaucuccggcaucaacgccagcguggugaacauccagaaggagaucgaccgccugaacgaggucgccaagaaccucaacgagucccugaucgaccugcaggagcucgggaaguacgagcaguacaucaaguggccgugguacaucuggcugggcuucaucgccggccugaucgcgaucgugauggugaccaucaugcucugcugcaugaccagcugcugcuccugccugaaggggugcugcagcugcggcuccugcugcaaguucgacgaggacgacagcgagcccguccugaagggggugaagcuccacuacacgugaggacuaguuauaagacugacuagcccgaugggccucccaacgggcccuccuccccuccuugcaccgagagaucuaaaaaaaaaaaaaaaaaaaaaaaaaaaaaaaaaaaaaaaaaaaaaaaaaaaaaaaaaaaaaaaaaaaaaaaaaaaaaaaaaaaaaaaaaaaaaaaaaaaa

SEQ ID NO: 25830 - RNA, 4011 nt, Artificial Sequence
  SARS-CoV-2/Wuhan/WIV05/2019__EPI_ISL_402128 spike protein mRNA gc (1-1273)(D614G)
aggagaaagcuuaccauguucguguuccugguccuccugccccuggugagcucccagugcgugaaccucaccacccgcacgcagcugccgcccgccuacaccaacagcuucacccggggcgucuacuaccccgacaagguguuccgcuccagcgugcugcacuccacccaggaccucuuccugcccuucuucagcaacgucacgugguuccacgccauccacguguccgggaccaacggcaccaagcgguucgacaacccggugcugcccuucaacgacggggucuacuucgcgagcaccgagaaguccaacaucauccgcggcuggaucuucgggacgacccucgacagcaagacccagucccugcugaucgugaacaacgccaccaacguggucaucaaggugugcgaguuccaguucugcaacgaccccuuccucggcguguacuaccacaagaacaacaagagcuggauggaguccgaguuccgggucuacagcuccgccaacaacugcacguucgaguacgugagccagcccuuccugauggaccuggagggcaagcaggggaacuucaagaaccuccgcgaguucguguucaagaacaucgacggcuacuucaagaucuacuccaagcacaccccgaucaaccugguccgggaccugccccagggguucagcgcccucgagccccugguggaccugcccaucggcaucaacaucacccgcuuccagacccuccuggcccugcaccgguccuaccucacgccgggggacagcagcuccggcuggaccgcgggcgccgccgccuacuacgugggguaccugcagccccgcaccuuccugcucaaguacaacgagaacggcaccaucacggacgcggucgacugcgcccuggacccccugagcgagaccaagugcacccucaaguccuucaccguggagaaggggaucuaccagacgagcaacuuccgggugcagcccaccgaguccaucguccgcuucccgaacaucaccaaccugugccccuucggcgagguguucaacgccacccgguucgccagcgucuacgccuggaaccgcaagcggaucuccaacugcguggcggacuacagcgugcuguacaacuccgccagcuucuccacguucaagugcuacggcgucagccccaccaagcucaacgaccugugcuucaccaacguguacgccgacuccuucgugauccgcggggacgagguccggcagaucgcccccggccagaccgggaagaucgccgacuacaacuacaagcugccggacgacuucacgggcugcgugaucgcguggaacagcaacaaccucgacuccaaggucgggggcaacuacaacuaccuguaccgccuguuccgcaagagcaaccucaagcccuucgagcgggacaucuccaccgagaucuaccaggccggcagcacccccugcaacgggguggagggcuucaacugcuacuucccccugcaguccuacggguuccagccgaccaacggcgugggguaccagcccuaccggguggucgugcugagcuucgagcuccugcacgcccccgccacggugugcggccccaagaaguccaccaaccuggucaagaacaagugcgugaacuucaacuucaacggccucaccgggaccggcgugcugaccgagagcaacaagaaguuccugccguuccagcaguucgggcgcgacaucgccgacacgaccgacgcgguccgcgacccccagacccuggagauccucgacaucacccccugcagcuucggcgggguguccgugaucacgccgggcaccaacaccagcaaccaggucgccgugcuguaccagggcgugaacugcaccgagguccccguggccauccacgccgaccagcugacgcccaccuggcggguguacuccaccggcagcaacgucuuccagacccgcgccgggugccucaucggcgcggagcacgugaacaacuccuacgagugcgacauccccaucggggccggcaucugcgccagcuaccagacgcagaccaacuccccgcggcgcgcccggagcguggcgucccagagcaucaucgccuacaccaugucccugggcgccgagaacagcgucgccuacuccaacaacagcaucgccauccccaccaacuucacgaucuccgugaccaccgagauccugcccgugagcaugaccaagacgagcgucgacugcaccauguacaucugcggggacuccaccgagugcagcaaccuccugcugcaguacggcuccuucugcacccagcucaaccgcgcgcugacggggaucgccguggagcaggacaagaacacccaggagguguucgcccaggucaagcagaucuacaagacgcccccgaucaaggacuucggcggguucaacuucagccagauccugcccgaccccuccaagcccagcaagcgguccuucaucgaggaccuccuguucaacaaggugacccuggccgacgccggcuucaucaagcaguacggcgacugccucggggacaucgcggcccgcgaccugaucugcgcccagaaguucaacggccugaccgugcucccgccccugcugaccgacgagaugaucgcccaguacaccagcgcccuccuggcggggaccaucacguccggcuggaccuucggggccggcgccgcccugcagauccccuucgcgaugcagauggccuaccgguucaacggcaucggggucacccagaacgugcucuacgagaaccagaagcugaucgccaaccaguucaacagcgccaucggcaagauccaggacucccugagcuccaccgccagcgcgcucgggaagcugcaggacguggucaaccagaacgcccaggcccugaacacgcucgugaagcagcuguccagcaacuucggcgccaucuccagcgugcugaacgacauccucucccgccuggacaaggucgaggccgaggugcagaucgaccggcugaucaccgggcgccuccagagccugcagaccuacgugacccagcagcugauccgggcggccgagauccgcgccagcgccaaccucgccgcgaccaagauguccgagugcguccugggccagagcaagcggguggacuucugcggcaagggguaccaccugauguccuucccccagagcgccccgcacggcguggucuuccuccacgugacguacguccccgcccaggagaagaacuucaccaccgcccccgcgaucugccacgacgggaaggcccacuucccccgcgagggcguguucguguccaacgggacccacugguucgucacgcagcggaacuucuacgagccgcagaucaucaccaccgacaacaccuucgugagcggcaacugcgacguggucaucggcaucgugaacaacacgguguacgacccccugcagcccgagcuggacuccuucaaggaggagcucgacaaguacuucaagaaccacaccagccccgacgucgaccugggggacaucuccggcaucaacgccagcguggugaacauccagaaggagaucgaccgccugaacgaggucgccaagaaccucaacgagucccugaucgaccugcaggagcucgggaaguacgagcaguacaucaaguggccgugguacaucuggcugggcuucaucgccggccugaucgcgaucgugauggugaccaucaugcucugcugcaugaccagcugcugcuccugccugaaggggugcugcagcugcggcuccugcugcaaguucgacgaggacgacagcgagcccguccugaagggggugaagcuccacuacacgugaggacuaguuauaagacugacuagcccgaugggccucccaacgggcccuccuccccuccuugcaccgagagaucuaaaaaaaaaaaaaaaaaaaaaaaaaaaaaaaaaaaaaaaaaaaaaaaaaaaaaaaaaaaaaaaaaaaaaaaaaaaaaaaaaaaaaaaaaaaaaaaaaaaa

SEQ ID NO: 25831 - RNA, 4011 nt, Artificial Sequence
  SARS-CoV-2/Wuhan/WIV05/2019__EPI_ISL_402128 spike protein mRNA gc (1-1273)(A222V_D614G)
aggagaaagcuuaccauguucguguuccugguccuccugccccuggugagcucccagugcgugaaccucaccacccgcacgcagcugccgcccgccuacaccaacagcuucacccggggcgucuacuaccccgacaagguguuccgcuccagcgugcugcacuccacccaggaccucuuccugcccuucuucagcaacgucacgugguuccacgccauccacguguccgggaccaacggcaccaagcgguucgacaacccggugcugcccuucaacgacggggucuacuucgcgagcaccgagaaguccaacaucauccgcggcuggaucuucgggacgacccucgacagcaagacccagucccugcugaucgugaacaacgccaccaacguggucaucaaggugugcgaguuccaguucugcaacgaccccuuccucggcguguacuaccacaagaacaacaagagcuggauggaguccgaguuccgggucuacagcuccgccaacaacugcacguucgaguacgugagccagcccuuccugauggaccuggagggcaagcaggggaacuucaagaaccuccgcgaguucguguucaagaacaucgacggcuacuucaagaucuacuccaagcacaccccgaucaaccugguccgggaccugccccagggguucagcguccucgagccccugguggaccugcccaucggcaucaacaucacccgcuuccagacccuccuggcccugcaccgguccuaccucacgccgggggacagcagcuccggcuggaccgcgggcgccgccgccuacuacgugggguaccugcagccccgcaccuuccugcucaaguacaacgagaacggcaccaucacggacgcggucgacugcgcccuggacccccugagcgagaccaagugcacccucaaguccuucaccguggagaaggggaucuaccagacgagcaacuuccgggugcagcccaccgaguccaucguccgcuucccgaacaucaccaaccugugccccuucggcgagguguucaacgccacccgguucgccagcgucuacgccuggaaccgcaagcggaucuccaacugcguggcggacuacagcgugcuguacaacuccgccagcuucuccacguucaagugcuacggcgucagccccaccaagcucaacgaccugugcuucaccaacguguacgccgacuccuucgugauccgcggggacgagguccggcagaucgcccccggccagaccgggaagaucgccgacuacaacuacaagcugccggacgacuucacgggcugcgugaucgcguggaacagcaacaaccucgacuccaaggucgggggcaacuacaacuaccuguaccgccuguuccgcaagagcaaccucaagcccuucgagcgggacaucuccaccgagaucuaccaggccggcagcacccccugcaacgggguggagggcuucaacugcuacuucccccugcaguccuacggguuccagccgaccaacggcgugggguaccagcccuaccggguggucgugcugagcuucgagcuccugcacgcccccgccacggugugcggccccaagaaguccaccaaccuggucaagaacaagugcgugaacuucaacuucaacggccucaccgggaccggcgugcugaccgagagcaacaagaaguuccugccguuccagcaguucgggcgcgacaucgccgacacgaccgacgcgguccgcgacccccagacccuggagauccucgacaucacccccugcagcuucggcgggguguccgugaucacgccgggcaccaacaccagcaaccaggucgccgugcuguaccagggcgugaacugcaccgagguccccguggccauccacgccgaccagcugacgcccaccuggcggguguacuccaccggcagcaacgucuuccagacccgcgccgggugccucaucggcgcggagcacgugaacaacuccuacgagugcgacauccccaucggggccggcaucugcgccagcuaccagacgcagaccaacuccccgcggcgcgcccggagcguggcgucccagagcaucaucgccuacaccaugucccugggcgccgagaacagcgucgccuacuccaacaacagcaucgccauccccaccaacuucacgaucuccgugaccaccgagauccugcccgugagcaugaccaagacgagcgucgacugcaccauguacaucugcggggacuccaccgagugcagcaaccuccugcugcaguacggcuccuucugcacccagcucaaccgcgcgcugacggggaucgccguggagcaggacaagaacacccaggagguguucgcccaggucaagcagaucuacaagacgcccccgaucaaggacuucggcggguucaacuucagccagauccugcccgaccccuccaagcccagcaagcgguccuucaucgaggaccuccuguucaacaaggugacccuggccgacgccggcuucaucaagcaguacggcgacugccucggggacaucgcggcccgcgaccugaucugcgcccagaaguucaacggccugaccgugcucccgccccugcugaccgacgagaugaucgcccaguacaccagcgcccuccuggcggggaccaucacguccggcuggaccuucggggccggcgccgcccugcagauccccuucgcgaugcagauggccuaccgguucaacggcaucggggucacccagaacgugcucuacgagaaccagaagcugaucgccaaccaguucaacagcgccaucggcaagauccaggacucccugagcuccaccgccagcgcgcucgggaagcugcaggacguggucaaccagaacgcccaggcccugaacacgcucgugaagcagcuguccagcaacuucggcgccaucuccagcgugcugaacgacauccucucccgccuggacaaggucgaggccgaggugcagaucgaccggcugaucaccgggcgccuccagagccugcagaccuacgugacccagcagcugauccgggcggccgagauccgcgccagcgccaaccucgccgcgaccaagauguccgagugcguccugggccagagcaagcggguggacuucugcggcaagggguaccaccugauguccuucccccagagcgccccgcacggcguggucuuccuccacgugacguacguccccgcccaggagaagaacuucaccaccgcccccgcgaucugccacgacgggaaggcccacuucccccgcgagggcguguucguguccaacgggacccacugguucgucacgcagcggaacuucuacgagccgcagaucaucaccaccgacaacaccuucgugagcggcaacugcgacguggucaucggcaucgugaacaacacgguguacgacccccugcagcccgagcuggacuccuucaaggaggagcucgacaaguacuucaagaaccacaccagccccgacgucgaccugggggacaucuccggcaucaacgccagcguggugaacauccagaaggagaucgaccgccugaacgaggucgccaagaaccucaacgagucccugaucgaccugcaggagcucgggaaguacgagcaguacaucaaguggccgugguacaucuggcugggcuucaucgccggccugaucgcgaucgugauggugaccaucaugcucugcugcaugaccagcugcugcuccugccugaaggggugcugcagcugcggcuccugcugcaaguucgacgaggacgacagcgagcccguccugaagggggugaagcuccacuacacgugaggacuaguuauaagacugacuagcccgaugggccucccaacgggcccuccuccccuccuugcaccgagagaucuaaaaaaaaaaaaaaaaaaaaaaaaaaaaaaaaaaaaaaaaaaaaaaaaaaaaaaaaaaaaaaaaaaaaaaaaaaaaaaaaaaaaaaaaaaaaaaaaaaaa

SEQ ID NO: 25832 - RNA, 4011 nt, Artificial Sequence
  SARS-CoV-2/Wuhan/WIV05/2019__EPI_ISL_402128 spike protein mRNA gc (1-1273)(N439K_D614G)
aggagaaagcuuaccauguucguguuccugguccuccugccccuggugagcucccagugcgugaaccucaccacccgcacgcagcugccgcccgccuacaccaacagcuucacccggggcgucuacuaccccgacaagguguuccgcuccagcgugcugcacuccacccaggaccucuuccugcccuucuucagcaacgucacgugguuccacgccauccacguguccgggaccaacggcaccaagcgguucgacaacccggugcugcccuucaacgacggggucuacuucgcgagcaccgagaaguccaacaucauccgcggcuggaucuucgggacgacccucgacagcaagacccagucccugcugaucgugaacaacgccaccaacguggucaucaaggugugcgaguuccaguucugcaacgaccccuuccucggcguguacuaccacaagaacaacaagagcuggauggaguccgaguuccgggucuacagcuccgccaacaacugcacguucgaguacgugagccagcccuuccugauggaccuggagggcaagcaggggaacuucaagaaccuccgcgaguucguguucaagaacaucgacggcuacuucaagaucuacuccaagcacaccccgaucaaccugguccgggaccugccccagggguucagcgcccucgagccccugguggaccugcccaucggcaucaacaucacccgcuuccagacccuccuggcccugcaccgguccuaccucacgccgggggacagcagcuccggcuggaccgcgggcgccgccgccuacuacgugggguaccugcagccccgcaccuuccugcucaaguacaacgagaacggcaccaucacggacgcggucgacugcgcccuggacccccugagcgagaccaagugcacccucaaguccuucaccguggagaaggggaucuaccagacgagcaacuuccgggugcagcccaccgaguccaucguccgcuucccgaacaucaccaaccugugccccuucggcgagguguucaacgccacccgguucgccagcgucuacgccuggaaccgcaagcggaucuccaacugcguggcggacuacagcgugcuguacaacuccgccagcuucuccacguucaagugcuacggcgucagccccaccaagcucaacgaccugugcuucaccaacguguacgccgacuccuucgugauccgcggggacgagguccggcagaucgcccccggccagaccgggaagaucgccgacuacaacuacaagcugccggacgacuucacgggcugcgugaucgcguggaacagcaagaaccucgacuccaaggucgggggcaacuacaacuaccuguaccgccuguuccgcaagagcaaccucaagcccuucgagcgggacaucuccaccgagaucuaccaggccggcagcacccccugcaacgggguggagggcuucaacugcuacuucccccugcaguccuacggguuccagccgaccaacggcgugggguaccagcccuaccggguggucgugcugagcuucgagcuccugcacgcccccgccacggugugcggccccaagaaguccaccaaccuggucaagaacaagugcgugaacuucaacuucaacggccucaccgggaccggcgugcugaccgagagcaacaagaaguuccugccguuccagcaguucgggcgcgacaucgccgacacgaccgacgcgguccgcgacccccagacccuggagauccucgacaucacccccugcagcuucggcgggguguccgugaucacgccgggcaccaacaccagcaaccaggucgccgugcuguaccagggcgugaacugcaccgagguccccguggccauccacgccgaccagcugacgcccaccuggcggguguacuccaccggcagcaacgucuuccagacccgcgccgggugccucaucggcgcggagcacgugaacaacuccuacgagugcgacauccccaucggggccggcaucugcgccagcuaccagacgcagaccaacuccccgcggcgcgcccggagcguggcgucccagagcaucaucgccuacaccaugucccugggcgccgagaacagcgucgccuacuccaacaacagcaucgccauccccaccaacuucacgaucuccgugaccaccgagauccugcccgugagcaugaccaagacgagcgucgacugcaccauguacaucugcggggacuccaccgagugcagcaaccuccugcugcaguacggcuccuucugcacccagcucaaccgcgcgcugacggggaucgccguggagcaggacaagaacacccaggagguguucgcccaggucaagcagaucuacaagacgcccccgaucaaggacuucggcggguucaacuucagccagauccugcccgaccccuccaagcccagcaagcgguccuucaucgaggaccuccuguucaacaaggugacccuggccgacgccggcuucaucaagcaguacggcgacugccucggggacaucgcggcccgcgaccugaucugcgcccagaaguucaacggccugaccgugcucccgccccugcugaccgacgagaugaucgcccaguacaccagcgcccuccuggcggggaccaucacguccggcuggaccuucggggccggcgccgcccugcagauccccuucgcgaugcagauggccuaccgguucaacggcaucggggucacccagaacgugcucuacgagaaccagaagcugaucgccaaccaguucaacagcgccaucggcaagauccaggacucccugagcuccaccgccagcgcgcucgggaagcugcaggacguggucaaccagaacgcccaggcccugaacacgcucgugaagcagcuguccagcaacuucggcgccaucuccagcgugcugaacgacauccucucccgccuggacaaggucgaggccgaggugcagaucgaccggcugaucaccgggcgccuccagagccugcagaccuacgugacccagcagcugauccgggcggccgagauccgcgccagcgccaaccucgccgcgaccaagauguccgagugcguccugggccagagcaagcggguggacuucugcggcaagggguaccaccugauguccuucccccagagcgccccgcacggcguggucuuccuccacgugacguacguccccgcccaggagaagaacuucaccaccgcccccgcgaucugccacgacgggaaggcccacuucccccgcgagggcguguucguguccaacgggacccacugguucgucacgcagcggaacuucuacgagccgcagaucaucaccaccgacaacaccuucgugagcggcaacugcgacguggucaucggcaucgugaacaacacgguguacgacccccugcagcccgagcuggacuccuucaaggaggagcucgacaaguacuucaagaaccacaccagccccgacgucgaccugggggacaucuccggcaucaacgccagcguggugaacauccagaaggagaucgaccgccugaacgaggucgccaagaaccucaacgagucccugaucgaccugcaggagcucgggaaguacgagcaguacaucaaguggccgugguacaucuggcugggcuucaucgccggccugaucgcgaucgugauggugaccaucaugcucugcugcaugaccagcugcugcuccugccugaaggggugcugcagcugcggcuccugcugcaaguucgacgaggacgacagcgagcccguccugaagggggugaagcuccacuacacgugaggacuaguuauaagacugacuagcccgaugggccucccaacgggcccuccuccccuccuugcaccgagagaucuaaaaaaaaaaaaaaaaaaaaaaaaaaaaaaaaaaaaaaaaaaaaaaaaaaaaaaaaaaaaaaaaaaaaaaaaaaaaaaaaaaaaaaaaaaaaaaaaaaaa

SEQ ID NO: 25833 - RNA, 4011 nt, Artificial Sequence
  SARS-CoV-2/Wuhan/WIV05/2019__EPI_ISL_402128 spike protein mRNA gc (1-1273)(S477N_D614G)
aggagaaagcuuaccauguucguguuccugguccuccugccccuggugagcucccagugcgugaaccucaccacccgcacgcagcugccgcccgccuacaccaacagcuucacccggggcgucuacuaccccgacaagguguuccgcuccagcgugcugcacuccacccaggaccucuuccugcccuucuucagcaacgucacgugguuccacgccauccacguguccgggaccaacggcaccaagcgguucgacaacccggugcugcccuucaacgacggggucuacuucgcgagcaccgagaaguccaacaucauccgcggcuggaucuucgggacgacccucgacagcaagacccagucccugcugaucgugaacaacgccaccaacguggucaucaaggugugcgaguuccaguucugcaacgaccccuuccucggcguguacuaccacaagaacaacaagagcuggauggaguccgaguuccgggucuacagcuccgccaacaacugcacguucgaguacgugagccagcccuuccugauggaccuggagggcaagcaggggaacuucaagaaccuccgcgaguucguguucaagaacaucgacggcuacuucaagaucuacuccaagcacaccccgaucaaccugguccgggaccugccccagggguucagcgcccucgagccccugguggaccugcccaucggcaucaacaucacccgcuuccagacccuccuggcccugcaccgguccuaccucacgccgggggacagcagcuccggcuggaccgcgggcgccgccgccuacuacgugggguaccugcagccccgcaccuuccugcucaaguacaacgagaacggcaccaucacggacgcggucgacugcgcccuggacccccugagcgagaccaagugcacccucaaguccuucaccguggagaaggggaucuaccagacgagcaacuuccgggugcagcccaccgaguccaucguccgcuucccgaacaucaccaaccugugccccuucggcgagguguucaacgccacccgguucgccagcgucuacgccuggaaccgcaagcggaucuccaacugcguggcggacuacagcgugcuguacaacuccgccagcuucuccacguucaagugcuacggcgucagccccaccaagcucaacgaccugugcuucaccaacguguacgccgacuccuucgugauccgcggggacgagguccggcagaucgcccccggccagaccgggaagaucgccgacuacaacuacaagcugccggacgacuucacgggcugcgugaucgcguggaacagcaacaaccucgacuccaaggucgggggcaacuacaacuaccuguaccgccuguuccgcaagagcaaccucaagcccuucgagcgggacaucuccaccgagaucuaccaggccggcaacacccccugcaacgggguggagggcuucaacugcuacuucccccugcaguccuacggguuccagccgaccaacggcgugggguaccagcccuaccggguggucgugcugagcuucgagcuccugcacgcccccgccacggugugcggccccaagaaguccaccaaccuggucaagaacaagugcgugaacuucaacuucaacggccucaccgggaccggcgugcugaccgagagcaacaagaaguuccugccguuccagcaguucgggcgcgacaucgccgacacgaccgacgcgguccgcgacccccagacccuggagauccucgacaucacccccugcagcuucggcgggguguccgugaucacgccgggcaccaacaccagcaaccaggucgccgugcuguaccagggcgugaacugcaccgagguccccguggccauccacgccgaccagcugacgcccaccuggcggguguacuccaccggcagcaacgucuuccagacccgcgccgggugccucaucggcgcggagcacgugaacaacuccuacgagugcgacauccccaucggggccggcaucugcgccagcuaccagacgcagaccaacuccccgcggcgcgcccggagcguggcgucccagagcaucaucgccuacaccaugucccugggcgccgagaacagcgucgccuacuccaacaacagcaucgccauccccaccaacuucacgaucuccgugaccaccgagauccugcccgugagcaugaccaagacgagcgucgacugcaccauguacaucugcggggacuccaccgagugcagcaaccuccugcugcaguacggcuccuucugcacccagcucaaccgcgcgcugacggggaucgccguggagcaggacaagaacacccaggagguguucgcccaggucaagcagaucuacaagacgcccccgaucaaggacuucggcggguucaacuucagccagauccugcccgaccccuccaagcccagcaagcgguccuucaucgaggaccuccuguucaacaaggugacccuggccgacgccggcuucaucaagcaguacggcgacugccucggggacaucgcggcccgcgaccugaucugcgcccagaaguucaacggccugaccgugcucccgccccugcugaccgacgagaugaucgcccaguacaccagcgcccuccuggcggggaccaucacguccggcuggaccuucggggccggcgccgcccugcagauccccuucgcgaugcagauggccuaccgguucaacggcaucggggucacccagaacgugcucuacgagaaccagaagcugaucgccaaccaguucaacagcgccaucggcaagauccaggacucccugagcuccaccgccagcgcgcucgggaagcugcaggacguggucaaccagaacgcccaggcccugaacacgcucgugaagcagcuguccagcaacuucggcgccaucuccagcgugcugaacgacauccucucccgccuggacaaggucgaggccgaggugcagaucgaccggcugaucaccgggcgccuccagagccugcagaccuacgugacccagcagcugauccgggcggccgagauccgcgccagcgccaaccucgccgcgaccaagauguccgagugcguccugggccagagcaagcggguggacuucugcggcaagggguaccaccugauguccuucccccagagcgccccgcacggcguggucuuccuccacgugacguacguccccgcccaggagaagaacuucaccaccgcccccgcgaucugccacgacgggaaggcccacuucccccgcgagggcguguucguguccaacgggacccacugguucgucacgcagcggaacuucuacgagccgcagaucaucaccaccgacaacaccuucgugagcggcaacugcgacguggucaucggcaucgugaacaacacgguguacgacccccugcagcccgagcuggacuccuucaaggaggagcucgacaaguacuucaagaaccacaccagccccgacgucgaccugggggacaucuccggcaucaacgccagcguggugaacauccagaaggagaucgaccgccugaacgaggucgccaagaaccucaacgagucccugaucgaccugcaggagcucgggaaguacgagcaguacaucaaguggccgugguacaucuggcugggcuucaucgccggccugaucgcgaucgugauggugaccaucaugcucugcugcaugaccagcugcugcuccugccugaaggggugcugcagcugcggcuccugcugcaaguucgacgaggacgacagcgagcccguccugaagggggugaagcuccacuacacgugaggacuaguuauaagacugacuagcccgaugggccucccaacgggcccuccuccccuccuugcaccgagagaucuaaaaaaaaaaaaaaaaaaaaaaaaaaaaaaaaaaaaaaaaaaaaaaaaaaaaaaaaaaaaaaaaaaaaaaaaaaaaaaaaaaaaaaaaaaaaaaaaaaaa

SEQ ID NO: 25834 - RNA, 4011 nt, Artificial Sequence
  SARS-CoV-2/Wuhan/WIV05/2019__EPI_ISL_402128 spike protein mRNA gc (1-1273)(N501Y_D614G)
aggagaaagcuuaccauguucguguuccugguccuccugccccuggugagcucccagugcgugaaccucaccacccgcacgcagcugccgcccgccuacaccaacagcuucacccggggcgucuacuaccccgacaagguguuccgcuccagcgugcugcacuccacccaggaccucuuccugcccuucuucagcaacgucacgugguuccacgccauccacguguccgggaccaacggcaccaagcgguucgacaacccggugcugcccuucaacgacggggucuacuucgcgagcaccgagaaguccaacaucauccgcggcuggaucuucgggacgacccucgacagcaagacccagucccugcugaucgugaacaacgccaccaacguggucaucaaggugugcgaguuccaguucugcaacgaccccuuccucggcguguacuaccacaagaacaacaagagcuggauggaguccgaguuccgggucuacagcuccgccaacaacugcacguucgaguacgugagccagcccuuccugauggaccuggagggcaagcaggggaacuucaagaaccuccgcgaguucguguucaagaacaucgacggcuacuucaagaucuacuccaagcacaccccgaucaaccugguccgggaccugccccagggguucagcgcccucgagccccugguggaccugcccaucggcaucaacaucacccgcuuccagacccuccuggcccugcaccgguccuaccucacgccgggggacagcagcuccggcuggaccgcgggcgccgccgccuacuacgugggguaccugcagccccgcaccuuccugcucaaguacaacgagaacggcaccaucacggacgcggucgacugcgcccuggacccccugagcgagaccaagugcacccucaaguccuucaccguggagaaggggaucuaccagacgagcaacuuccgggugcagcccaccgaguccaucguccgcuucccgaacaucaccaaccugugccccuucggcgagguguucaacgccacccgguucgccagcgucuacgccuggaaccgcaagcggaucuccaacugcguggcggacuacagcgugcuguacaacuccgccagcuucuccacguucaagugcuacggcgucagccccaccaagcucaacgaccugugcuucaccaacguguacgccgacuccuucgugauccgcggggacgagguccggcagaucgcccccggccagaccgggaagaucgccgacuacaacuacaagcugccggacgacuucacgggcugcgugaucgcguggaacagcaacaaccucgacuccaaggucgggggcaacuacaacuaccuguaccgccuguuccgcaagagcaaccucaagcccuucgagcgggacaucuccaccgagaucuaccaggccggcagcacccccugcaacgggguggagggcuucaacugcuacuucccccugcaguccuacggguuccagccgaccuacggcgugggguaccagcccuaccggguggucgugcugagcuucgagcuccugcacgcccccgccacggugugcggccccaagaaguccaccaaccuggucaagaacaagugcgugaacuucaacuucaacggccucaccgggaccggcgugcugaccgagagcaacaagaaguuccugccguuccagcaguucgggcgcgacaucgccgacacgaccgacgcgguccgcgacccccagacccuggagauccucgacaucacccccugcagcuucggcgggguguccgugaucacgccgggcaccaacaccagcaaccaggucgccgugcuguaccagggcgugaacugcaccgagguccccguggccauccacgccgaccagcugacgcccaccuggcggguguacuccaccggcagcaacgucuuccagacccgcgccgggugccucaucggcgcggagcacgugaacaacuccuacgagugcgacauccccaucggggccggcaucugcgccagcuaccagacgcagaccaacuccccgcggcgcgcccggagcguggcgucccagagcaucaucgccuacaccaugucccugggcgccgagaacagcgucgccuacuccaacaacagcaucgccauccccaccaacuucacgaucuccgugaccaccgagauccugcccgugagcaugaccaagacgagcgucgacugcaccauguacaucugcggggacuccaccgagugcagcaaccuccugcugcaguacggcuccuucugcacccagcucaaccgcgcgcugacggggaucgccguggagcaggacaagaacacccaggagguguucgcccaggucaagcagaucuacaagacgcccccgaucaaggacuucggcggguucaacuucagccagauccugcccgaccccuccaagcccagcaagcgguccuucaucgaggaccuccuguucaacaaggugacccuggccgacgccggcuucaucaagcaguacggcgacugccucggggacaucgcggcccgcgaccugaucugcgcccagaaguucaacggccugaccgugcucccgccccugcugaccgacgagaugaucgcccaguacaccagcgcccuccuggcggggaccaucacguccggcuggaccuucggggccggcgccgcccugcagauccccuucgcgaugcagauggccuaccgguucaacggcaucggggucacccagaacgugcucuacgagaaccagaagcugaucgccaaccaguucaacagcgccaucggcaagauccaggacucccugagcuccaccgccagcgcgcucgggaagcugcaggacguggucaaccagaacgcccaggcccugaacacgcucgugaagcagcuguccagcaacuucggcgccaucuccagcgugcugaacgacauccucucccgccuggacaaggucgaggccgaggugcagaucgaccggcugaucaccgggcgccuccagagccugcagaccuacgugacccagcagcugauccgggcggccgagauccgcgccagcgccaaccucgccgcgaccaagauguccgagugcguccugggccagagcaagcggguggacuucugcggcaagggguaccaccugauguccuucccccagagcgccccgcacggcguggucuuccuccacgugacguacguccccgcccaggagaagaacuucaccaccgcccccgcgaucugccacgacgggaaggcccacuucccccgcgagggcguguucguguccaacgggacccacugguucgucacgcagcggaacuucuacgagccgcagaucaucaccaccgacaacaccuucgugagcggcaacugcgacguggucaucggcaucgugaacaacacgguguacgacccccugcagcccgagcuggacuccuucaaggaggagcucgacaaguacuucaagaaccacaccagccccgacgucgaccugggggacaucuccggcaucaacgccagcguggugaacauccagaaggagaucgaccgccugaacgaggucgccaagaaccucaacgagucccugaucgaccugcaggagcucgggaaguacgagcaguacaucaaguggccgugguacaucuggcugggcuucaucgccggccugaucgcgaucgugauggugaccaucaugcucugcugcaugaccagcugcugcuccugccugaaggggugcugcagcugcggcuccugcugcaaguucgacgaggacgacagcgagcccguccugaagggggugaagcuccacuacacgugaggacuaguuauaagacugacuagcccgaugggccucccaacgggcccuccuccccuccuugcaccgagagaucuaaaaaaaaaaaaaaaaaaaaaaaaaaaaaaaaaaaaaaaaaaaaaaaaaaaaaaaaaaaaaaaaaaaaaaaaaaaaaaaaaaaaaaaaaaaaaaaaaaaa

SEQ ID NO: 25835 - RNA, 4005 nt, Artificial Sequence
  SARS-CoV-2/Wuhan/WIV05/2019__EPI_ISL_402128 spike protein mRNA gc (1-1273)(H69del_V70del_D614G)
aggagaaagcuuaccauguucguguuccugguccuccugccccuggugagcucccagugcgugaaccucaccacccgcacgcagcugccgcccgccuacaccaacagcuucacccggggcgucuacuaccccgacaagguguuccgcuccagcgugcugcacuccacccaggaccucuuccugcccuucuucagcaacgucacgugguuccacgccaucuccgggaccaacggcaccaagcgguucgacaacccggugcugcccuucaacgacggggucuacuucgcgagcaccgagaaguccaacaucauccgcggcuggaucuucgggacgacccucgacagcaagacccagucccugcugaucgugaacaacgccaccaacguggucaucaaggugugcgaguuccaguucugcaacgaccccuuccucggcguguacuaccacaagaacaacaagagcuggauggaguccgaguuccgggucuacagcuccgccaacaacugcacguucgaguacgugagccagcccuuccugauggaccuggagggcaagcaggggaacuucaagaaccuccgcgaguucguguucaagaacaucgacggcuacuucaagaucuacuccaagcacaccccgaucaaccugguccgggaccugccccagggguucagcgcccucgagccccugguggaccugcccaucggcaucaacaucacccgcuuccagacccuccuggcccugcaccgguccuaccucacgccgggggacagcagcuccggcuggaccgcgggcgccgccgccuacuacgugggguaccugcagccccgcaccuuccugcucaaguacaacgagaacggcaccaucacggacgcggucgacugcgcccuggacccccugagcgagaccaagugcacccucaaguccuucaccguggagaaggggaucuaccagacgagcaacuuccgggugcagcccaccgaguccaucguccgcuucccgaacaucaccaaccugugccccuucggcgagguguucaacgccacccgguucgccagcgucuacgccuggaaccgcaagcggaucuccaacugcguggcggacuacagcgugcuguacaacuccgccagcuucuccacguucaagugcuacggcgucagccccaccaagcucaacgaccugugcuucaccaacguguacgccgacuccuucgugauccgcggggacgagguccggcagaucgcccccggccagaccgggaagaucgccgacuacaacuacaagcugccggacgacuucacgggcugcgugaucgcguggaacagcaacaaccucgacuccaaggucgggggcaacuacaacuaccuguaccgccuguuccgcaagagcaaccucaagcccuucgagcgggacaucuccaccgagaucuaccaggccggcagcacccccugcaacgggguggagggcuucaacugcuacuucccccugcaguccuacggguuccagccgaccaacggcgugggguaccagcccuaccggguggucgugcugagcuucgagcuccugcacgcccccgccacggugugcggccccaagaaguccaccaaccuggucaagaacaagugcgugaacuucaacuucaacggccucaccgggaccggcgugcugaccgagagcaacaagaaguuccugccguuccagcaguucgggcgcgacaucgccgacacgaccgacgcgguccgcgacccccagacccuggagauccucgacaucacccccugcagcuucggcgggguguccgugaucacgccgggcaccaacaccagcaaccaggucgccgugcuguaccagggcgugaacugcaccgagguccccguggccauccacgccgaccagcugacgcccaccuggcggguguacuccaccggcagcaacgucuuccagacccgcgccgggugccucaucggcgcggagcacgugaacaacuccuacgagugcgacauccccaucggggccggcaucugcgccagcuaccagacgcagaccaacuccccgcggcgcgcccggagcguggcgucccagagcaucaucgccuacaccaugucccugggcgccgagaacagcgucgccuacuccaacaacagcaucgccauccccaccaacuucacgaucuccgugaccaccgagauccugcccgugagcaugaccaagacgagcgucgacugcaccauguacaucugcggggacuccaccgagugcagcaaccuccugcugcaguacggcuccuucugcacccagcucaaccgcgcgcugacggggaucgccguggagcaggacaagaacacccaggagguguucgcccaggucaagcagaucuacaagacgcccccgaucaaggacuucggcggguucaacuucagccagauccugcccgaccccuccaagcccagcaagcgguccuucaucgaggaccuccuguucaacaaggugacccuggccgacgccggcuucaucaagcaguacggcgacugccucggggacaucgcggcccgcgaccugaucugcgcccagaaguucaacggccugaccgugcucccgccccugcugaccgacgagaugaucgcccaguacaccagcgcccuccuggcggggaccaucacguccggcuggaccuucggggccggcgccgcccugcagauccccuucgcgaugcagauggccuaccgguucaacggcaucggggucacccagaacgugcucuacgagaaccagaagcugaucgccaaccaguucaacagcgccaucggcaagauccaggacucccugagcuccaccgccagcgcgcucgggaagcugcaggacguggucaaccagaacgcccaggcccugaacacgcucgugaagcagcuguccagcaacuucggcgccaucuccagcgugcugaacgacauccucucccgccuggacaaggucgaggccgaggugcagaucgaccggcugaucaccgggcgccuccagagccugcagaccuacgugacccagcagcugauccgggcggccgagauccgcgccagcgccaaccucgccgcgaccaagauguccgagugcguccugggccagagcaagcggguggacuucugcggcaagggguaccaccugauguccuucccccagagcgccccgcacggcguggucuuccuccacgugacguacguccccgcccaggagaagaacuucaccaccgcccccgcgaucugccacgacgggaaggcccacuucccccgcgagggcguguucguguccaacgggacccacugguucgucacgcagcggaacuucuacgagccgcagaucaucaccaccgacaacaccuucgugagcggcaacugcgacguggucaucggcaucgugaacaacacgguguacgacccccugcagcccgagcuggacuccuucaaggaggagcucgacaaguacuucaagaaccacaccagccccgacgucgaccugggggacaucuccggcaucaacgccagcguggugaacauccagaaggagaucgaccgccugaacgaggucgccaagaaccucaacgagucccugaucgaccugcaggagcucgggaaguacgagcaguacaucaaguggccgugguacaucuggcugggcuucaucgccggccugaucgcgaucgugauggugaccaucaugcucugcugcaugaccagcugcugcuccugccugaaggggugcugcagcugcggcuccugcugcaaguucgacgaggacgacagcgagcccguccugaagggggugaagcuccacuacacgugaggacuaguuauaagacugacuagcccgaugggccucccaacgggcccuccuccccuccuugcaccgagagaucuaaaaaaaaaaaaaaaaaaaaaaaaaaaaaaaaaaaaaaaaaaaaaaaaaaaaaaaaaaaaaaaaaaaaaaaaaaaaaaaaaaaaaaaaaaaaaaaaaaaa

SEQ ID NO: 25836 - RNA, 4011 nt, Artificial Sequence
  SARS-CoV-2/Wuhan/WIV05/2019__EPI_ISL_402128 spike protein mRNA gc (1-1273)(Y453F_D614G)
aggagaaagcuuaccauguucguguuccugguccuccugccccuggugagcucccagugcgugaaccucaccacccgcacgcagcugccgcccgccuacaccaacagcuucacccggggcgucuacuaccccgacaagguguuccgcuccagcgugcugcacuccacccaggaccucuuccugcccuucuucagcaacgucacgugguuccacgccauccacguguccgggaccaacggcaccaagcgguucgacaacccggugcugcccuucaacgacggggucuacuucgcgagcaccgagaaguccaacaucauccgcggcuggaucuucgggacgacccucgacagcaagacccagucccugcugaucgugaacaacgccaccaacguggucaucaaggugugcgaguuccaguucugcaacgaccccuuccucggcguguacuaccacaagaacaacaagagcuggauggaguccgaguuccgggucuacagcuccgccaacaacugcacguucgaguacgugagccagcccuuccugauggaccuggagggcaagcaggggaacuucaagaaccuccgcgaguucguguucaagaacaucgacggcuacuucaagaucuacuccaagcacaccccgaucaaccugguccgggaccugccccagggguucagcgcccucgagccccugguggaccugcccaucggcaucaacaucacccgcuuccagacccuccuggcccugcaccgguccuaccucacgccgggggacagcagcuccggcuggaccgcgggcgccgccgccuacuacgugggguaccugcagccccgcaccuuccugcucaaguacaacgagaacggcaccaucacggacgcggucgacugcgcccuggacccccugagcgagaccaagugcacccucaaguccuucaccguggagaaggggaucuaccagacgagcaacuuccgggugcagcccaccgaguccaucguccgcuucccgaacaucaccaaccugugccccuucggcgagguguucaacgccacccgguucgccagcgucuacgccuggaaccgcaagcggaucuccaacugcguggcggacuacagcgugcuguacaacuccgccagcuucuccacguucaagugcuacggcgucagccccaccaagcucaacgaccugugcuucaccaacguguacgccgacuccuucgugauccgcggggacgagguccggcagaucgcccccggccagaccgggaagaucgccgacuacaacuacaagcugccggacgacuucacgggcugcgugaucgcguggaacagcaacaaccucgacuccaaggucgggggcaacuacaacuaccuguuccgccuguuccgcaagagcaaccucaagcccuucgagcgggacaucuccaccgagaucuaccaggccggcagcacccccugcaacgggguggagggcuucaacugcuacuucccccugcaguccuacggguuccagccgaccaacggcgugggguaccagcccuaccggguggucgugcugagcuucgagcuccugcacgcccccgccacggugugcggccccaagaaguccaccaaccuggucaagaacaagugcgugaacuucaacuucaacggccucaccgggaccggcgugcugaccgagagcaacaagaaguuccugccguuccagcaguucgggcgcgacaucgccgacacgaccgacgcgguccgcgacccccagacccuggagauccucgacaucacccccugcagcuucggcgggguguccgugaucacgccgggcaccaacaccagcaaccaggucgccgugcuguaccagggcgugaacugcaccgagguccccguggccauccacgccgaccagcugacgcccaccuggcggguguacuccaccggcagcaacgucuuccagacccgcgccgggugccucaucggcgcggagcacgugaacaacuccuacgagugcgacauccccaucggggccggcaucugcgccagcuaccagacgcagaccaacuccccgcggcgcgcccggagcguggcgucccagagcaucaucgccuacaccaugucccugggcgccgagaacagcgucgccuacuccaacaacagcaucgccauccccaccaacuucacgaucuccgugaccaccgagauccugcccgugagcaugaccaagacgagcgucgacugcaccauguacaucugcggggacuccaccgagugcagcaaccuccugcugcaguacggcuccuucugcacccagcucaaccgcgcgcugacggggaucgccguggagcaggacaagaacacccaggagguguucgcccaggucaagcagaucuacaagacgcccccgaucaaggacuucggcggguucaacuucagccagauccugcccgaccccuccaagcccagcaagcgguccuucaucgaggaccuccuguucaacaaggugacccuggccgacgccggcuucaucaagcaguacggcgacugccucggggacaucgcggcccgcgaccugaucugcgcccagaaguucaacggccugaccgugcucccgccccugcugaccgacgagaugaucgcccaguacaccagcgcccuccuggcggggaccaucacguccggcuggaccuucggggccggcgccgcccugcagauccccuucgcgaugcagauggccuaccgguucaacggcaucggggucacccagaacgugcucuacgagaaccagaagcugaucgccaaccaguucaacagcgccaucggcaagauccaggacucccugagcuccaccgccagcgcgcucgggaagcugcaggacguggucaaccagaacgcccaggcccugaacacgcucgugaagcagcuguccagcaacuucggcgccaucuccagcgugcugaacgacauccucucccgccuggacaaggucgaggccgaggugcagaucgaccggcugaucaccgggcgccuccagagccugcagaccuacgugacccagcagcugauccgggcggccgagauccgcgccagcgccaaccucgccgcgaccaagauguccgagugcguccugggccagagcaagcggguggacuucugcggcaagggguaccaccugauguccuucccccagagcgccccgcacggcguggucuuccuccacgugacguacguccccgcccaggagaagaacuucaccaccgcccccgcgaucugccacgacgggaaggcccacuucccccgcgagggcguguucguguccaacgggacccacugguucgucacgcagcggaacuucuacgagccgcagaucaucaccaccgacaacaccuucgugagcggcaacugcgacguggucaucggcaucgugaacaacacgguguacgacccccugcagcccgagcuggacuccuucaaggaggagcucgacaaguacuucaagaaccacaccagccccgacgucgaccugggggacaucuccggcaucaacgccagcguggugaacauccagaaggagaucgaccgccugaacgaggucgccaagaaccucaacgagucccugaucgaccugcaggagcucgggaaguacgagcaguacaucaaguggccgugguacaucuggcugggcuucaucgccggccugaucgcgaucgugauggugaccaucaugcucugcugcaugaccagcugcugcuccugccugaaggggugcugcagcugcggcuccugcugcaaguucgacgaggacgacagcgagcccguccugaagggggugaagcuccacuacacgugaggacuaguuauaagacugacuagcccgaugggccucccaacgggcccuccuccccuccuugcaccgagagaucuaaaaaaaaaaaaaaaaaaaaaaaaaaaaaaaaaaaaaaaaaaaaaaaaaaaaaaaaaaaaaaaaaaaaaaaaaaaaaaaaaaaaaaaaaaaaaaaaaaaa

SEQ ID NO: 25837 - RNA, 4011 nt, Artificial Sequence
  SARS-CoV-2/Wuhan/WIV05/2019__EPI_ISL_402128 spike protein mRNA gc (1-1273)(D614G_I692V)
aggagaaagcuuaccauguucguguuccugguccuccugccccuggugagcucccagugcgugaaccucaccacccgcacgcagcugccgcccgccuacaccaacagcuucacccggggcgucuacuaccccgacaagguguuccgcuccagcgugcugcacuccacccaggaccucuuccugcccuucuucagcaacgucacgugguuccacgccauccacguguccgggaccaacggcaccaagcgguucgacaacccggugcugcccuucaacgacggggucuacuucgcgagcaccgagaaguccaacaucauccgcggcuggaucuucgggacgacccucgacagcaagacccagucccugcugaucgugaacaacgccaccaacguggucaucaaggugugcgaguuccaguucugcaacgaccccuuccucggcguguacuaccacaagaacaacaagagcuggauggaguccgaguuccgggucuacagcuccgccaacaacugcacguucgaguacgugagccagcccuuccugauggaccuggagggcaagcaggggaacuucaagaaccuccgcgaguucguguucaagaacaucgacggcuacuucaagaucuacuccaagcacaccccgaucaaccugguccgggaccugccccagggguucagcgcccucgagccccugguggaccugcccaucggcaucaacaucacccgcuuccagacccuccuggcccugcaccgguccuaccucacgccgggggacagcagcuccggcuggaccgcgggcgccgccgccuacuacgugggguaccugcagccccgcaccuuccugcucaaguacaacgagaacggcaccaucacggacgcggucgacugcgcccuggacccccugagcgagaccaagugcacccucaaguccuucaccguggagaaggggaucuaccagacgagcaacuuccgggugcagcccaccgaguccaucguccgcuucccgaacaucaccaaccugugccccuucggcgagguguucaacgccacccgguucgccagcgucuacgccuggaaccgcaagcggaucuccaacugcguggcggacuacagcgugcuguacaacuccgccagcuucuccacguucaagugcuacggcgucagccccaccaagcucaacgaccugugcuucaccaacguguacgccgacuccuucgugauccgcggggacgagguccggcagaucgcccccggccagaccgggaagaucgccgacuacaacuacaagcugccggacgacuucacgggcugcgugaucgcguggaacagcaacaaccucgacuccaaggucgggggcaacuacaacuaccuguaccgccuguuccgcaagagcaaccucaagcccuucgagcgggacaucuccaccgagaucuaccaggccggcagcacccccugcaacgggguggagggcuucaacugcuacuucccccugcaguccuacggguuccagccgaccaacggcgugggguaccagcccuaccggguggucgugcugagcuucgagcuccugcacgcccccgccacggugugcggccccaagaaguccaccaaccuggucaagaacaagugcgugaacuucaacuucaacggccucaccgggaccggcgugcugaccgagagcaacaagaaguuccugccguuccagcaguucgggcgcgacaucgccgacacgaccgacgcgguccgcgacccccagacccuggagauccucgacaucacccccugcagcuucggcgggguguccgugaucacgccgggcaccaacaccagcaaccaggucgccgugcuguaccagggcgugaacugcaccgagguccccguggccauccacgccgaccagcugacgcccaccuggcggguguacuccaccggcagcaacgucuuccagacccgcgccgggugccucaucggcgcggagcacgugaacaacuccuacgagugcgacauccccaucggggccggcaucugcgccagcuaccagacgcagaccaacuccccgcggcgcgcccggagcguggcgucccagagcgucaucgccuacaccaugucccugggcgccgagaacagcgucgccuacuccaacaacagcaucgccauccccaccaacuucacgaucuccgugaccaccgagauccugcccgugagcaugaccaagacgagcgucgacugcaccauguacaucugcggggacuccaccgagugcagcaaccuccugcugcaguacggcuccuucugcacccagcucaaccgcgcgcugacggggaucgccguggagcaggacaagaacacccaggagguguucgcccaggucaagcagaucuacaagacgcccccgaucaaggacuucggcggguucaacuucagccagauccugcccgaccccuccaagcccagcaagcgguccuucaucgaggaccuccuguucaacaaggugacccuggccgacgccggcuucaucaagcaguacggcgacugccucggggacaucgcggcccgcgaccugaucugcgcccagaaguucaacggccugaccgugcucccgccccugcugaccgacgagaugaucgcccaguacaccagcgcccuccuggcggggaccaucacguccggcuggaccuucggggccggcgccgcccugcagauccccuucgcgaugcagauggccuaccgguucaacggcaucggggucacccagaacgugcucuacgagaaccagaagcugaucgccaaccaguucaacagcgccaucggcaagauccaggacucccugagcuccaccgccagcgcgcucgggaagcugcaggacguggucaaccagaacgcccaggcccugaacacgcucgugaagcagcuguccagcaacuucggcgccaucuccagcgugcugaacgacauccucucccgccuggacaaggucgaggccgaggugcagaucgaccggcugaucaccgggcgccuccagagccugcagaccuacgugacccagcagcugauccgggcggccgagauccgcgccagcgccaaccucgccgcgaccaagauguccgagugcguccugggccagagcaagcggguggacuucugcggcaagggguaccaccugauguccuucccccagagcgccccgcacggcguggucuuccuccacgugacguacguccccgcccaggagaagaacuucaccaccgcccccgcgaucugccacgacgggaaggcccacuucccccgcgagggcguguucguguccaacgggacccacugguucgucacgcagcggaacuucuacgagccgcagaucaucaccaccgacaacaccuucgugagcggcaacugcgacguggucaucggcaucgugaacaacacgguguacgacccccugcagcccgagcuggacuccuucaaggaggagcucgacaaguacuucaagaaccacaccagccccgacgucgaccugggggacaucuccggcaucaacgccagcguggugaacauccagaaggagaucgaccgccugaacgaggucgccaagaaccucaacgagucccugaucgaccugcaggagcucgggaaguacgagcaguacaucaaguggccgugguacaucuggcugggcuucaucgccggccugaucgcgaucgugauggugaccaucaugcucugcugcaugaccagcugcugcuccugccugaaggggugcugcagcugcggcuccugcugcaaguucgacgaggacgacagcgagcccguccugaagggggugaagcuccacuacacgugaggacuaguuauaagacugacuagcccgaugggccucccaacgggcccuccuccccuccuugcaccgagagaucuaaaaaaaaaaaaaaaaaaaaaaaaaaaaaaaaaaaaaaaaaaaaaaaaaaaaaaaaaaaaaaaaaaaaaaaaaaaaaaaaaaaaaaaaaaaaaaaaaaaa

SEQ ID NO: 25838 - RNA, 4011 nt, Artificial Sequence
  SARS-CoV-2/Wuhan/WIV05/2019__EPI_ISL_402128 spike protein mRNA gc (1-1273)(D614G_M1229I)
aggagaaagcuuaccauguucguguuccugguccuccugccccuggugagcucccagugcgugaaccucaccacccgcacgcagcugccgcccgccuacaccaacagcuucacccggggcgucuacuaccccgacaagguguuccgcuccagcgugcugcacuccacccaggaccucuuccugcccuucuucagcaacgucacgugguuccacgccauccacguguccgggaccaacggcaccaagcgguucgacaacccggugcugcccuucaacgacggggucuacuucgcgagcaccgagaaguccaacaucauccgcggcuggaucuucgggacgacccucgacagcaagacccagucccugcugaucgugaacaacgccaccaacguggucaucaaggugugcgaguuccaguucugcaacgaccccuuccucggcguguacuaccacaagaacaacaagagcuggauggaguccgaguuccgggucuacagcuccgccaacaacugcacguucgaguacgugagccagcccuuccugauggaccuggagggcaagcaggggaacuucaagaaccuccgcgaguucguguucaagaacaucgacggcuacuucaagaucuacuccaagcacaccccgaucaaccugguccgggaccugccccagggguucagcgcccucgagccccugguggaccugcccaucggcaucaacaucacccgcuuccagacccuccuggcccugcaccgguccuaccucacgccgggggacagcagcuccggcuggaccgcgggcgccgccgccuacuacgugggguaccugcagccccgcaccuuccugcucaaguacaacgagaacggcaccaucacggacgcggucgacugcgcccuggacccccugagcgagaccaagugcacccucaaguccuucaccguggagaaggggaucuaccagacgagcaacuuccgggugcagcccaccgaguccaucguccgcuucccgaacaucaccaaccugugccccuucggcgagguguucaacgccacccgguucgccagcgucuacgccuggaaccgcaagcggaucuccaacugcguggcggacuacagcgugcuguacaacuccgccagcuucuccacguucaagugcuacggcgucagccccaccaagcucaacgaccugugcuucaccaacguguacgccgacuccuucgugauccgcggggacgagguccggcagaucgcccccggccagaccgggaagaucgccgacuacaacuacaagcugccggacgacuucacgggcugcgugaucgcguggaacagcaacaaccucgacuccaaggucgggggcaacuacaacuaccuguaccgccuguuccgcaagagcaaccucaagcccuucgagcgggacaucuccaccgagaucuaccaggccggcagcacccccugcaacgggguggagggcuucaacugcuacuucccccugcaguccuacggguuccagccgaccaacggcgugggguaccagcccuaccggguggucgugcugagcuucgagcuccugcacgcccccgccacggugugcggccccaagaaguccaccaaccuggucaagaacaagugcgugaacuucaacuucaacggccucaccgggaccggcgugcugaccgagagcaacaagaaguuccugccguuccagcaguucgggcgcgacaucgccgacacgaccgacgcgguccgcgacccccagacccuggagauccucgacaucacccccugcagcuucggcgggguguccgugaucacgccgggcaccaacaccagcaaccaggucgccgugcuguaccagggcgugaacugcaccgagguccccguggccauccacgccgaccagcugacgcccaccuggcggguguacuccaccggcagcaacgucuuccagacccgcgccgggugccucaucggcgcggagcacgugaacaacuccuacgagugcgacauccccaucggggccggcaucugcgccagcuaccagacgcagaccaacuccccgcggcgcgcccggagcguggcgucccagagcaucaucgccuacaccaugucccugggcgccgagaacagcgucgccuacuccaacaacagcaucgccauccccaccaacuucacgaucuccgugaccaccgagauccugcccgugagcaugaccaagacgagcgucgacugcaccauguacaucugcggggacuccaccgagugcagcaaccuccugcugcaguacggcuccuucugcacccagcucaaccgcgcgcugacggggaucgccguggagcaggacaagaacacccaggagguguucgcccaggucaagcagaucuacaagacgcccccgaucaaggacuucggcggguucaacuucagccagauccugcccgaccccuccaagcccagcaagcgguccuucaucgaggaccuccuguucaacaaggugacccuggccgacgccggcuucaucaagcaguacggcgacugccucggggacaucgcggcccgcgaccugaucugcgcccagaaguucaacggccugaccgugcucccgccccugcugaccgacgagaugaucgcccaguacaccagcgcccuccuggcggggaccaucacguccggcuggaccuucggggccggcgccgcccugcagauccccuucgcgaugcagauggccuaccgguucaacggcaucggggucacccagaacgugcucuacgagaaccagaagcugaucgccaaccaguucaacagcgccaucggcaagauccaggacucccugagcuccaccgccagcgcgcucgggaagcugcaggacguggucaaccagaacgcccaggcccugaacacgcucgugaagcagcuguccagcaacuucggcgccaucuccagcgugcugaacgacauccucucccgccuggacaaggucgaggccgaggugcagaucgaccggcugaucaccgggcgccuccagagccugcagaccuacgugacccagcagcugauccgggcggccgagauccgcgccagcgccaaccucgccgcgaccaagauguccgagugcguccugggccagagcaagcggguggacuucugcggcaagggguaccaccugauguccuucccccagagcgccccgcacggcguggucuuccuccacgugacguacguccccgcccaggagaagaacuucaccaccgcccccgcgaucugccacgacgggaaggcccacuucccccgcgagggcguguucguguccaacgggacccacugguucgucacgcagcggaacuucuacgagccgcagaucaucaccaccgacaacaccuucgugagcggcaacugcgacguggucaucggcaucgugaacaacacgguguacgacccccugcagcccgagcuggacuccuucaaggaggagcucgacaaguacuucaagaaccacaccagccccgacgucgaccugggggacaucuccggcaucaacgccagcguggugaacauccagaaggagaucgaccgccugaacgaggucgccaagaaccucaacgagucccugaucgaccugcaggagcucgggaaguacgagcaguacaucaaguggccgugguacaucuggcugggcuucaucgccggccugaucgcgaucgugaucgugaccaucaugcucugcugcaugaccagcugcugcuccugccugaaggggugcugcagcugcggcuccugcugcaaguucgacgaggacgacagcgagcccguccugaagggggugaagcuccacuacacgugaggacuaguuauaagacugacuagcccgaugggccucccaacgggcccuccuccccuccuugcaccgagagaucuaaaaaaaaaaaaaaaaaaaaaaaaaaaaaaaaaaaaaaaaaaaaaaaaaaaaaaaaaaaaaaaaaaaaaaaaaaaaaaaaaaaaaaaaaaaaaaaaaaaa

SEQ ID NO: 25839 - RNA, 4005 nt, Artificial Sequence
  SARS-CoV-2/Wuhan/WIV05/2019__EPI_ISL_402128 spike protein mRNA gc (1-1273)(H69del_V70del_A222V_Y453F_S477N_D614G_I692V)
aggagaaagcuuaccauguucguguuccugguccuccugccccuggugagcucccagugcgugaaccucaccacccgcacgcagcugccgcccgccuacaccaacagcuucacccggggcgucuacuaccccgacaagguguuccgcuccagcgugcugcacuccacccaggaccucuuccugcccuucuucagcaacgucacgugguuccacgccaucuccgggaccaacggcaccaagcgguucgacaacccggugcugcccuucaacgacggggucuacuucgcgagcaccgagaaguccaacaucauccgcggcuggaucuucgggacgacccucgacagcaagacccagucccugcugaucgugaacaacgccaccaacguggucaucaaggugugcgaguuccaguucugcaacgaccccuuccucggcguguacuaccacaagaacaacaagagcuggauggaguccgaguuccgggucuacagcuccgccaacaacugcacguucgaguacgugagccagcccuuccugauggaccuggagggcaagcaggggaacuucaagaaccuccgcgaguucguguucaagaacaucgacggcuacuucaagaucuacuccaagcacaccccgaucaaccugguccgggaccugccccagggguucagcguccucgagccccugguggaccugcccaucggcaucaacaucacccgcuuccagacccuccuggcccugcaccgguccuaccucacgccgggggacagcagcuccggcuggaccgcgggcgccgccgccuacuacgugggguaccugcagccccgcaccuuccugcucaaguacaacgagaacggcaccaucacggacgcggucgacugcgcccuggacccccugagcgagaccaagugcacccucaaguccuucaccguggagaaggggaucuaccagacgagcaacuuccgggugcagcccaccgaguccaucguccgcuucccgaacaucaccaaccugugccccuucggcgagguguucaacgccacccgguucgccagcgucuacgccuggaaccgcaagcggaucuccaacugcguggcggacuacagcgugcuguacaacuccgccagcuucuccacguucaagugcuacggcgucagccccaccaagcucaacgaccugugcuucaccaacguguacgccgacuccuucgugauccgcggggacgagguccggcagaucgcccccggccagaccgggaagaucgccgacuacaacuacaagcugccggacgacuucacgggcugcgugaucgcguggaacagcaacaaccucgacuccaaggucgggggcaacuacaacuaccuguuccgccuguuccgcaagagcaaccucaagcccuucgagcgggacaucuccaccgagaucuaccaggccggcaacacccccugcaacgggguggagggcuucaacugcuacuucccccugcaguccuacggguuccagccgaccaacggcgugggguaccagcccuaccggguggucgugcugagcuucgagcuccugcacgcccccgccacggugugcggccccaagaaguccaccaaccuggucaagaacaagugcgugaacuucaacuucaacggccucaccgggaccggcgugcugaccgagagcaacaagaaguuccugccguuccagcaguucgggcgcgacaucgccgacacgaccgacgcgguccgcgacccccagacccuggagauccucgacaucacccccugcagcuucggcgggguguccgugaucacgccgggcaccaacaccagcaaccaggucgccgugcuguaccagggcgugaacugcaccgagguccccguggccauccacgccgaccagcugacgcccaccuggcggguguacuccaccggcagcaacgucuuccagacccgcgccgggugccucaucggcgcggagcacgugaacaacuccuacgagugcgacauccccaucggggccggcaucugcgccagcuaccagacgcagaccaacuccccgcggcgcgcccggagcguggcgucccagagcgucaucgccuacaccaugucccugggcgccgagaacagcgucgccuacuccaacaacagcaucgccauccccaccaacuucacgaucuccgugaccaccgagauccugcccgugagcaugaccaagacgagcgucgacugcaccauguacaucugcggggacuccaccgagugcagcaaccuccugcugcaguacggcuccuucugcacccagcucaaccgcgcgcugacggggaucgccguggagcaggacaagaacacccaggagguguucgcccaggucaagcagaucuacaagacgcccccgaucaaggacuucggcggguucaacuucagccagauccugcccgaccccuccaagcccagcaagcgguccuucaucgaggaccuccuguucaacaaggugacccuggccgacgccggcuucaucaagcaguacggcgacugccucggggacaucgcggcccgcgaccugaucugcgcccagaaguucaacggccugaccgugcucccgccccugcugaccgacgagaugaucgcccaguacaccagcgcccuccuggcggggaccaucacguccggcuggaccuucggggccggcgccgcccugcagauccccuucgcgaugcagauggccuaccgguucaacggcaucggggucacccagaacgugcucuacgagaaccagaagcugaucgccaaccaguucaacagcgccaucggcaagauccaggacucccugagcuccaccgccagcgcgcucgggaagcugcaggacguggucaaccagaacgcccaggcccugaacacgcucgugaagcagcuguccagcaacuucggcgccaucuccagcgugcugaacgacauccucucccgccuggacaaggucgaggccgaggugcagaucgaccggcugaucaccgggcgccuccagagccugcagaccuacgugacccagcagcugauccgggcggccgagauccgcgccagcgccaaccucgccgcgaccaagauguccgagugcguccugggccagagcaagcggguggacuucugcggcaagggguaccaccugauguccuucccccagagcgccccgcacggcguggucuuccuccacgugacguacguccccgcccaggagaagaacuucaccaccgcccccgcgaucugccacgacgggaaggcccacuucccccgcgagggcguguucguguccaacgggacccacugguucgucacgcagcggaacuucuacgagccgcagaucaucaccaccgacaacaccuucgugagcggcaacugcgacguggucaucggcaucgugaacaacacgguguacgacccccugcagcccgagcuggacuccuucaaggaggagcucgacaaguacuucaagaaccacaccagccccgacgucgaccugggggacaucuccggcaucaacgccagcguggugaacauccagaaggagaucgaccgccugaacgaggucgccaagaaccucaacgagucccugaucgaccugcaggagcucgggaaguacgagcaguacaucaaguggccgugguacaucuggcugggcuucaucgccggccugaucgcgaucgugauggugaccaucaugcucugcugcaugaccagcugcugcuccugccugaaggggugcugcagcugcggcuccugcugcaaguucgacgaggacgacagcgagcccguccugaagggggugaagcuccacuacacgugaggacuaguuauaagacugacuagcccgaugggccucccaacgggcccuccuccccuccuugcaccgagagaucuaaaaaaaaaaaaaaaaaaaaaaaaaaaaaaaaaaaaaaaaaaaaaaaaaaaaaaaaaaaaaaaaaaaaaaaaaaaaaaaaaaaaaaaaaaaaaaaaaaaa

SEQ ID NO: 25840 - RNA, 4005 nt, Artificial Sequence
  SARS-CoV-2/Wuhan/WIV05/2019__EPI_ISL_402128 spike protein mRNA gc (1-1273)(H69del_V70del_Y453F_D614G_I692V_M1229I)
aggagaaagcuuaccauguucguguuccugguccuccugccccuggugagcucccagugcgugaaccucaccacccgcacgcagcugccgcccgccuacaccaacagcuucacccggggcgucuacuaccccgacaagguguuccgcuccagcgugcugcacuccacccaggaccucuuccugcccuucuucagcaacgucacgugguuccacgccaucuccgggaccaacggcaccaagcgguucgacaacccggugcugcccuucaacgacggggucuacuucgcgagcaccgagaaguccaacaucauccgcggcuggaucuucgggacgacccucgacagcaagacccagucccugcugaucgugaacaacgccaccaacguggucaucaaggugugcgaguuccaguucugcaacgaccccuuccucggcguguacuaccacaagaacaacaagagcuggauggaguccgaguuccgggucuacagcuccgccaacaacugcacguucgaguacgugagccagcccuuccugauggaccuggagggcaagcaggggaacuucaagaaccuccgcgaguucguguucaagaacaucgacggcuacuucaagaucuacuccaagcacaccccgaucaaccugguccgggaccugccccagggguucagcgcccucgagccccugguggaccugcccaucggcaucaacaucacccgcuuccagacccuccuggcccugcaccgguccuaccucacgccgggggacagcagcuccggcuggaccgcgggcgccgccgccuacuacgugggguaccugcagccccgcaccuuccugcucaaguacaacgagaacggcaccaucacggacgcggucgacugcgcccuggacccccugagcgagaccaagugcacccucaaguccuucaccguggagaaggggaucuaccagacgagcaacuuccgggugcagcccaccgaguccaucguccgcuucccgaacaucaccaaccugugccccuucggcgagguguucaacgccacccgguucgccagcgucuacgccuggaaccgcaagcggaucuccaacugcguggcggacuacagcgugcuguacaacuccgccagcuucuccacguucaagugcuacggcgucagccccaccaagcucaacgaccugugcuucaccaacguguacgccgacuccuucgugauccgcggggacgagguccggcagaucgcccccggccagaccgggaagaucgccgacuacaacuacaagcugccggacgacuucacgggcugcgugaucgcguggaacagcaacaaccucgacuccaaggucgggggcaacuacaacuaccuguuccgccuguuccgcaagagcaaccucaagcccuucgagcgggacaucuccaccgagaucuaccaggccggcagcacccccugcaacgggguggagggcuucaacugcuacuucccccugcaguccuacggguuccagccgaccaacggcgugggguaccagcccuaccggguggucgugcugagcuucgagcuccugcacgcccccgccacggugugcggccccaagaaguccaccaaccuggucaagaacaagugcgugaacuucaacuucaacggccucaccgggaccggcgugcugaccgagagcaacaagaaguuccugccguuccagcaguucgggcgcgacaucgccgacacgaccgacgcgguccgcgacccccagacccuggagauccucgacaucacccccugcagcuucggcgggguguccgugaucacgccgggcaccaacaccagcaaccaggucgccgugcuguaccagggcgugaacugcaccgagguccccguggccauccacgccgaccagcugacgcccaccuggcggguguacuccaccggcagcaacgucuuccagacccgcgccgggugccucaucggcgcggagcacgugaacaacuccuacgagugcgacauccccaucggggccggcaucugcgccagcuaccagacgcagaccaacuccccgcggcgcgcccggagcguggcgucccagagcgugaucgccuacaccaugucccugggcgccgagaacagcgucgccuacuccaacaacagcaucgccauccccaccaacuucacgaucuccgugaccaccgagauccugcccgugagcaugaccaagacgagcgucgacugcaccauguacaucugcggggacuccaccgagugcagcaaccuccugcugcaguacggcuccuucugcacccagcucaaccgcgcgcugacggggaucgccguggagcaggacaagaacacccaggagguguucgcccaggucaagcagaucuacaagacgcccccgaucaaggacuucggcggguucaacuucagccagauccugcccgaccccuccaagcccagcaagcgguccuucaucgaggaccuccuguucaacaaggugacccuggccgacgccggcuucaucaagcaguacggcgacugccucggggacaucgcggcccgcgaccugaucugcgcccagaaguucaacggccugaccgugcucccgccccugcugaccgacgagaugaucgcccaguacaccagcgcccuccuggcggggaccaucacguccggcuggaccuucggggccggcgccgcccugcagauccccuucgcgaugcagauggccuaccgguucaacggcaucggggucacccagaacgugcucuacgagaaccagaagcugaucgccaaccaguucaacagcgccaucggcaagauccaggacucccugagcuccaccgccagcgcgcucgggaagcugcaggacguggucaaccagaacgcccaggcccugaacacgcucgugaagcagcuguccagcaacuucggcgccaucuccagcgugcugaacgacauccucucccgccuggacaaggucgaggccgaggugcagaucgaccggcugaucaccgggcgccuccagagccugcagaccuacgugacccagcagcugauccgggcggccgagauccgcgccagcgccaaccucgccgcgaccaagauguccgagugcguccugggccagagcaagcggguggacuucugcggcaagggguaccaccugauguccuucccccagagcgccccgcacggcguggucuuccuccacgugacguacguccccgcccaggagaagaacuucaccaccgcccccgcgaucugccacgacgggaaggcccacuucccccgcgagggcguguucguguccaacgggacccacugguucgucacgcagcggaacuucuacgagccgcagaucaucaccaccgacaacaccuucgugagcggcaacugcgacguggucaucggcaucgugaacaacacgguguacgacccccugcagcccgagcuggacuccuucaaggaggagcucgacaaguacuucaagaaccacaccagccccgacgucgaccugggggacaucuccggcaucaacgccagcguggugaacauccagaaggagaucgaccgccugaacgaggucgccaagaaccucaacgagucccugaucgaccugcaggagcucgggaaguacgagcaguacaucaaguggccgugguacaucuggcugggcuucaucgccggccugaucgcgaucgugaucgugaccaucaugcucugcugcaugaccagcugcugcuccugccugaaggggugcugcagcugcggcuccugcugcaaguucgacgaggacgacagcgagcccguccugaagggggugaagcuccacuacacgugaggacuaguuauaagacugacuagcccgaugggccucccaacgggcccuccuccccuccuugcaccgagagaucuaaaaaaaaaaaaaaaaaaaaaaaaaaaaaaaaaaaaaaaaaaaaaaaaaaaaaaaaaaaaaaaaaaaaaaaaaaaaaaaaaaaaaaaaaaaaaaaaaaaa

SEQ ID NO: 25841 - RNA, 4002 nt, Artificial Sequence
  SARS-CoV-2/Wuhan/WIV05/2019__EPI_ISL_402128 spike protein mRNA gc (1-1273)(H69del_V70del_Y144del_N501Y_A570D_D614G_P681H_T716I_S982 A_D1118H)
aggagaaagcuuaccauguucguguuccugguccuccugccccuggugagcucccagugcgugaaccucaccacccgcacgcagcugccgcccgccuacaccaacagcuucacccggggcgucuacuaccccgacaagguguuccgcuccagcgugcugcacuccacccaggaccucuuccugcccuucuucagcaacgucacgugguuccacgccaucuccgggaccaacggcaccaagcgguucgacaacccggugcugcccuucaacgacggggucuacuucgcgagcaccgagaaguccaacaucauccgcggcuggaucuucgggacgacccucgacagcaagacccagucccugcugaucgugaacaacgccaccaacguggucaucaaggugugcgaguuccaguucugcaacgaccccuuccucggcguguaccacaagaacaacaagagcuggauggaguccgaguuccgggucuacagcuccgccaacaacugcacguucgaguacgugagccagcccuuccugauggaccuggagggcaagcaggggaacuucaagaaccuccgcgaguucguguucaagaacaucgacggcuacuucaagaucuacuccaagcacaccccgaucaaccugguccgggaccugccccagggguucagcgcccucgagccccugguggaccugcccaucggcaucaacaucacccgcuuccagacccuccuggcccugcaccgguccuaccucacgccgggggacagcagcuccggcuggaccgcgggcgccgccgccuacuacgugggguaccugcagccccgcaccuuccugcucaaguacaacgagaacggcaccaucacggacgcggucgacugcgcccuggacccccugagcgagaccaagugcacccucaaguccuucaccguggagaaggggaucuaccagacgagcaacuuccgggugcagcccaccgaguccaucguccgcuucccgaacaucaccaaccugugccccuucggcgagguguucaacgccacccgguucgccagcgucuacgccuggaaccgcaagcggaucuccaacugcguggcggacuacagcgugcuguacaacuccgccagcuucuccacguucaagugcuacggcgucagccccaccaagcucaacgaccugugcuucaccaacguguacgccgacuccuucgugauccgcggggacgagguccggcagaucgcccccggccagaccgggaagaucgccgacuacaacuacaagcugccggacgacuucacgggcugcgugaucgcguggaacagcaacaaccucgacuccaaggucgggggcaacuacaacuaccuguaccgccuguuccgcaagagcaaccucaagcccuucgagcgggacaucuccaccgagaucuaccaggccggcagcacccccugcaacgggguggagggcuucaacugcuacuucccccugcaguccuacggguuccagccgaccuacggcgugggguaccagcccuaccggguggucgugcugagcuucgagcuccugcacgcccccgccacggugugcggccccaagaaguccaccaaccuggucaagaacaagugcgugaacuucaacuucaacggccucaccgggaccggcgugcugaccgagagcaacaagaaguuccugccguuccagcaguucgggcgcgacaucgacgacacgaccgacgcgguccgcgacccccagacccuggagauccucgacaucacccccugcagcuucggcgggguguccgugaucacgccgggcaccaacaccagcaaccaggucgccgugcuguaccagggcgugaacugcaccgagguccccguggccauccacgccgaccagcugacgcccaccuggcggguguacuccaccggcagcaacgucuuccagacccgcgccgggugccucaucggcgcggagcacgugaacaacuccuacgagugcgacauccccaucggggccggcaucugcgccagcuaccagacgcagaccaacucccaccggcgcgcccggagcguggcgucccagagcaucaucgccuacaccaugucccugggcgccgagaacagcgucgccuacuccaacaacagcaucgccauccccaucaacuucacgaucuccgugaccaccgagauccugcccgugagcaugaccaagacgagcgucgacugcaccauguacaucugcggggacuccaccgagugcagcaaccuccugcugcaguacggcuccuucugcacccagcucaaccgcgcgcugacggggaucgccguggagcaggacaagaacacccaggagguguucgcccaggucaagcagaucuacaagacgcccccgaucaaggacuucggcggguucaacuucagccagauccugcccgaccccuccaagcccagcaagcgguccuucaucgaggaccuccuguucaacaaggugacccuggccgacgccggcuucaucaagcaguacggcgacugccucggggacaucgcggcccgcgaccugaucugcgcccagaaguucaacggccugaccgugcucccgccccugcugaccgacgagaugaucgcccaguacaccagcgcccuccuggcggggaccaucacguccggcuggaccuucggggccggcgccgcccugcagauccccuucgcgaugcagauggccuaccgguucaacggcaucggggucacccagaacgugcucuacgagaaccagaagcugaucgccaaccaguucaacagcgccaucggcaagauccaggacucccugagcuccaccgccagcgcgcucgggaagcugcaggacguggucaaccagaacgcccaggcccugaacacgcucgugaagcagcuguccagcaacuucggcgccaucuccagcgugcugaacgacauccucgcccgccuggacaaggucgaggccgaggugcagaucgaccggcugaucaccgggcgccuccagagccugcagaccuacgugacccagcagcugauccgggcggccgagauccgcgccagcgccaaccucgccgcgaccaagauguccgagugcguccugggccagagcaagcggguggacuucugcggcaagggguaccaccugauguccuucccccagagcgccccgcacggcguggucuuccuccacgugacguacguccccgcccaggagaagaacuucaccaccgcccccgcgaucugccacgacgggaaggcccacuucccccgcgagggcguguucguguccaacgggacccacugguucgucacgcagcggaacuucuacgagccgcagaucaucaccacccacaacaccuucgugagcggcaacugcgacguggucaucggcaucgugaacaacacgguguacgacccccugcagcccgagcuggacuccuucaaggaggagcucgacaaguacuucaagaaccacaccagccccgacgucgaccugggggacaucuccggcaucaacgccagcguggugaacauccagaaggagaucgaccgccugaacgaggucgccaagaaccucaacgagucccugaucgaccugcaggagcucgggaaguacgagcaguacaucaaguggccgugguacaucuggcugggcuucaucgccggccugaucgcgaucgugauggugaccaucaugcucugcugcaugaccagcugcugcuccugccugaaggggugcugcagcugcggcuccugcugcaaguucgacgaggacgacagcgagcccguccugaagggggugaagcuccacuacacgugaggacuaguuauaagacugacuagcccgaugggccucccaacgggcccuccuccccuccuugcaccgagagaucuaaaaaaaaaaaaaaaaaaaaaaaaaaaaaaaaaaaaaaaaaaaaaaaaaaaaaaaaaaaaaaaaaaaaaaaaaaaaaaaaaaaaaaaaaaaaaaaaaaaa

SEQ ID NO: 25842 - RNA, 4011 nt, Artificial Sequence
  SARS-CoV-2/Wuhan/WIV05/2019__EPI_ISL_402128 spike protein mRNA gc (1-1273)(K417N_E484K_N501Y_D614G)
aggagaaagcuuaccauguucguguuccugguccuccugccccuggugagcucccagugcgugaaccucaccacccgcacgcagcugccgcccgccuacaccaacagcuucacccggggcgucuacuaccccgacaagguguuccgcuccagcgugcugcacuccacccaggaccucuuccugcccuucuucagcaacgucacgugguuccacgccauccacguguccgggaccaacggcaccaagcgguucgacaacccggugcugcccuucaacgacggggucuacuucgcgagcaccgagaaguccaacaucauccgcggcuggaucuucgggacgacccucgacagcaagacccagucccugcugaucgugaacaacgccaccaacguggucaucaaggugugcgaguuccaguucugcaacgaccccuuccucggcguguacuaccacaagaacaacaagagcuggauggaguccgaguuccgggucuacagcuccgccaacaacugcacguucgaguacgugagccagcccuuccugauggaccuggagggcaagcaggggaacuucaagaaccuccgcgaguucguguucaagaacaucgacggcuacuucaagaucuacuccaagcacaccccgaucaaccugguccgggaccugccccagggguucagcgcccucgagccccugguggaccugcccaucggcaucaacaucacccgcuuccagacccuccuggcccugcaccgguccuaccucacgccgggggacagcagcuccggcuggaccgcgggcgccgccgccuacuacgugggguaccugcagccccgcaccuuccugcucaaguacaacgagaacggcaccaucacggacgcggucgacugcgcccuggacccccugagcgagaccaagugcacccucaaguccuucaccguggagaaggggaucuaccagacgagcaacuuccgggugcagcccaccgaguccaucguccgcuucccgaacaucaccaaccugugccccuucggcgagguguucaacgccacccgguucgccagcgucuacgccuggaaccgcaagcggaucuccaacugcguggcggacuacagcgugcuguacaacuccgccagcuucuccacguucaagugcuacggcgucagccccaccaagcucaacgaccugugcuucaccaacguguacgccgacuccuucgugauccgcggggacgagguccggcagaucgcccccggccagaccgggaacaucgccgacuacaacuacaagcugccggacgacuucacgggcugcgugaucgcguggaacagcaacaaccucgacuccaaggucgggggcaacuacaacuaccuguaccgccuguuccgcaagagcaaccucaagcccuucgagcgggacaucuccaccgagaucuaccaggccggcagcacccccugcaacggggugaagggcuucaacugcuacuucccccugcaguccuacggguuccagccgaccuacggcgugggguaccagcccuaccggguggucgugcugagcuucgagcuccugcacgcccccgccacggugugcggccccaagaaguccaccaaccuggucaagaacaagugcgugaacuucaacuucaacggccucaccgggaccggcgugcugaccgagagcaacaagaaguuccugccguuccagcaguucgggcgcgacaucgccgacacgaccgacgcgguccgcgacccccagacccuggagauccucgacaucacccccugcagcuucggcgggguguccgugaucacgccgggcaccaacaccagcaaccaggucgccgugcuguaccagggcgugaacugcaccgagguccccguggccauccacgccgaccagcugacgcccaccuggcggguguacuccaccggcagcaacgucuuccagacccgcgccgggugccucaucggcgcggagcacgugaacaacuccuacgagugcgacauccccaucggggccggcaucugcgccagcuaccagacgcagaccaacuccccgcggcgcgcccggagcguggcgucccagagcaucaucgccuacaccaugucccugggcgccgagaacagcgucgccuacuccaacaacagcaucgccauccccaccaacuucacgaucuccgugaccaccgagauccugcccgugagcaugaccaagacgagcgucgacugcaccauguacaucugcggggacuccaccgagugcagcaaccuccugcugcaguacggcuccuucugcacccagcucaaccgcgcgcugacggggaucgccguggagcaggacaagaacacccaggagguguucgcccaggucaagcagaucuacaagacgcccccgaucaaggacuucggcggguucaacuucagccagauccugcccgaccccuccaagcccagcaagcgguccuucaucgaggaccuccuguucaacaaggugacccuggccgacgccggcuucaucaagcaguacggcgacugccucggggacaucgcggcccgcgaccugaucugcgcccagaaguucaacggccugaccgugcucccgccccugcugaccgacgagaugaucgcccaguacaccagcgcccuccuggcggggaccaucacguccggcuggaccuucggggccggcgccgcccugcagauccccuucgcgaugcagauggccuaccgguucaacggcaucggggucacccagaacgugcucuacgagaaccagaagcugaucgccaaccaguucaacagcgccaucggcaagauccaggacucccugagcuccaccgccagcgcgcucgggaagcugcaggacguggucaaccagaacgcccaggcccugaacacgcucgugaagcagcuguccagcaacuucggcgccaucuccagcgugcugaacgacauccucucccgccuggacaaggucgaggccgaggugcagaucgaccggcugaucaccgggcgccuccagagccugcagaccuacgugacccagcagcugauccgggcggccgagauccgcgccagcgccaaccucgccgcgaccaagauguccgagugcguccugggccagagcaagcggguggacuucugcggcaagggguaccaccugauguccuucccccagagcgccccgcacggcguggucuuccuccacgugacguacguccccgcccaggagaagaacuucaccaccgcccccgcgaucugccacgacgggaaggcccacuucccccgcgagggcguguucguguccaacgggacccacugguucgucacgcagcggaacuucuacgagccgcagaucaucaccaccgacaacaccuucgugagcggcaacugcgacguggucaucggcaucgugaacaacacgguguacgacccccugcagcccgagcuggacuccuucaaggaggagcucgacaaguacuucaagaaccacaccagccccgacgucgaccugggggacaucuccggcaucaacgccagcguggugaacauccagaaggagaucgaccgccugaacgaggucgccaagaaccucaacgagucccugaucgaccugcaggagcucgggaaguacgagcaguacaucaaguggccgugguacaucuggcugggcuucaucgccggccugaucgcgaucgugauggugaccaucaugcucugcugcaugaccagcugcugcuccugccugaaggggugcugcagcugcggcuccugcugcaaguucgacgaggacgacagcgagcccguccugaagggggugaagcuccacuacacgugaggacuaguuauaagacugacuagcccgaugggccucccaacgggcccuccuccccuccuugcaccgagagaucuaaaaaaaaaaaaaaaaaaaaaaaaaaaaaaaaaaaaaaaaaaaaaaaaaaaaaaaaaaaaaaaaaaaaaaaaaaaaaaaaaaaaaaaaaaaaaaaaaaaa

SEQ ID NO: 25843 - RNA, 4002 nt, Artificial Sequence
  SARS-CoV-2/Wuhan/WIV05/2019__EPI_ISL_402128 spike protein mRNA gc (1-1273)(L18F_D80A_D215G_L242del_A243del_L244del_R246I_K417N_E484 K_N501Y_D614G_A701V)
aggagaaagcuuaccauguucguguuccugguccuccugccccuggugagcucccagugcgugaacuucaccacccgcacgcagcugccgcccgccuacaccaacagcuucacccggggcgucuacuaccccgacaagguguuccgcuccagcgugcugcacuccacccaggaccucuuccugcccuucuucagcaacgucacgugguuccacgccauccacguguccgggaccaacggcaccaagcgguucgccaacccggugcugcccuucaacgacggggucuacuucgcgagcaccgagaaguccaacaucauccgcggcuggaucuucgggacgacccucgacagcaagacccagucccugcugaucgugaacaacgccaccaacguggucaucaaggugugcgaguuccaguucugcaacgaccccuuccucggcguguacuaccacaagaacaacaagagcuggauggaguccgaguuccgggucuacagcuccgccaacaacugcacguucgaguacgugagccagcccuuccugauggaccuggagggcaagcaggggaacuucaagaaccuccgcgaguucguguucaagaacaucgacggcuacuucaagaucuacuccaagcacaccccgaucaaccugguccggggccugccccagggguucagcgcccucgagccccugguggaccugcccaucggcaucaacaucacccgcuuccagacccuccacaucuccuaccucacgccgggggacagcagcuccggcuggaccgcgggcgccgccgccuacuacgugggguaccugcagccccgcaccuuccugcucaaguacaacgagaacggcaccaucacggacgcggucgacugcgcccuggacccccugagcgagaccaagugcacccucaaguccuucaccguggagaaggggaucuaccagacgagcaacuuccgggugcagcccaccgaguccaucguccgcuucccgaacaucaccaaccugugccccuucggcgagguguucaacgccacccgguucgccagcgucuacgccuggaaccgcaagcggaucuccaacugcguggcggacuacagcgugcuguacaacuccgccagcuucuccacguucaagugcuacggcgucagccccaccaagcucaacgaccugugcuucaccaacguguacgccgacuccuucgugauccgcggggacgagguccggcagaucgcccccggccagaccgggaacaucgccgacuacaacuacaagcugccggacgacuucacgggcugcgugaucgcguggaacagcaacaaccucgacuccaaggucgggggcaacuacaacuaccuguaccgccuguuccgcaagagcaaccucaagcccuucgagcgggacaucuccaccgagaucuaccaggccggcagcacccccugcaacggggugaagggcuucaacugcuacuucccccugcaguccuacggguuccagccgaccuacggcgugggguaccagcccuaccggguggucgugcugagcuucgagcuccugcacgcccccgccacggugugcggccccaagaaguccaccaaccuggucaagaacaagugcgugaacuucaacuucaacggccucaccgggaccggcgugcugaccgagagcaacaagaaguuccugccguuccagcaguucgggcgcgacaucgccgacacgaccgacgcgguccgcgacccccagacccuggagauccucgacaucacccccugcagcuucggcgggguguccgugaucacgccgggcaccaacaccagcaaccaggucgccgugcuguaccagggcgugaacugcaccgagguccccguggccauccacgccgaccagcugacgcccaccuggcggguguacuccaccggcagcaacgucuuccagacccgcgccgggugccucaucggcgcggagcacgugaacaacuccuacgagugcgacauccccaucggggccggcaucugcgccagcuaccagacgcagaccaacuccccgcggcgcgcccggagcguggcgucccagagcaucaucgccuacaccaugucccugggcguggagaacagcgucgccuacuccaacaacagcaucgccauccccaccaacuucacgaucuccgugaccaccgagauccugcccgugagcaugaccaagacgagcgucgacugcaccauguacaucugcggggacuccaccgagugcagcaaccuccugcugcaguacggcuccuucugcacccagcucaaccgcgcgcugacggggaucgccguggagcaggacaagaacacccaggagguguucgcccaggucaagcagaucuacaagacgcccccgaucaaggacuucggcggguucaacuucagccagauccugcccgaccccuccaagcccagcaagcgguccuucaucgaggaccuccuguucaacaaggugacccuggccgacgccggcuucaucaagcaguacggcgacugccucggggacaucgcggcccgcgaccugaucugcgcccagaaguucaacggccugaccgugcucccgccccugcugaccgacgagaugaucgcccaguacaccagcgcccuccuggcggggaccaucacguccggcuggaccuucggggccggcgccgcccugcagauccccuucgcgaugcagauggccuaccgguucaacggcaucggggucacccagaacgugcucuacgagaaccagaagcugaucgccaaccaguucaacagcgccaucggcaagauccaggacucccugagcuccaccgccagcgcgcucgggaagcugcaggacguggucaaccagaacgcccaggcccugaacacgcucgugaagcagcuguccagcaacuucggcgccaucuccagcgugcugaacgacauccucucccgccuggacaaggucgaggccgaggugcagaucgaccggcugaucaccgggcgccuccagagccugcagaccuacgugacccagcagcugauccgggcggccgagauccgcgccagcgccaaccucgccgcgaccaagauguccgagugcguccugggccagagcaagcggguggacuucugcggcaagggguaccaccugauguccuucccccagagcgccccgcacggcguggucuuccuccacgugacguacguccccgcccaggagaagaacuucaccaccgcccccgcgaucugccacgacgggaaggcccacuucccccgcgagggcguguucguguccaacgggacccacugguucgucacgcagcggaacuucuacgagccgcagaucaucaccaccgacaacaccuucgugagcggcaacugcgacguggucaucggcaucgugaacaacacgguguacgacccccugcagcccgagcuggacuccuucaaggaggagcucgacaaguacuucaagaaccacaccagccccgacgucgaccugggggacaucuccggcaucaacgccagcguggugaacauccagaaggagaucgaccgccugaacgaggucgccaagaaccucaacgagucccugaucgaccugcaggagcucgggaaguacgagcaguacaucaaguggccgugguacaucuggcugggcuucaucgccggccugaucgcgaucgugauggugaccaucaugcucugcugcaugaccagcugcugcuccugccugaaggggugcugcagcugcggcuccugcugcaaguucgacgaggacgacagcgagcccguccugaagggggugaagcuccacuacacgugaggacuaguuauaagacugacuagcccgaugggccucccaacgggcccuccuccccuccuugcaccgagagaucuaaaaaaaaaaaaaaaaaaaaaaaaaaaaaaaaaaaaaaaaaaaaaaaaaaaaaaaaaaaaaaaaaaaaaaaaaaaaaaaaaaaaaaaaaaaaaaaaaaaa

SEQ ID NO: 25844 - RNA, 4011 nt, Artificial Sequence
  SARS-CoV-2/Wuhan/WIV05/2019__EPI_ISL_402128 spike protein mRNA gc (1-1273)(E484K_D614G)
aggagaaagcuuaccauguucguguuccugguccuccugccccuggugagcucccagugcgugaaccucaccacccgcacgcagcugccgcccgccuacaccaacagcuucacccggggcgucuacuaccccgacaagguguuccgcuccagcgugcugcacuccacccaggaccucuuccugcccuucuucagcaacgucacgugguuccacgccauccacguguccgggaccaacggcaccaagcgguucgacaacccggugcugcccuucaacgacggggucuacuucgcgagcaccgagaaguccaacaucauccgcggcuggaucuucgggacgacccucgacagcaagacccagucccugcugaucgugaacaacgccaccaacguggucaucaaggugugcgaguuccaguucugcaacgaccccuuccucggcguguacuaccacaagaacaacaagagcuggauggaguccgaguuccgggucuacagcuccgccaacaacugcacguucgaguacgugagccagcccuuccugauggaccuggagggcaagcaggggaacuucaagaaccuccgcgaguucguguucaagaacaucgacggcuacuucaagaucuacuccaagcacaccccgaucaaccugguccgggaccugccccagggguucagcgcccucgagccccugguggaccugcccaucggcaucaacaucacccgcuuccagacccuccuggcccugcaccgguccuaccucacgccgggggacagcagcuccggcuggaccgcgggcgccgccgccuacuacgugggguaccugcagccccgcaccuuccugcucaaguacaacgagaacggcaccaucacggacgcggucgacugcgcccuggacccccugagcgagaccaagugcacccucaaguccuucaccguggagaaggggaucuaccagacgagcaacuuccgggugcagcccaccgaguccaucguccgcuucccgaacaucaccaaccugugccccuucggcgagguguucaacgccacccgguucgccagcgucuacgccuggaaccgcaagcggaucuccaacugcguggcggacuacagcgugcuguacaacuccgccagcuucuccacguucaagugcuacggcgucagccccaccaagcucaacgaccugugcuucaccaacguguacgccgacuccuucgugauccgcggggacgagguccggcagaucgcccccggccagaccgggaagaucgccgacuacaacuacaagcugccggacgacuucacgggcugcgugaucgcguggaacagcaacaaccucgacuccaaggucgggggcaacuacaacuaccuguaccgccuguuccgcaagagcaaccucaagcccuucgagcgggacaucuccaccgagaucuaccaggccggcagcacccccugcaacggggugaagggcuucaacugcuacuucccccugcaguccuacggguuccagccgaccaacggcgugggguaccagcccuaccggguggucgugcugagcuucgagcuccugcacgcccccgccacggugugcggccccaagaaguccaccaaccuggucaagaacaagugcgugaacuucaacuucaacggccucaccgggaccggcgugcugaccgagagcaacaagaaguuccugccguuccagcaguucgggcgcgacaucgccgacacgaccgacgcgguccgcgacccccagacccuggagauccucgacaucacccccugcagcuucggcgggguguccgugaucacgccgggcaccaacaccagcaaccaggucgccgugcuguaccagggcgugaacugcaccgagguccccguggccauccacgccgaccagcugacgcccaccuggcggguguacuccaccggcagcaacgucuuccagacccgcgccgggugccucaucggcgcggagcacgugaacaacuccuacgagugcgacauccccaucggggccggcaucugcgccagcuaccagacgcagaccaacuccccgcggcgcgcccggagcguggcgucccagagcaucaucgccuacaccaugucccugggcgccgagaacagcgucgccuacuccaacaacagcaucgccauccccaccaacuucacgaucuccgugaccaccgagauccugcccgugagcaugaccaagacgagcgucgacugcaccauguacaucugcggggacuccaccgagugcagcaaccuccugcugcaguacggcuccuucugcacccagcucaaccgcgcgcugacggggaucgccguggagcaggacaagaacacccaggagguguucgcccaggucaagcagaucuacaagacgcccccgaucaaggacuucggcggguucaacuucagccagauccugcccgaccccuccaagcccagcaagcgguccuucaucgaggaccuccuguucaacaaggugacccuggccgacgccggcuucaucaagcaguacggcgacugccucggggacaucgcggcccgcgaccugaucugcgcccagaaguucaacggccugaccgugcucccgccccugcugaccgacgagaugaucgcccaguacaccagcgcccuccuggcggggaccaucacguccggcuggaccuucggggccggcgccgcccugcagauccccuucgcgaugcagauggccuaccgguucaacggcaucggggucacccagaacgugcucuacgagaaccagaagcugaucgccaaccaguucaacagcgccaucggcaagauccaggacucccugagcuccaccgccagcgcgcucgggaagcugcaggacguggucaaccagaacgcccaggcccugaacacgcucgugaagcagcuguccagcaacuucggcgccaucuccagcgugcugaacgacauccucucccgccuggacaaggucgaggccgaggugcagaucgaccggcugaucaccgggcgccuccagagccugcagaccuacgugacccagcagcugauccgggcggccgagauccgcgccagcgccaaccucgccgcgaccaagauguccgagugcguccugggccagagcaagcggguggacuucugcggcaagggguaccaccugauguccuucccccagagcgccccgcacggcguggucuuccuccacgugacguacguccccgcccaggagaagaacuucaccaccgcccccgcgaucugccacgacgggaaggcccacuucccccgcgagggcguguucguguccaacgggacccacugguucgucacgcagcggaacuucuacgagccgcagaucaucaccaccgacaacaccuucgugagcggcaacugcgacguggucaucggcaucgugaacaacacgguguacgacccccugcagcccgagcuggacuccuucaaggaggagcucgacaaguacuucaagaaccacaccagccccgacgucgaccugggggacaucuccggcaucaacgccagcguggugaacauccagaaggagaucgaccgccugaacgaggucgccaagaaccucaacgagucccugaucgaccugcaggagcucgggaaguacgagcaguacaucaaguggccgugguacaucuggcugggcuucaucgccggccugaucgcgaucgugauggugaccaucaugcucugcugcaugaccagcugcugcuccugccugaaggggugcugcagcugcggcuccugcugcaaguucgacgaggacgacagcgagcccguccugaagggggugaagcuccacuacacgugaggacuaguuauaagacugacuagcccgaugggccucccaacgggcccuccuccccuccuugcaccgagagaucuaaaaaaaaaaaaaaaaaaaaaaaaaaaaaaaaaaaaaaaaaaaaaaaaaaaaaaaaaaaaaaaaaaaaaaaaaaaaaaaaaaaaaaaaaaaaaaaaaaaa

SEQ ID NO: 25845 - RNA, 4011 nt, Artificial Sequence
  SARS-CoV-2/Wuhan/WIV05/2019__EPI_ISL_402128 spike protein mRNA gc (1-1273)(L18F_T20N_P26S_D138Y_R190S_K417T_E484K_N501Y_D614G_H655Y _T1027I)
aggagaaagcuuaccauguucguguuccugguccuccugccccuggugagcucccagugcgugaacuucaccaaccgcacgcagcugccgagcgccuacaccaacagcuucacccggggcgucuacuaccccgacaagguguuccgcuccagcgugcugcacuccacccaggaccucuuccugcccuucuucagcaacgucacgugguuccacgccauccacguguccgggaccaacggcaccaagcgguucgacaacccggugcugcccuucaacgacggggucuacuucgcgagcaccgagaaguccaacaucauccgcggcuggaucuucgggacgacccucgacagcaagacccagucccugcugaucgugaacaacgccaccaacguggucaucaaggugugcgaguuccaguucugcaacuaccccuuccucggcguguacuaccacaagaacaacaagagcuggauggaguccgaguuccgggucuacagcuccgccaacaacugcacguucgaguacgugagccagcccuuccugauggaccuggagggcaagcaggggaacuucaagaaccucagcgaguucguguucaagaacaucgacggcuacuucaagaucuacuccaagcacaccccgaucaaccugguccgggaccugccccagggguucagcgcccucgagccccugguggaccugcccaucggcaucaacaucacccgcuuccagacccuccuggcccugcaccgguccuaccucacgccgggggacagcagcuccggcuggaccgcgggcgccgccgccuacuacgugggguaccugcagccccgcaccuuccugcucaaguacaacgagaacggcaccaucacggacgcggucgacugcgcccuggacccccugagcgagaccaagugcacccucaaguccuucaccguggagaaggggaucuaccagacgagcaacuuccgggugcagcccaccgaguccaucguccgcuucccgaacaucaccaaccugugccccuucggcgagguguucaacgccacccgguucgccagcgucuacgccuggaaccgcaagcggaucuccaacugcguggcggacuacagcgugcuguacaacuccgccagcuucuccacguucaagugcuacggcgucagccccaccaagcucaacgaccugugcuucaccaacguguacgccgacuccuucgugauccgcggggacgagguccggcagaucgcccccggccagaccgggaccaucgccgacuacaacuacaagcugccggacgacuucacgggcugcgugaucgcguggaacagcaacaaccucgacuccaaggucgggggcaacuacaacuaccuguaccgccuguuccgcaagagcaaccucaagcccuucgagcgggacaucuccaccgagaucuaccaggccggcagcacccccugcaacggggugaagggcuucaacugcuacuucccccugcaguccuacggguuccagccgaccuacggcgugggguaccagcccuaccggguggucgugcugagcuucgagcuccugcacgcccccgccacggugugcggccccaagaaguccaccaaccuggucaagaacaagugcgugaacuucaacuucaacggccucaccgggaccggcgugcugaccgagagcaacaagaaguuccugccguuccagcaguucgggcgcgacaucgccgacacgaccgacgcgguccgcgacccccagacccuggagauccucgacaucacccccugcagcuucggcgggguguccgugaucacgccgggcaccaacaccagcaaccaggucgccgugcuguaccagggcgugaacugcaccgagguccccguggccauccacgccgaccagcugacgcccaccuggcggguguacuccaccggcagcaacgucuuccagacccgcgccgggugccucaucggcgcggaguacgugaacaacuccuacgagugcgacauccccaucggggccggcaucugcgccagcuaccagacgcagaccaacuccccgcggcgcgcccggagcguggcgucccagagcaucaucgccuacaccaugucccugggcgccgagaacagcgucgccuacuccaacaacagcaucgccauccccaccaacuucacgaucuccgugaccaccgagauccugcccgugagcaugaccaagacgagcgucgacugcaccauguacaucugcggggacuccaccgagugcagcaaccuccugcugcaguacggcuccuucugcacccagcucaaccgcgcgcugacggggaucgccguggagcaggacaagaacacccaggagguguucgcccaggucaagcagaucuacaagacgcccccgaucaaggacuucggcggguucaacuucagccagauccugcccgaccccuccaagcccagcaagcgguccuucaucgaggaccuccuguucaacaaggugacccuggccgacgccggcuucaucaagcaguacggcgacugccucggggacaucgcggcccgcgaccugaucugcgcccagaaguucaacggccugaccgugcucccgccccugcugaccgacgagaugaucgcccaguacaccagcgcccuccuggcggggaccaucacguccggcuggaccuucggggccggcgccgcccugcagauccccuucgcgaugcagauggccuaccgguucaacggcaucggggucacccagaacgugcucuacgagaaccagaagcugaucgccaaccaguucaacagcgccaucggcaagauccaggacucccugagcuccaccgccagcgcgcucgggaagcugcaggacguggucaaccagaacgcccaggcccugaacacgcucgugaagcagcuguccagcaacuucggcgccaucuccagcgugcugaacgacauccucucccgccuggacaaggucgaggccgaggugcagaucgaccggcugaucaccgggcgccuccagagccugcagaccuacgugacccagcagcugauccgggcggccgagauccgcgccagcgccaaccucgccgcgaucaagauguccgagugcguccugggccagagcaagcggguggacuucugcggcaagggguaccaccugauguccuucccccagagcgccccgcacggcguggucuuccuccacgugacguacguccccgcccaggagaagaacuucaccaccgcccccgcgaucugccacgacgggaaggcccacuucccccgcgagggcguguucguguccaacgggacccacugguucgucacgcagcggaacuucuacgagccgcagaucaucaccaccgacaacaccuucgugagcggcaacugcgacguggucaucggcaucgugaacaacacgguguacgacccccugcagcccgagcuggacuccuucaaggaggagcucgacaaguacuucaagaaccacaccagccccgacgucgaccugggggacaucuccggcaucaacgccagcguggugaacauccagaaggagaucgaccgccugaacgaggucgccaagaaccucaacgagucccugaucgaccugcaggagcucgggaaguacgagcaguacaucaaguggccgugguacaucuggcugggcuucaucgccggccugaucgcgaucgugauggugaccaucaugcucugcugcaugaccagcugcugcuccugccugaaggggugcugcagcugcggcuccugcugcaaguucgacgaggacgacagcgagcccguccugaagggggugaagcuccacuacacgugaggacuaguuauaagacugacuagcccgaugggccucccaacgggcccuccuccccuccuugcaccgagagaucuaaaaaaaaaaaaaaaaaaaaaaaaaaaaaaaaaaaaaaaaaaaaaaaaaaaaaaaaaaaaaaaaaaaaaaaaaaaaaaaaaaaaaaaaaaaaaaaaaaaa

SEQ ID NO: 25846 - RNA, 4011 nt, Artificial Sequence
  SARS-CoV-2/Wuhan/WIV05/2019__EPI_ISL_402128 spike protein mRNA gc (1-1273)(S13I_W152C_L452R_D614G)
aggagaaagcuuaccauguucguguuccugguccuccugccccuggugagcauccagugcgugaaccucaccacccgcacgcagcugccgcccgccuacaccaacagcuucacccggggcgucuacuaccccgacaagguguuccgcuccagcgugcugcacuccacccaggaccucuuccugcccuucuucagcaacgucacgugguuccacgccauccacguguccgggaccaacggcaccaagcgguucgacaacccggugcugcccuucaacgacggggucuacuucgcgagcaccgagaaguccaacaucauccgcggcuggaucuucgggacgacccucgacagcaagacccagucccugcugaucgugaacaacgccaccaacguggucaucaaggugugcgaguuccaguucugcaacgaccccuuccucggcguguacuaccacaagaacaacaagagcugcauggaguccgaguuccgggucuacagcuccgccaacaacugcacguucgaguacgugagccagcccuuccugauggaccuggagggcaagcaggggaacuucaagaaccuccgcgaguucguguucaagaacaucgacggcuacuucaagaucuacuccaagcacaccccgaucaaccugguccgggaccugccccagggguucagcgcccucgagccccugguggaccugcccaucggcaucaacaucacccgcuuccagacccuccuggcccugcaccgguccuaccucacgccgggggacagcagcuccggcuggaccgcgggcgccgccgccuacuacgugggguaccugcagccccgcaccuuccugcucaaguacaacgagaacggcaccaucacggacgcggucgacugcgcccuggacccccugagcgagaccaagugcacccucaaguccuucaccguggagaaggggaucuaccagacgagcaacuuccgggugcagcccaccgaguccaucguccgcuucccgaacaucaccaaccugugccccuucggcgagguguucaacgccacccgguucgccagcgucuacgccuggaaccgcaagcggaucuccaacugcguggcggacuacagcgugcuguacaacuccgccagcuucuccacguucaagugcuacggcgucagccccaccaagcucaacgaccugugcuucaccaacguguacgccgacuccuucgugauccgcggggacgagguccggcagaucgcccccggccagaccgggaagaucgccgacuacaacuacaagcugccggacgacuucacgggcugcgugaucgcguggaacagcaacaaccucgacuccaaggucgggggcaacuacaacuaccgcuaccgccuguuccgcaagagcaaccucaagcccuucgagcgggacaucuccaccgagaucuaccaggccggcagcacccccugcaacgggguggagggcuucaacugcuacuucccccugcaguccuacggguuccagccgaccaacggcgugggguaccagcccuaccggguggucgugcugagcuucgagcuccugcacgcccccgccacggugugcggccccaagaaguccaccaaccuggucaagaacaagugcgugaacuucaacuucaacggccucaccgggaccggcgugcugaccgagagcaacaagaaguuccugccguuccagcaguucgggcgcgacaucgccgacacgaccgacgcgguccgcgacccccagacccuggagauccucgacaucacccccugcagcuucggcgggguguccgugaucacgccgggcaccaacaccagcaaccaggucgccgugcuguaccagggcgugaacugcaccgagguccccguggccauccacgccgaccagcugacgcccaccuggcggguguacuccaccggcagcaacgucuuccagacccgcgccgggugccucaucggcgcggagcacgugaacaacuccuacgagugcgacauccccaucggggccggcaucugcgccagcuaccagacgcagaccaacuccccgcggcgcgcccggagcguggcgucccagagcaucaucgccuacaccaugucccugggcgccgagaacagcgucgccuacuccaacaacagcaucgccauccccaccaacuucacgaucuccgugaccaccgagauccugcccgugagcaugaccaagacgagcgucgacugcaccauguacaucugcggggacuccaccgagugcagcaaccuccugcugcaguacggcuccuucugcacccagcucaaccgcgcgcugacggggaucgccguggagcaggacaagaacacccaggagguguucgcccaggucaagcagaucuacaagacgcccccgaucaaggacuucggcggguucaacuucagccagauccugcccgaccccuccaagcccagcaagcgguccuucaucgaggaccuccuguucaacaaggugacccuggccgacgccggcuucaucaagcaguacggcgacugccucggggacaucgcggcccgcgaccugaucugcgcccagaaguucaacggccugaccgugcucccgccccugcugaccgacgagaugaucgcccaguacaccagcgcccuccuggcggggaccaucacguccggcuggaccuucggggccggcgccgcccugcagauccccuucgcgaugcagauggccuaccgguucaacggcaucggggucacccagaacgugcucuacgagaaccagaagcugaucgccaaccaguucaacagcgccaucggcaagauccaggacucccugagcuccaccgccagcgcgcucgggaagcugcaggacguggucaaccagaacgcccaggcccugaacacgcucgugaagcagcuguccagcaacuucggcgccaucuccagcgugcugaacgacauccucucccgccuggacaaggucgaggccgaggugcagaucgaccggcugaucaccgggcgccuccagagccugcagaccuacgugacccagcagcugauccgggcggccgagauccgcgccagcgccaaccucgccgcgaccaagauguccgagugcguccugggccagagcaagcggguggacuucugcggcaagggguaccaccugauguccuucccccagagcgccccgcacggcguggucuuccuccacgugacguacguccccgcccaggagaagaacuucaccaccgcccccgcgaucugccacgacgggaaggcccacuucccccgcgagggcguguucguguccaacgggacccacugguucgucacgcagcggaacuucuacgagccgcagaucaucaccaccgacaacaccuucgugagcggcaacugcgacguggucaucggcaucgugaacaacacgguguacgacccccugcagcccgagcuggacuccuucaaggaggagcucgacaaguacuucaagaaccacaccagccccgacgucgaccugggggacaucuccggcaucaacgccagcguggugaacauccagaaggagaucgaccgccugaacgaggucgccaagaaccucaacgagucccugaucgaccugcaggagcucgggaaguacgagcaguacaucaaguggccgugguacaucuggcugggcuucaucgccggccugaucgcgaucgugauggugaccaucaugcucugcugcaugaccagcugcugcuccugccugaaggggugcugcagcugcggcuccugcugcaaguucgacgaggacgacagcgagcccguccugaagggggugaagcuccacuacacgugaggacuaguuauaagacugacuagcccgaugggccucccaacgggcccuccuccccuccuugcaccgagagaucuaaaaaaaaaaaaaaaaaaaaaaaaaaaaaaaaaaaaaaaaaaaaaaaaaaaaaaaaaaaaaaaaaaaaaaaaaaaaaaaaaaaaaaaaaaaaaaaaaaaa

SEQ ID NO: 25847 - RNA, 4011 nt, Artificial Sequence; identical to SEQ ID NO: 25829
  SARS-CoV-2/Wuhan/WIV05/2019__EPI_ISL_402128 spike protein mRNA gc (1-1273)

SEQ ID NO: 25848 - RNA, 4011 nt, Artificial Sequence
  SARS-CoV-2/Wuhan/WIV05/2019__EPI_ISL_402128 spike protein mRNA gc (1-1273)(D614G)
aggagaaagcuuaccauguucguguuccugguccuccugccccuggugagcucccagugcgugaaccucaccacccgcacgcagcugccgcccgccuacaccaacagcuucacccggggcgucuacuaccccgacaagguguuccgcuccagcgugcugcacuccacccaggaccucuuccugcccuucuucagcaacgucacgugguuccacgccauccacguguccgggaccaacggcaccaagcgguucgacaacccggugcugcccuucaacgacggggucuacuucgcgagcaccgagaaguccaacaucauccgcggcuggaucuucgggacgacccucgacagcaagacccagucccugcugaucgugaacaacgccaccaacguggucaucaaggugugcgaguuccaguucugcaacgaccccuuccucggcguguacuaccacaagaacaacaagagcuggauggaguccgaguuccgggucuacagcuccgccaacaacugcacguucgaguacgugagccagcccuuccugauggaccuggagggcaagcaggggaacuucaagaaccuccgcgaguucguguucaagaacaucgacggcuacuucaagaucuacuccaagcacaccccgaucaaccugguccgggaccugccccagggguucagcgcccucgagccccugguggaccugcccaucggcaucaacaucacccgcuuccagacccuccuggcccugcaccgguccuaccucacgccgggggacagcagcuccggcuggaccgcgggcgccgccgccuacuacgugggguaccugcagccccgcaccuuccugcucaaguacaacgagaacggcaccaucacggacgcggucgacugcgcccuggacccccugagcgagaccaagugcacccucaaguccuucaccguggagaaggggaucuaccagacgagcaacuuccgggugcagcccaccgaguccaucguccgcuucccgaacaucaccaaccugugccccuucggcgagguguucaacgccacccgguucgccagcgucuacgccuggaaccgcaagcggaucuccaacugcguggcggacuacagcgugcuguacaacuccgccagcuucuccacguucaagugcuacggcgucagccccaccaagcucaacgaccugugcuucaccaacguguacgccgacuccuucgugauccgcggggacgagguccggcagaucgcccccggccagaccgggaagaucgccgacuacaacuacaagcugccggacgacuucacgggcugcgugaucgcguggaacagcaacaaccucgacuccaaggucgggggcaacuacaacuaccuguaccgccuguuccgcaagagcaaccucaagcccuucgagcgggacaucuccaccgagaucuaccaggccggcagcacccccugcaacgggguggagggcuucaacugcuacuucccccugcaguccuacggguuccagccgaccaacggcgugggguaccagcccuaccggguggucgugcugagcuucgagcuccugcacgcccccgccacggugugcggccccaagaaguccaccaaccuggucaagaacaagugcgugaacuucaacuucaacggccucaccgggaccggcgugcugaccgagagcaacaagaaguuccugccguuccagcaguucgggcgcgacaucgccgacacgaccgacgcgguccgcgacccccagacccuggagauccucgacaucacccccugcagcuucggcgggguguccgugaucacgccgggcaccaacaccagcaaccaggucgccgugcuguaccagggcgugaacugcaccgagguccccguggccauccacgccgaccagcugacgcccaccuggcggguguacuccaccgggagcaacgucuuccagacccgcgccggcugccucaucggggcggagcacgugaacaacuccuacgagugcgacauccccaucggcgccggcaucugcgccagcuaccagacgcagaccaacuccccgcggcgcgcccggagcguggcgucccagagcaucaucgccuacaccaugucccugggggccgagaacagcgucgccuacuccaacaacagcaucgccauccccaccaacuucacgaucuccgugaccaccgagauccugcccgugagcaugaccaagacgagcgucgacugcaccauguacaucugcggcgacuccaccgagugcagcaaccuccugcugcaguacggguccuucugcacccagcucaaccgcgcgcugacgggcaucgccguggagcaggacaagaacacccaggagguguucgcccaggucaagcagaucuacaagacgcccccgaucaaggacuucgggggcuucaacuucagccagauccugcccgaccccuccaagcccagcaagcgguccuucaucgaggaccuccuguucaacaaggugacccuggccgacgccggcuucaucaagcaguacggggacugccucggcgacaucgcggcccgcgaccugaucugcgcccagaaguucaacgggcugaccgugcucccgccccugcugaccgacgagaugaucgcccaguacaccagcgcccuccuggcgggcaccaucacguccggguggaccuucggcgccggcgccgcccugcagauccccuucgcgaugcagauggccuaccgguucaacgggaucggcgucacccagaacgugcucuacgagaaccagaagcugaucgccaaccaguucaacagcgccaucgggaagauccaggacucccugagcuccaccgccagcgcgcucggcaagcugcaggacguggucaaccagaacgcccaggcccugaacacgcucgugaagcagcuguccagcaacuucggggccaucuccagcgugcugaacgacauccucucccgccuggacaaggucgaggccgaggugcagaucgaccggcugaucaccggccgccuccagagccugcagaccuacgugacccagcagcugauccgggcggccgagauccgcgccagcgccaaccucgccgcgaccaagauguccgagugcguccugggccagagcaagcggguggacuucugcgggaagggcuaccaccugauguccuucccccagagcgccccgcacgggguggucuuccuccacgugacguacguccccgcccaggagaagaacuucaccaccgcccccgcgaucugccacgacggcaaggcccacuucccccgcgaggggguguucguguccaacggcacccacugguucgucacgcagcggaacuucuacgagccgcagaucaucaccaccgacaacaccuucgugagcggcaacugcgacguggucaucgggaucgugaacaacacgguguacgacccccugcagcccgagcuggacuccuucaaggaggagcucgacaaguacuucaagaaccacaccagccccgacgucgaccugggcgacaucuccgggaucaacgccagcguggugaacauccagaaggagaucgaccgccugaacgaggucgccaagaaccucaacgagucccugaucgaccugcaggagcucggcaaguacgagcaguacaucaaguggccgugguacaucuggcugggcuucaucgccgggcugaucgcgaucgugauggugaccaucaugcucugcugcaugaccagcugcugcuccugccugaagggcugcugcagcugcggguccugcugcaaguucgacgaggacgacagcgagcccguccugaagggcgugaagcuccacuacacgugaggacuaguuauaagacugacuagcccgaugggccucccaacgggcccuccuccccuccuugcaccgagagaucuaaaaaaaaaaaaaaaaaaaaaaaaaaaaaaaaaaaaaaaaaaaaaaaaaaaaaaaaaaaaaaaaaaaaaaaaaaaaaaaaaaaaaaaaaaaaaaaaaaaa

SEQ ID NO: 25849 - RNA, 4011 nt, Artificial Sequence
  SARS-CoV-2/Wuhan/WIV05/2019__EPI_ISL_402128 spike protein mRNA gc (1-1273)(A222V_D614G)
aggagaaagcuuaccauguucguguuccugguccuccugccccuggugagcucccagugcgugaaccucaccacccgcacgcagcugccgcccgccuacaccaacagcuucacccggggcgucuacuaccccgacaagguguuccgcuccagcgugcugcacuccacccaggaccucuuccugcccuucuucagcaacgucacgugguuccacgccauccacguguccgggaccaacggcaccaagcgguucgacaacccggugcugcccuucaacgacggggucuacuucgcgagcaccgagaaguccaacaucauccgcggcuggaucuucgggacgacccucgacagcaagacccagucccugcugaucgugaacaacgccaccaacguggucaucaaggugugcgaguuccaguucugcaacgaccccuuccucggcguguacuaccacaagaacaacaagagcuggauggaguccgaguuccgggucuacagcuccgccaacaacugcacguucgaguacgugagccagcccuuccugauggaccuggagggcaagcaggggaacuucaagaaccuccgcgaguucguguucaagaacaucgacggcuacuucaagaucuacuccaagcacaccccgaucaaccugguccgggaccugccccagggguucagcgugcucgagccccugguggaccugcccaucggcaucaacaucacccgcuuccagacccuccuggcccugcaccgguccuaccucacgccgggggacagcagcuccggcuggaccgccggcgcggccgccuacuacgucggguaccugcagccccgcaccuuccugcucaaguacaacgagaacggcaccaucacggacgccguggacugcgcgcuggacccccugagcgagaccaagugcacccucaaguccuucaccguggagaaggggaucuaccagacgagcaacuuccggguccagcccaccgaguccaucgugcgcuucccgaacaucaccaaccugugccccuucggcgaggucuucaacgccacccgguucgccagcguguacgccuggaaccgcaagcggaucuccaacugcguggccgacuacagcguccuguacaacuccgcgagcuucuccacguucaagugcuacggcgugagccccaccaagcucaacgaccugugcuucaccaacguguacgccgacuccuucgucauccgcggggacgaggugcggcagaucgcccccggccagaccgggaagaucgccgacuacaacuacaagcugccggacgacuucacgggcugcgugaucgccuggaacagcaacaaccucgacuccaaggucgggggcaacuacaacuaccuguaccgccuguuccgcaagagcaaccucaagcccuucgagcgggacaucuccaccgagaucuaccaggcgggcagcacccccugcaacgggguggagggcuucaacugcuacuucccccugcaguccuacggguuccagccgaccaacggcgugggguaccagcccuaccgggucguggugcugagcuucgagcuccugcacgcccccgccacggucugcggccccaagaaguccaccaaccuggugaagaacaagugcgugaacuucaacuucaacggccucaccgggaccggcguccugaccgagagcaacaagaaguuccugccguuccagcaguucgggcgcgacaucgccgacacgaccgacgccgugcgcgacccccagacccuggagauccucgacaucacccccugcagcuucggcgggguguccgucaucacgccgggcaccaacaccagcaaccagguggcggugcuguaccagggcgucaacugcaccgaggugcccguggccauccacgccgaccagcugacgcccaccuggcgggucuacuccaccgggagcaacguguuccagacccgcgccggcugccucaucggggccgagcacgugaacaacuccuacgagugcgacauccccaucggcgcgggcaucugcgccagcuaccagacgcagaccaacuccccgcggcgcgcccggagcgucgccucccagagcaucaucgcguacaccaugucccugggggccgagaacagcguggccuacuccaacaacagcaucgccauccccaccaacuucacgaucuccgugaccaccgagauccugcccgucagcaugaccaagacgagcguggacugcaccauguacaucugcggcgacuccaccgagugcagcaaccuccugcugcaguacggguccuucugcacccagcucaaccgcgcccugacgggcaucgcgguggagcaggacaagaacacccaggaggucuucgcccaggugaagcagaucuacaagacgcccccgaucaaggacuucgggggcuucaacuucagccagauccugcccgaccccuccaagcccagcaagcgguccuucaucgaggaccuccuguucaacaaggugacccuggccgacgccggcuucaucaagcaguacggggacugccucggcgacaucgccgcgcgcgaccugaucugcgcccagaaguucaacgggcugaccguccucccgccccugcugaccgacgagaugaucgcccaguacaccagcgcccuccuggccggcaccaucacguccggguggaccuucggcgcgggcgccgcccugcagauccccuucgccaugcagauggcguaccgguucaacgggaucggcgugacccagaacgugcucuacgagaaccagaagcugaucgccaaccaguucaacagcgccaucgggaagauccaggacucccugagcuccaccgccagcgcccucggcaagcugcaggacgucgugaaccagaacgcgcaggcccugaacacgcucgugaagcagcuguccagcaacuucggggccaucuccagcguccugaacgacauccucucccgccuggacaagguggaggccgaggugcagaucgaccggcugaucaccggccgccuccagagccugcagaccuacgucacccagcagcugauccgggccgcggagauccgcgccagcgccaaccucgccgccaccaagauguccgagugcgugcugggccagagcaagcggguggacuucugcgggaagggcuaccaccugauguccuucccccagagcgcgccgcacggggucguguuccuccacgucacguacgugcccgcccaggagaagaacuucaccaccgcccccgccaucugccacgacggcaaggcgcacuucccccgcgaggggguguucgucuccaacggcacccacugguucgugacgcagcggaacuucuacgagccgcagaucaucaccaccgacaacaccuucgugagcggcaacugcgacgucgugaucgggaucgugaacaacacggucuacgacccccugcagcccgagcuggacuccuucaaggaggagcucgacaaguacuucaagaaccacaccagccccgacguggaccugggcgacaucuccgggaucaacgccagcguggucaacauccagaaggagaucgaccgccugaacgagguggccaagaaccucaacgagucccugaucgaccugcaggagcucggcaaguacgagcaguacaucaaguggccgugguacaucuggcugggcuucaucgccgggcugaucgccaucgugauggucaccaucaugcucugcugcaugaccagcugcugcuccugccugaagggcugcugcagcugcggguccugcugcaaguucgacgaggacgacagcgagcccgugcugaagggcgugaagcuccacuacacgugaggacuaguuauaagacugacuagcccgaugggccucccaacgggcccuccuccccuccuugcaccgagagaucuaaaaaaaaaaaaaaaaaaaaaaaaaaaaaaaaaaaaaaaaaaaaaaaaaaaaaaaaaaaaaaaaaaaaaaaaaaaaaaaaaaaaaaaaaaaaaaaaaaaa

SEQ ID NO: 25850 - RNA, 4011 nt, Artificial Sequence
  SARS-CoV-2/Wuhan/WIV05/2019__EPI_ISL_402128 spike protein mRNA gc (1-1273)(N439K_D614G)
aggagaaagcuuaccauguucguguuccugguccuccugccccuggugagcucccagugcgugaaccucaccacccgcacgcagcugccgcccgccuacaccaacagcuucacccggggcgucuacuaccccgacaagguguuccgcuccagcgugcugcacuccacccaggaccucuuccugcccuucuucagcaacgucacgugguuccacgccauccacguguccgggaccaacggcaccaagcgguucgacaacccggugcugcccuucaacgacggggucuacuucgcgagcaccgagaaguccaacaucauccgcggcuggaucuucgggacgacccucgacagcaagacccagucccugcugaucgugaacaacgccaccaacguggucaucaaggugugcgaguuccaguucugcaacgaccccuuccucggcguguacuaccacaagaacaacaagagcuggauggaguccgaguuccgggucuacagcuccgccaacaacugcacguucgaguacgugagccagcccuuccugauggaccuggagggcaagcaggggaacuucaagaaccuccgcgaguucguguucaagaacaucgacggcuacuucaagaucuacuccaagcacaccccgaucaaccugguccgggaccugccccagggguucagcgcccucgagccccugguggaccugcccaucggcaucaacaucacccgcuuccagacccuccuggcccugcaccgguccuaccucacgccgggggacagcagcuccggcuggaccgcgggcgccgccgccuacuacgugggguaccugcagccccgcaccuuccugcucaaguacaacgagaacggcaccaucacggacgcggucgacugcgcccuggacccccugagcgagaccaagugcacccucaaguccuucaccguggagaaggggaucuaccagacgagcaacuuccgggugcagcccaccgaguccaucguccgcuucccgaacaucaccaaccugugccccuucggcgagguguucaacgccacccgguucgccagcgucuacgccuggaaccgcaagcggaucuccaacugcguggcggacuacagcgugcuguacaacuccgccagcuucuccacguucaagugcuacggcgucagccccaccaagcucaacgaccugugcuucaccaacguguacgccgacuccuucgugauccgcggggacgagguccggcagaucgcccccggccagaccgggaagaucgccgacuacaacuacaagcugccggacgacuucacgggcugcgugaucgcguggaacagcaagaaccucgacuccaaggucgggggcaacuacaacuaccuguaccgccuguuccgcaagagcaaccucaagcccuucgagcgggacaucuccaccgagaucuaccaggccggcagcacccccugcaacgggguggagggcuucaacugcuacuucccccugcaguccuacggguuccagccgaccaacggcgugggguaccagcccuaccggguggucgugcugagcuucgagcuccugcacgcccccgccacggugugcggccccaagaaguccaccaaccuggucaagaacaagugcgugaacuucaacuucaacggccucaccgggaccggcgugcugaccgagagcaacaagaaguuccugccguuccagcaguucgggcgcgacaucgccgacacgaccgacgcgguccgcgacccccagacccuggagauccucgacaucacccccugcagcuucggcgggguguccgugaucacgccgggcaccaacaccagcaaccaggucgccgugcuguaccagggcgugaacugcaccgagguccccguggccauccacgccgaccagcugacgcccaccuggcggguguacuccaccgggagcaacgucuuccagacccgcgccggcugccucaucggggcggagcacgugaacaacuccuacgagugcgacauccccaucggcgccggcaucugcgccagcuaccagacgcagaccaacuccccgcggcgcgcccggagcguggcgucccagagcaucaucgccuacaccaugucccugggggccgagaacagcgucgccuacuccaacaacagcaucgccauccccaccaacuucacgaucuccgugaccaccgagauccugcccgugagcaugaccaagacgagcgucgacugcaccauguacaucugcggcgacuccaccgagugcagcaaccuccugcugcaguacggguccuucugcacccagcucaaccgcgcgcugacgggcaucgccguggagcaggacaagaacacccaggagguguucgcccaggucaagcagaucuacaagacgcccccgaucaaggacuucgggggcuucaacuucagccagauccugcccgaccccuccaagcccagcaagcgguccuucaucgaggaccuccuguucaacaaggugacccuggccgacgccggcuucaucaagcaguacggggacugccucggcgacaucgcggcccgcgaccugaucugcgcccagaaguucaacgggcugaccgugcucccgccccugcugaccgacgagaugaucgcccaguacaccagcgcccuccuggcgggcaccaucacguccggguggaccuucggcgccggcgccgcccugcagauccccuucgcgaugcagauggccuaccgguucaacgggaucggcgucacccagaacgugcucuacgagaaccagaagcugaucgccaaccaguucaacagcgccaucgggaagauccaggacucccugagcuccaccgccagcgcgcucggcaagcugcaggacguggucaaccagaacgcccaggcccugaacacgcucgugaagcagcuguccagcaacuucggggccaucuccagcgugcugaacgacauccucucccgccuggacaaggucgaggccgaggugcagaucgaccggcugaucaccggccgccuccagagccugcagaccuacgugacccagcagcugauccgggcggccgagauccgcgccagcgccaaccucgccgcgaccaagauguccgagugcguccugggccagagcaagcggguggacuucugcgggaagggcuaccaccugauguccuucccccagagcgccccgcacgggguggucuuccuccacgugacguacguccccgcccaggagaagaacuucaccaccgcccccgcgaucugccacgacggcaaggcccacuucccccgcgaggggguguucguguccaacggcacccacugguucgucacgcagcggaacuucuacgagccgcagaucaucaccaccgacaacaccuucgugagcggcaacugcgacguggucaucgggaucgugaacaacacgguguacgacccccugcagcccgagcuggacuccuucaaggaggagcucgacaaguacuucaagaaccacaccagccccgacgucgaccugggcgacaucuccgggaucaacgccagcguggugaacauccagaaggagaucgaccgccugaacgaggucgccaagaaccucaacgagucccugaucgaccugcaggagcucggcaaguacgagcaguacaucaaguggccgugguacaucuggcugggcuucaucgccgggcugaucgcgaucgugauggugaccaucaugcucugcugcaugaccagcugcugcuccugccugaagggcugcugcagcugcggguccugcugcaaguucgacgaggacgacagcgagcccguccugaagggcgugaagcuccacuacacgugaggacuaguuauaagacugacuagcccgaugggccucccaacgggcccuccuccccuccuugcaccgagagaucuaaaaaaaaaaaaaaaaaaaaaaaaaaaaaaaaaaaaaaaaaaaaaaaaaaaaaaaaaaaaaaaaaaaaaaaaaaaaaaaaaaaaaaaaaaaaaaaaaaaa

SEQ ID NO: 25851 - RNA, 4011 nt, Artificial Sequence
  SARS-CoV-2/Wuhan/WIV05/2019__EPI_ISL_402128 spike protein mRNA gc (1-1273)(S477N_D614G)
aggagaaagcuuaccauguucguguuccugguccuccugccccuggugagcucccagugcgugaaccucaccacccgcacgcagcugccgcccgccuacaccaacagcuucacccggggcgucuacuaccccgacaagguguuccgcuccagcgugcugcacuccacccaggaccucuuccugcccuucuucagcaacgucacgugguuccacgccauccacguguccgggaccaacggcaccaagcgguucgacaacccggugcugcccuucaacgacggggucuacuucgcgagcaccgagaaguccaacaucauccgcggcuggaucuucgggacgacccucgacagcaagacccagucccugcugaucgugaacaacgccaccaacguggucaucaaggugugcgaguuccaguucugcaacgaccccuuccucggcguguacuaccacaagaacaacaagagcuggauggaguccgaguuccgggucuacagcuccgccaacaacugcacguucgaguacgugagccagcccuuccugauggaccuggagggcaagcaggggaacuucaagaaccuccgcgaguucguguucaagaacaucgacggcuacuucaagaucuacuccaagcacaccccgaucaaccugguccgggaccugccccagggguucagcgcccucgagccccugguggaccugcccaucggcaucaacaucacccgcuuccagacccuccuggcccugcaccgguccuaccucacgccgggggacagcagcuccggcuggaccgcgggcgccgccgccuacuacgugggguaccugcagccccgcaccuuccugcucaaguacaacgagaacggcaccaucacggacgcggucgacugcgcccuggacccccugagcgagaccaagugcacccucaaguccuucaccguggagaaggggaucuaccagacgagcaacuuccgggugcagcccaccgaguccaucguccgcuucccgaacaucaccaaccugugccccuucggcgagguguucaacgccacccgguucgccagcgucuacgccuggaaccgcaagcggaucuccaacugcguggcggacuacagcgugcuguacaacuccgccagcuucuccacguucaagugcuacggcgucagccccaccaagcucaacgaccugugcuucaccaacguguacgccgacuccuucgugauccgcggggacgagguccggcagaucgcccccggccagaccgggaagaucgccgacuacaacuacaagcugccggacgacuucacgggcugcgugaucgcguggaacagcaacaaccucgacuccaaggucgggggcaacuacaacuaccuguaccgccuguuccgcaagagcaaccucaagcccuucgagcgggacaucuccaccgagaucuaccaggccggcaacacccccugcaacgggguggagggcuucaacugcuacuucccccugcagagcuacggguuccagccgaccaacggcgugggguaccagcccuaccggguggucgugcuguccuucgagcuccugcacgcccccgccacggugugcggccccaagaaguccaccaaccuggucaagaacaagugcgugaacuucaacuucaacggccucaccgggaccggcgugcugaccgagagcaacaagaaguuccugccguuccagcaguucgggcgcgacaucgccgacacgaccgacgcgguccgcgacccccagacccuggagauccucgacaucacccccugcagcuucggcggggugagcgugaucacgccgggcaccaacaccuccaaccaggucgccgugcuguaccagggcgugaacugcaccgagguccccguggccauccacgccgaccagcugacgcccaccuggcggguguacagcaccggguccaacgucuuccagacccgcgccggcugccucaucggggcggagcacgugaacaacagcuacgagugcgacauccccaucggcgccggcaucugcgccuccuaccagacgcagaccaacagcccgcggcgcgcccgguccguggcgagccaguccaucaucgccuacaccaugagccugggggccgagaacuccgucgccuacagcaacaacuccaucgccauccccaccaacuucacgaucagcgugaccaccgagauccugcccguguccaugaccaagacgagcgucgacugcaccauguacaucugcggcgacagcaccgagugcuccaaccuccugcugcaguacgggagcuucugcacccagcucaaccgcgcgcugacgggcaucgccguggagcaggacaagaacacccaggagguguucgcccaggucaagcagaucuacaagacgcccccgaucaaggacuucgggggcuucaacuucucccagauccugcccgaccccagcaagcccuccaagcggagcuucaucgaggaccuccuguucaacaaggugacccuggccgacgccggcuucaucaagcaguacggggacugccucggcgacaucgcggcccgcgaccugaucugcgcccagaaguucaacgggcugaccgugcucccgccccugcugaccgacgagaugaucgcccaguacaccuccgcccuccuggcgggcaccaucacgagcggguggaccuucggcgccggcgccgcccugcagauccccuucgcgaugcagauggccuaccgguucaacgggaucggcgucacccagaacgugcucuacgagaaccagaagcugaucgccaaccaguucaacuccgccaucgggaagauccaggacagccuguccagcaccgccuccgcgcucggcaagcugcaggacguggucaaccagaacgcccaggcccugaacacgcucgugaagcagcugagcuccaacuucggggccaucagcuccgugcugaacgacauccucagccgccuggacaaggucgaggccgaggugcagaucgaccggcugaucaccggccgccuccagucccugcagaccuacgugacccagcagcugauccgggcggccgagauccgcgccagcgccaaccucgccgcgaccaagaugagcgagugcguccugggccaguccaagcggguggacuucugcgggaagggcuaccaccugaugagcuucccccaguccgccccgcacgggguggucuuccuccacgugacguacguccccgcccaggagaagaacuucaccaccgcccccgcgaucugccacgacggcaaggcccacuucccccgcgaggggguguucgugagcaacggcacccacugguucgucacgcagcggaacuucuacgagccgcagaucaucaccaccgacaacaccuucguguccggcaacugcgacguggucaucgggaucgugaacaacacgguguacgacccccugcagcccgagcuggacagcuucaaggaggagcucgacaaguacuucaagaaccacaccucccccgacgucgaccugggcgacaucagcgggaucaacgccuccguggugaacauccagaaggagaucgaccgccugaacgaggucgccaagaaccucaacgagagccugaucgaccugcaggagcucggcaaguacgagcaguacaucaaguggccgugguacaucuggcugggcuucaucgccgggcugaucgcgaucgugauggugaccaucaugcucugcugcaugaccuccugcugcagcugccugaagggcugcugcuccugcgggagcugcugcaaguucgacgaggacgacuccgagcccguccugaagggcgugaagcuccacuacacgugaggacuaguuauaagacugacuagcccgaugggccucccaacgggcccuccuccccuccuugcaccgagagaucuaaaaaaaaaaaaaaaaaaaaaaaaaaaaaaaaaaaaaaaaaaaaaaaaaaaaaaaaaaaaaaaaaaaaaaaaaaaaaaaaaaaaaaaaaaaaaaaaaaaa

SEQ ID NO: 25852 - RNA, 4011 nt, Artificial Sequence
  SARS-CoV-2/Wuhan/WIV05/2019__EPI_ISL_402128 spike protein mRNA gc (1-1273)(N501Y_D614G)
aggagaaagcuuaccauguucguguuccugguccuccugccccuggugagcucccagugcgugaaccucaccacccgcacgcagcugccgcccgccuacaccaacagcuucacccggggcgucuacuaccccgacaagguguuccgcuccagcgugcugcacuccacccaggaccucuuccugcccuucuucagcaacgucacgugguuccacgccauccacguguccgggaccaacggcaccaagcgguucgacaacccggugcugcccuucaacgacggggucuacuucgcgagcaccgagaaguccaacaucauccgcggcuggaucuucgggacgacccucgacagcaagacccagucccugcugaucgugaacaacgccaccaacguggucaucaaggugugcgaguuccaguucugcaacgaccccuuccucggcguguacuaccacaagaacaacaagagcuggauggaguccgaguuccgggucuacagcuccgccaacaacugcacguucgaguacgugagccagcccuuccugauggaccuggagggcaagcaggggaacuucaagaaccuccgcgaguucguguucaagaacaucgacggcuacuucaagaucuacuccaagcacaccccgaucaaccugguccgggaccugccccagggguucagcgcccucgagccccugguggaccugcccaucggcaucaacaucacccgcuuccagacccuccuggcccugcaccgguccuaccucacgccgggggacagcagcuccggcuggaccgcgggcgccgccgccuacuacgugggguaccugcagccccgcaccuuccugcucaaguacaacgagaacggcaccaucacggacgcggucgacugcgcccuggacccccugagcgagaccaagugcacccucaaguccuucaccguggagaaggggaucuaccagacgagcaacuuccgggugcagcccaccgaguccaucguccgcuucccgaacaucaccaaccugugccccuucggcgagguguucaacgccacccgguucgccagcgucuacgccuggaaccgcaagcggaucuccaacugcguggcggacuacagcgugcuguacaacuccgccagcuucuccacguucaagugcuacggcgucagccccaccaagcucaacgaccugugcuucaccaacguguacgccgacuccuucgugauccgcggggacgagguccggcagaucgcccccggccagaccgggaagaucgccgacuacaacuacaagcugccggacgacuucacgggcugcgugaucgcguggaacagcaacaaccucgacuccaaggucgggggcaacuacaacuaccuguaccgccuguuccgcaagagcaaccucaagcccuucgagcgggacaucuccaccgagaucuaccaggccggcagcacccccugcaacgggguggagggcuucaacugcuacuucccccugcaguccuacggguuccagccgaccuacggcgugggguaccagcccuaccggguggucgugcugagcuucgagcuccugcacgcccccgccacggugugcggccccaagaaguccaccaaccuggucaagaacaagugcgugaacuucaacuucaacggccucaccgggaccggcgugcugaccgagagcaacaagaaguuccugccguuccagcaguucgggcgcgacaucgccgacacgaccgacgcgguccgcgacccccagacccuggagauccucgacaucacccccugcagcuucggcgggguguccgugaucacgccgggcaccaacaccagcaaccaggucgccgugcuguaccagggcgugaacugcaccgagguccccguggccauccacgccgaccagcugacgcccaccuggcggguguacuccaccgggagcaacgucuuccagacccgcgccggcugccucaucggggcggagcacgugaacaacuccuacgagugcgacauccccaucggcgccggcaucugcgccagcuaccagacgcagaccaacuccccgcggcgcgcccggagcguggcgucccagagcaucaucgccuacaccaugucccugggggccgagaacagcgucgccuacuccaacaacagcaucgccauccccaccaacuucacgaucuccgugaccaccgagauccugcccgugagcaugaccaagacgagcgucgacugcaccauguacaucugcggcgacuccaccgagugcagcaaccuccugcugcaguacggguccuucugcacccagcucaaccgcgcgcugacgggcaucgccguggagcaggacaagaacacccaggagguguucgcccaggucaagcagaucuacaagacgcccccgaucaaggacuucgggggcuucaacuucagccagauccugcccgaccccuccaagcccagcaagcgguccuucaucgaggaccuccuguucaacaaggugacccuggccgacgccggcuucaucaagcaguacggggacugccucggcgacaucgcggcccgcgaccugaucugcgcccagaaguucaacgggcugaccgugcucccgccccugcugaccgacgagaugaucgcccaguacaccagcgcccuccuggcgggcaccaucacguccggguggaccuucggcgccggcgccgcccugcagauccccuucgcgaugcagauggccuaccgguucaacgggaucggcgucacccagaacgugcucuacgagaaccagaagcugaucgccaaccaguucaacagcgccaucgggaagauccaggacucccugagcuccaccgccagcgcgcucggcaagcugcaggacguggucaaccagaacgcccaggcccugaacacgcucgugaagcagcuguccagcaacuucggggccaucuccagcgugcugaacgacauccucucccgccuggacaaggucgaggccgaggugcagaucgaccggcugaucaccggccgccuccagagccugcagaccuacgugacccagcagcugauccgggcggccgagauccgcgccagcgccaaccucgccgcgaccaagauguccgagugcguccugggccagagcaagcggguggacuucugcgggaagggcuaccaccugauguccuucccccagagcgccccgcacgggguggucuuccuccacgugacguacguccccgcccaggagaagaacuucaccaccgcccccgcgaucugccacgacggcaaggcccacuucccccgcgaggggguguucguguccaacggcacccacugguucgucacgcagcggaacuucuacgagccgcagaucaucaccaccgacaacaccuucgugagcggcaacugcgacguggucaucgggaucgugaacaacacgguguacgacccccugcagcccgagcuggacuccuucaaggaggagcucgacaaguacuucaagaaccacaccagccccgacgucgaccugggcgacaucuccgggaucaacgccagcguggugaacauccagaaggagaucgaccgccugaacgaggucgccaagaaccucaacgagucccugaucgaccugcaggagcucggcaaguacgagcaguacaucaaguggccgugguacaucuggcugggcuucaucgccgggcugaucgcgaucgugauggugaccaucaugcucugcugcaugaccagcugcugcuccugccugaagggcugcugcagcugcggguccugcugcaaguucgacgaggacgacagcgagcccguccugaagggcgugaagcuccacuacacgugaggacuaguuauaagacugacuagcccgaugggccucccaacgggcccuccuccccuccuugcaccgagagaucuaaaaaaaaaaaaaaaaaaaaaaaaaaaaaaaaaaaaaaaaaaaaaaaaaaaaaaaaaaaaaaaaaaaaaaaaaaaaaaaaaaaaaaaaaaaaaaaaaaaa

SEQ ID NO: 25853 - RNA, 4005 nt, Artificial Sequence
  SARS-CoV-2/Wuhan/WIV05/2019__EPI_ISL_402128 spike protein mRNA gc (1-1273)(H69del_V70del_D614G)
aggagaaagcuuaccauguucguguuccugguccuccugccccuggugagcucccagugcgugaaccucaccacccgcacgcagcugccgcccgccuacaccaacagcuucacccggggcgucuacuaccccgacaagguguuccgcuccagcgugcugcacuccacccaggaccucuuccugcccuucuucagcaacgucacgugguuccacgccaucuccgggaccaacggcaccaagcgguucgacaacccggugcugcccuucaacgacgggguguacuucgcgagcaccgagaaguccaacaucauccgcggcuggaucuucgggacgacccucgacagcaagacccagucccugcugaucgucaacaacgccaccaacguggugaucaaggucugcgaguuccaguucugcaacgaccccuuccucggcguguacuaccacaagaacaacaagagcuggauggaguccgaguuccggguguacagcuccgccaacaacugcacguucgaguacgucagccagcccuuccugauggaccuggagggcaagcaggggaacuucaagaaccuccgcgaguucguguucaagaacaucgacggcuacuucaagaucuacuccaagcacaccccgaucaaccuggugcgggaccugccccagggguucagcgcccucgagccccuggucgaccugcccaucggcaucaacaucacccgcuuccagacccuccuggcccugcaccgguccuaccucacgccgggggacagcagcuccggcuggaccgcgggcgccgccgccuacuacgugggguaccugcagccccgcaccuuccugcucaaguacaacgagaacggcaccaucacggacgcgguggacugcgcccuggacccccugagcgagaccaagugcacccucaaguccuucaccgucgagaaggggaucuaccagacgagcaacuuccgggugcagcccaccgaguccaucgugcgcuucccgaacaucaccaaccugugccccuucggcgaggucuucaacgccacccgguucgccagcguguacgccuggaaccgcaagcggaucuccaacugcgucgcggacuacagcgugcuguacaacuccgccagcuucuccacguucaagugcuacggcgugagccccaccaagcucaacgaccugugcuucaccaacgucuacgccgacuccuucgugauccgcggggacgaggugcggcagaucgcccccggccagaccgggaagaucgccgacuacaacuacaagcugccggacgacuucacgggcugcgucaucgcguggaacagcaacaaccucgacuccaaggucgggggcaacuacaacuaccuguaccgccuguuccgcaagagcaaccucaagcccuucgagcgggacaucuccaccgagaucuaccaggccggcagcacccccugcaacgggguggagggcuucaacugcuacuucccccugcaguccuacggguuccagccgaccaacggcgugggguaccagcccuaccggguggugguccugagcuucgagcuccugcacgcccccgccacggugugcggccccaagaaguccaccaaccuggugaagaacaagugcgucaacuucaacuucaacggccucaccgggaccggcgugcugaccgagagcaacaagaaguuccugccguuccagcaguucgggcgcgacaucgccgacacgaccgacgcggugcgcgacccccagacccuggagauccucgacaucacccccugcagcuucggcggggucuccgugaucacgccgggcaccaacaccagcaaccagguggccguccuguaccagggcgugaacugcaccgaggugcccgucgccauccacgccgaccagcugacgcccaccuggcggguguacuccaccgggagcaacguguuccagacccgcgccggcugccucaucggggcggagcacgucaacaacuccuacgagugcgacauccccaucggcgccggcaucugcgccagcuaccagacgcagaccaacuccccgcggcgcgcccggagcguggcgucccagagcaucaucgccuacaccaugucccugggggccgagaacagcguggccuacuccaacaacagcaucgccauccccaccaacuucacgaucuccgucaccaccgagauccugcccgugagcaugaccaagacgagcguggacugcaccauguacaucugcggcgacuccaccgagugcagcaaccuccugcugcaguacggguccuucugcacccagcucaaccgcgcgcugacgggcaucgccgucgagcaggacaagaacacccaggagguguucgcccaggugaagcagaucuacaagacgcccccgaucaaggacuucgggggcuucaacuucagccagauccugcccgaccccuccaagcccagcaagcgguccuucaucgaggaccuccuguucaacaaggucacccuggccgacgccggcuucaucaagcaguacggggacugccucggcgacaucgcggcccgcgaccugaucugcgcccagaaguucaacgggcugaccgugcucccgccccugcugaccgacgagaugaucgcccaguacaccagcgcccuccuggcgggcaccaucacguccggguggaccuucggcgccggcgccgcccugcagauccccuucgcgaugcagauggccuaccgguucaacgggaucggcgugacccagaacguccucuacgagaaccagaagcugaucgccaaccaguucaacagcgccaucgggaagauccaggacucccugagcuccaccgccagcgcgcucggcaagcugcaggacguggugaaccagaacgcccaggcccugaacacgcucgucaagcagcuguccagcaacuucggggccaucuccagcgugcugaacgacauccucucccgccuggacaagguggaggccgagguccagaucgaccggcugaucaccggccgccuccagagccugcagaccuacgugacccagcagcugauccgggcggccgagauccgcgccagcgccaaccucgccgcgaccaagauguccgagugcgugcugggccagagcaagcgggucgacuucugcgggaagggcuaccaccugauguccuucccccagagcgccccgcacggggugguguuccuccacgucacguacgugcccgcccaggagaagaacuucaccaccgcccccgcgaucugccacgacggcaaggcccacuucccccgcgagggggucuucguguccaacggcacccacugguucgugacgcagcggaacuucuacgagccgcagaucaucaccaccgacaacaccuucgucagcggcaacugcgacguggugaucgggaucgucaacaacacgguguacgacccccugcagcccgagcuggacuccuucaaggaggagcucgacaaguacuucaagaaccacaccagccccgacguggaccugggcgacaucuccgggaucaacgccagcgucgugaacauccagaaggagaucgaccgccugaacgagguggccaagaaccucaacgagucccugaucgaccugcaggagcucggcaaguacgagcaguacaucaaguggccgugguacaucuggcugggcuucaucgccgggcugaucgcgaucgucauggugaccaucaugcucugcugcaugaccagcugcugcuccugccugaagggcugcugcagcugcggguccugcugcaaguucgacgaggacgacagcgagcccgugcugaagggcgucaagcuccacuacacgugaggacuaguuauaagacugacuagcccgaugggccucccaacgggcccuccuccccuccuugcaccgagagaucuaaaaaaaaaaaaaaaaaaaaaaaaaaaaaaaaaaaaaaaaaaaaaaaaaaaaaaaaaaaaaaaaaaaaaaaaaaaaaaaaaaaaaaaaaaaaaaaaaaaa

SEQ ID NO: 25854 - RNA, 4011 nt, Artificial Sequence
  SARS-CoV-2/Wuhan/WIV05/2019__EPI_ISL_402128 spike protein mRNA gc (1-1273)(Y453F_D614G)
aggagaaagcuuaccauguucguguuccugguccuccugccccuggugagcucccagugcgugaaccucaccacccgcacgcagcugccgcccgccuacaccaacagcuucacccggggcgucuacuaccccgacaagguguuccgcuccagcgugcugcacuccacccaggaccucuuccugcccuucuucagcaacgucacgugguuccacgccauccacguguccgggaccaacggcaccaagcgguucgacaacccggugcugcccuucaacgacggggucuacuucgcgagcaccgagaaguccaacaucauccgcggcuggaucuucgggacgacccucgacagcaagacccagucccugcugaucgugaacaacgccaccaacguggucaucaaggugugcgaguuccaguucugcaacgaccccuuccucggcguguacuaccacaagaacaacaagagcuggauggaguccgaguuccgggucuacagcuccgccaacaacugcacguucgaguacgugagccagcccuuccugauggaccuggagggcaagcaggggaacuucaagaaccuccgcgaguucguguucaagaacaucgacggcuacuucaagaucuacuccaagcacaccccgaucaaccugguccgggaccugccccagggguucagcgcccucgagccccugguggaccugcccaucggcaucaacaucacccgcuuccagacccuccuggcccugcaccgguccuaccucacgccgggggacagcagcuccggcuggaccgcgggcgccgccgccuacuacgugggguaccugcagccccgcaccuuccugcucaaguacaacgagaacggcaccaucacggacgcggucgacugcgcccuggacccccugagcgagaccaagugcacccucaaguccuucaccguggagaaggggaucuaccagacgagcaacuuccgggugcagcccaccgaguccaucguccgcuucccgaacaucaccaaccugugccccuucggcgagguguucaacgccacccgguucgccagcgucuacgccuggaaccgcaagcggaucuccaacugcguggcggacuacagcgugcuguacaacuccgccagcuucuccacguucaagugcuacggcgucagccccaccaagcucaacgaccugugcuucaccaacguguacgccgacuccuucgugauccgcggggacgagguccggcagaucgcccccggccagaccgggaagaucgccgacuacaacuacaagcugccggacgacuucacgggcugcgugaucgcguggaacagcaacaaccucgacuccaaggucgggggcaacuacaacuaccuguuccgccuguuccgcaagagcaaccucaagcccuucgagcgggacaucuccaccgagaucuaccaggccggcagcacccccugcaacgggguggagggcuucaacugcuacuucccccugcaguccuacggguuccagccgaccaacggcgugggguaccagcccuaccggguggucgugcugagcuucgagcuccugcacgcccccgccacggugugcggccccaagaaguccaccaaccuggucaagaacaagugcgugaacuucaacuucaacggccucaccgggaccggcgugcugaccgagagcaacaagaaguuccugccguuccagcaguucgggcgcgacaucgccgacacgaccgacgcgguccgcgacccccagacccuggagauccucgacaucacccccugcagcuucggcgggguguccgugaucacgccgggcaccaacaccagcaaccaggucgccgugcuguaccagggcgugaacugcaccgagguccccguggccauccacgccgaccagcugacgcccaccuggcggguguacuccaccgggagcaacgucuuccagacccgcgccggcugccucaucggggcggagcacgugaacaacuccuacgagugcgacauccccaucggcgccggcaucugcgccagcuaccagacgcagaccaacuccccgcggcgcgcccggagcguggcgucccagagcaucaucgccuacaccaugucccugggggccgagaacagcgucgccuacuccaacaacagcaucgccauccccaccaacuucacgaucuccgugaccaccgagauccugcccgugagcaugaccaagacgagcgucgacugcaccauguacaucugcggcgacuccaccgagugcagcaaccuccugcugcaguacggguccuucugcacccagcucaaccgcgcgcugacgggcaucgccguggagcaggacaagaacacccaggagguguucgcccaggucaagcagaucuacaagacgcccccgaucaaggacuucgggggcuucaacuucagccagauccugcccgaccccuccaagcccagcaagcgguccuucaucgaggaccuccuguucaacaaggugacccuggccgacgccggcuucaucaagcaguacggggacugccucggcgacaucgcggcccgcgaccugaucugcgcccagaaguucaacgggcugaccgugcucccgccccugcugaccgacgagaugaucgcccaguacaccagcgcccuccuggcgggcaccaucacguccggguggaccuucggcgccggcgccgcccugcagauccccuucgcgaugcagauggccuaccgguucaacgggaucggcgucacccagaacgugcucuacgagaaccagaagcugaucgccaaccaguucaacagcgccaucgggaagauccaggacucccugagcuccaccgccagcgcgcucggcaagcugcaggacguggucaaccagaacgcccaggcccugaacacgcucgugaagcagcuguccagcaacuucggggccaucuccagcgugcugaacgacauccucucccgccuggacaaggucgaggccgaggugcagaucgaccggcugaucaccggccgccuccagagccugcagaccuacgugacccagcagcugauccgggcggccgagauccgcgccagcgccaaccucgccgcgaccaagauguccgagugcguccugggccagagcaagcggguggacuucugcgggaagggcuaccaccugauguccuucccccagagcgccccgcacgggguggucuuccuccacgugacguacguccccgcccaggagaagaacuucaccaccgcccccgcgaucugccacgacggcaaggcccacuucccccgcgaggggguguucguguccaacggcacccacugguucgucacgcagcggaacuucuacgagccgcagaucaucaccaccgacaacaccuucgugagcggcaacugcgacguggucaucgggaucgugaacaacacgguguacgacccccugcagcccgagcuggacuccuucaaggaggagcucgacaaguacuucaagaaccacaccagccccgacgucgaccugggcgacaucuccgggaucaacgccagcguggugaacauccagaaggagaucgaccgccugaacgaggucgccaagaaccucaacgagucccugaucgaccugcaggagcucggcaaguacgagcaguacaucaaguggccgugguacaucuggcugggcuucaucgccgggcugaucgcgaucgugauggugaccaucaugcucugcugcaugaccagcugcugcuccugccugaagggcugcugcagcugcggguccugcugcaaguucgacgaggacgacagcgagcccguccugaagggcgugaagcuccacuacacgugaggacuaguuauaagacugacuagcccgaugggccucccaacgggcccuccuccccuccuugcaccgagagaucuaaaaaaaaaaaaaaaaaaaaaaaaaaaaaaaaaaaaaaaaaaaaaaaaaaaaaaaaaaaaaaaaaaaaaaaaaaaaaaaaaaaaaaaaaaaaaaaaaaaa

SEQ ID NO: 25855 - RNA, 4011 nt, Artificial Sequence
  SARS-CoV-2/Wuhan/WIV05/2019__EPI_ISL_402128 spike protein mRNA gc (1-1273)(D614G_I692V)
aggagaaagcuuaccauguucguguuccugguccuccugccccuggugagcucccagugcgugaaccucaccacccgcacgcagcugccgcccgccuacaccaacagcuucacccggggcgucuacuaccccgacaagguguuccgcuccagcgugcugcacuccacccaggaccucuuccugcccuucuucagcaacgucacgugguuccacgccauccacguguccgggaccaacggcaccaagcgguucgacaacccggugcugcccuucaacgacggggucuacuucgcgagcaccgagaaguccaacaucauccgcggcuggaucuucgggacgacccucgacagcaagacccagucccugcugaucgugaacaacgccaccaacguggucaucaaggugugcgaguuccaguucugcaacgaccccuuccucggcguguacuaccacaagaacaacaagagcuggauggaguccgaguuccgggucuacagcuccgccaacaacugcacguucgaguacgugagccagcccuuccugauggaccuggagggcaagcaggggaacuucaagaaccuccgcgaguucguguucaagaacaucgacggcuacuucaagaucuacuccaagcacaccccgaucaaccugguccgggaccugccccagggguucagcgcccucgagccccugguggaccugcccaucggcaucaacaucacccgcuuccagacccuccuggcccugcaccgguccuaccucacgccgggggacagcagcuccggcuggaccgcgggcgccgccgccuacuacgugggguaccugcagccccgcaccuuccugcucaaguacaacgagaacggcaccaucacggacgcggucgacugcgcccuggacccccugagcgagaccaagugcacccucaaguccuucaccguggagaaggggaucuaccagacgagcaacuuccgggugcagcccaccgaguccaucguccgcuucccgaacaucaccaaccugugccccuucggcgagguguucaacgccacccgguucgccagcgucuacgccuggaaccgcaagcggaucuccaacugcguggcggacuacagcgugcuguacaacuccgccagcuucuccacguucaagugcuacggcgucagccccaccaagcucaacgaccugugcuucaccaacguguacgccgacuccuucgugauccgcggggacgagguccggcagaucgcccccggccagaccgggaagaucgccgacuacaacuacaagcugccggacgacuucacgggcugcgugaucgcguggaacagcaacaaccucgacuccaaggucgggggcaacuacaacuaccuguaccgccuguuccgcaagagcaaccucaagcccuucgagcgggacaucuccaccgagaucuaccaggccggcagcacccccugcaacgggguggagggcuucaacugcuacuucccccugcaguccuacggguuccagccgaccaacggcgugggguaccagcccuaccggguggucgugcugagcuucgagcuccugcacgcccccgccacggugugcggccccaagaaguccaccaaccuggucaagaacaagugcgugaacuucaacuucaacggccucaccgggaccggcgugcugaccgagagcaacaagaaguuccugccguuccagcaguucgggcgcgacaucgccgacacgaccgacgcgguccgcgacccccagacccuggagauccucgacaucacccccugcagcuucggcgggguguccgugaucacgccgggcaccaacaccagcaaccaggucgccgugcuguaccagggcgugaacugcaccgagguccccguggccauccacgccgaccagcugacgcccaccuggcggguguacuccaccgggagcaacgucuuccagacccgcgccggcugccucaucggggcggagcacgugaacaacuccuacgagugcgacauccccaucggcgccggcaucugcgccagcuaccagacgcagaccaacuccccgcggcgcgcccggagcguggcgucccagagcgucaucgccuacaccaugucccugggggccgagaacagcguggccuacuccaacaacagcaucgccauccccaccaacuucacgaucuccgugaccaccgagauccugcccgucagcaugaccaagacgagcguggacugcaccauguacaucugcggcgacuccaccgagugcagcaaccuccugcugcaguacggguccuucugcacccagcucaaccgcgcgcugacgggcaucgccguggagcaggacaagaacacccaggaggucuucgcccaggugaagcagaucuacaagacgcccccgaucaaggacuucgggggcuucaacuucagccagauccugcccgaccccuccaagcccagcaagcgguccuucaucgaggaccuccuguucaacaaggugacccuggccgacgccggcuucaucaagcaguacggggacugccucggcgacaucgcggcccgcgaccugaucugcgcccagaaguucaacgggcugaccguccucccgccccugcugaccgacgagaugaucgcccaguacaccagcgcccuccuggcgggcaccaucacguccggguggaccuucggcgccggcgccgcccugcagauccccuucgcgaugcagauggccuaccgguucaacgggaucggcgugacccagaacgugcucuacgagaaccagaagcugaucgccaaccaguucaacagcgccaucgggaagauccaggacucccugagcuccaccgccagcgcgcucggcaagcugcaggacgucgugaaccagaacgcccaggcccugaacacgcucgugaagcagcuguccagcaacuucggggccaucuccagcguccugaacgacauccucucccgccuggacaagguggaggccgaggugcagaucgaccggcugaucaccggccgccuccagagccugcagaccuacgucacccagcagcugauccgggcggccgagauccgcgccagcgccaaccucgccgcgaccaagauguccgagugcgugcugggccagagcaagcggguggacuucugcgggaagggcuaccaccugauguccuucccccagagcgccccgcacggggucguguuccuccacgucacguacgugcccgcccaggagaagaacuucaccaccgcccccgcgaucugccacgacggcaaggcccacuucccccgcgaggggguguucgucuccaacggcacccacugguucgugacgcagcggaacuucuacgagccgcagaucaucaccaccgacaacaccuucgugagcggcaacugcgacgucgugaucgggaucgugaacaacacggucuacgacccccugcagcccgagcuggacuccuucaaggaggagcucgacaaguacuucaagaaccacaccagccccgacguggaccugggcgacaucuccgggaucaacgccagcguggucaacauccagaaggagaucgaccgccugaacgagguggccaagaaccucaacgagucccugaucgaccugcaggagcucggcaaguacgagcaguacaucaaguggccgugguacaucuggcugggcuucaucgccgggcugaucgcgaucgugauggucaccaucaugcucugcugcaugaccagcugcugcuccugccugaagggcugcugcagcugcggguccugcugcaaguucgacgaggacgacagcgagcccgugcugaagggcgugaagcuccacuacacgugaggacuaguuauaagacugacuagcccgaugggccucccaacgggcccuccuccccuccuugcaccgagagaucuaaaaaaaaaaaaaaaaaaaaaaaaaaaaaaaaaaaaaaaaaaaaaaaaaaaaaaaaaaaaaaaaaaaaaaaaaaaaaaaaaaaaaaaaaaaaaaaaaaaa

SEQ ID NO: 25856 - RNA, 4011 nt, Artificial Sequence
  SARS-CoV-2/Wuhan/WIV05/2019__EPI_ISL_402128 spike protein mRNA gc (1-1273)(D614G_M1229I)
aggagaaagcuuaccauguucguguuccugguccuccugccccuggugagcucccagugcgugaaccucaccacccgcacgcagcugccgcccgccuacaccaacagcuucacccggggcgucuacuaccccgacaagguguuccgcuccagcgugcugcacuccacccaggaccucuuccugcccuucuucagcaacgucacgugguuccacgccauccacguguccgggaccaacggcaccaagcgguucgacaacccggugcugcccuucaacgacggggucuacuucgcgagcaccgagaaguccaacaucauccgcggcuggaucuucgggacgacccucgacagcaagacccagucccugcugaucgugaacaacgccaccaacguggucaucaaggugugcgaguuccaguucugcaacgaccccuuccucggcguguacuaccacaagaacaacaagagcuggauggaguccgaguuccgggucuacagcuccgccaacaacugcacguucgaguacgugagccagcccuuccugauggaccuggagggcaagcaggggaacuucaagaaccuccgcgaguucguguucaagaacaucgacggcuacuucaagaucuacuccaagcacaccccgaucaaccugguccgggaccugccccagggguucagcgcccucgagccccugguggaccugcccaucggcaucaacaucacccgcuuccagacccuccuggcccugcaccgguccuaccucacgccgggggacagcagcuccggcuggaccgcgggcgccgccgccuacuacgugggguaccugcagccccgcaccuuccugcucaaguacaacgagaacggcaccaucacggacgcggucgacugcgcccuggacccccugagcgagaccaagugcacccucaaguccuucaccguggagaaggggaucuaccagacgagcaacuuccgggugcagcccaccgaguccaucguccgcuucccgaacaucaccaaccugugccccuucggcgagguguucaacgccacccgguucgccagcgucuacgccuggaaccgcaagcggaucuccaacugcguggcggacuacagcgugcuguacaacuccgccagcuucuccacguucaagugcuacggcgucagccccaccaagcucaacgaccugugcuucaccaacguguacgccgacuccuucgugauccgcggggacgagguccggcagaucgcccccggccagaccgggaagaucgccgacuacaacuacaagcugccggacgacuucacgggcugcgugaucgcguggaacagcaacaaccucgacuccaaggucgggggcaacuacaacuaccuguaccgccuguuccgcaagagcaaccucaagcccuucgagcgggacaucuccaccgagaucuaccaggccggcagcacccccugcaacgggguggagggcuucaacugcuacuucccccugcaguccuacggguuccagccgaccaacggcgugggguaccagcccuaccggguggucgugcugagcuucgagcuccugcacgcccccgccacggugugcggccccaagaaguccaccaaccuggucaagaacaagugcgugaacuucaacuucaacggccucaccgggaccggcgugcugaccgagagcaacaagaaguuccugccguuccagcaguucgggcgcgacaucgccgacacgaccgacgcgguccgcgacccccagacccuggagauccucgacaucacccccugcagcuucggcgggguguccgugaucacgccgggcaccaacaccagcaaccaggucgccgugcuguaccagggcgugaacugcaccgagguccccguggccauccacgccgaccagcugacgcccaccuggcggguguacuccaccgggagcaacgucuuccagacccgcgccggcugccucaucggggcggagcacgugaacaacuccuacgagugcgacauccccaucggcgccggcaucugcgccagcuaccagacgcagaccaacuccccgcggcgcgcccggagcguggcgucccagagcaucaucgccuacaccaugucccugggggccgagaacagcgucgccuacuccaacaacagcaucgccauccccaccaacuucacgaucuccgugaccaccgagauccugcccgugagcaugaccaagacgagcgucgacugcaccauguacaucugcggcgacuccaccgagugcagcaaccuccugcugcaguacggguccuucugcacccagcucaaccgcgcgcugacgggcaucgccguggagcaggacaagaacacccaggagguguucgcccaggucaagcagaucuacaagacgcccccgaucaaggacuucgggggcuucaacuucagccagauccugcccgaccccuccaagcccagcaagcgguccuucaucgaggaccuccuguucaacaaggugacccuggccgacgccggcuucaucaagcaguacggggacugccucggcgacaucgcggcccgcgaccugaucugcgcccagaaguucaacgggcugaccgugcucccgccccugcugaccgacgagaugaucgcccaguacaccagcgcccuccuggcgggcaccaucacguccggguggaccuucggcgccggcgccgcccugcagauccccuucgcgaugcagauggccuaccgguucaacgggaucggcgucacccagaacgugcucuacgagaaccagaagcugaucgccaaccaguucaacagcgccaucgggaagauccaggacucccugagcuccaccgccagcgcgcucggcaagcugcaggacguggucaaccagaacgcccaggcccugaacacgcucgugaagcagcuguccagcaacuucggggccaucuccagcgugcugaacgacauccucucccgccuggacaaggucgaggccgaggugcagaucgaccggcugaucaccggccgccuccagagccugcagaccuacgugacccagcagcugauccgggcggccgagauccgcgccagcgccaaccucgccgcgaccaagauguccgagugcguccugggccagagcaagcggguggacuucugcgggaagggcuaccaccugauguccuucccccagagcgccccgcacgggguggucuuccuccacgugacguacguccccgcccaggagaagaacuucaccaccgcccccgcgaucugccacgacggcaaggcccacuucccccgcgaggggguguucguguccaacggcacccacugguucgucacgcagcggaacuucuacgagccgcagaucaucaccaccgacaacaccuucgugagcggcaacugcgacguggucaucgggaucgugaacaacacgguguacgacccccugcagcccgagcuggacuccuucaaggaggagcucgacaaguacuucaagaaccacaccagccccgacgucgaccugggcgacaucuccgggaucaacgccagcguggugaacauccagaaggagaucgaccgccugaacgaggucgccaagaaccucaacgagucccugaucgaccugcaggagcucggcaaguacgagcaguacaucaaguggccgugguacaucuggcugggcuucaucgccgggcugaucgcgaucgugaucgugaccaucaugcucugcugcaugaccagcugcugcuccugccugaagggcugcugcagcugcggguccugcugcaaguucgacgaggacgacagcgagcccguccugaagggcgugaagcuccacuacacgugaggacuaguuauaagacugacuagcccgaugggccucccaacgggcccuccuccccuccuugcaccgagagaucuaaaaaaaaaaaaaaaaaaaaaaaaaaaaaaaaaaaaaaaaaaaaaaaaaaaaaaaaaaaaaaaaaaaaaaaaaaaaaaaaaaaaaaaaaaaaaaaaaaaa

SEQ ID NO: 25857 - RNA, 4005 nt, Artificial Sequence
  SARS-CoV-2/Wuhan/WIV05/2019__EPI_ISL_402128 spike protein mRNA gc (1-1273)(H69del_V70del_A222V_Y453F_S477N_D614G_I692V)
aggagaaagcuuaccauguucguguuccugguccuccugccccuggugagcucccagugcgugaaccucaccacccgcacgcagcugccgcccgccuacaccaacagcuucacccggggcgucuacuaccccgacaagguguuccgcuccagcgugcugcacuccacccaggaccucuuccugcccuucuucagcaacgucacgugguuccacgccaucuccgggaccaacggcaccaagcgguucgacaacccggugcugcccuucaacgacgggguguacuucgcgagcaccgagaaguccaacaucauccgcggcuggaucuucgggacgacccucgacagcaagacccagucccugcugaucgucaacaacgccaccaacguggugaucaaggucugcgaguuccaguucugcaacgaccccuuccucggcguguacuaccacaagaacaacaagagcuggauggaguccgaguuccggguguacagcuccgccaacaacugcacguucgaguacgucagccagcccuuccugauggaccuggagggcaagcaggggaacuucaagaaccuccgcgaguucguguucaagaacaucgacggcuacuucaagaucuacuccaagcacaccccgaucaaccuggugcgggaccugccccagggguucagcguccucgagccccugguggaccugcccaucggcaucaacaucacccgcuuccagacccuccuggcccugcaccgguccuaccucacgccgggggacagcagcuccggcuggaccgccggcgcggccgccuacuacgugggguaccugcagccccgcaccuuccugcucaaguacaacgagaacggcaccaucacggacgccgucgacugcgcgcuggacccccugagcgagaccaagugcacccucaaguccuucaccguggagaaggggaucuaccagacgagcaacuuccgggugcagcccaccgaguccaucguccgcuucccgaacaucaccaaccugugccccuucggcgagguguucaacgccacccgguucgccagcgucuacgccuggaaccgcaagcggaucuccaacugcguggccgacuacagcgugcuguacaacuccgcgagcuucuccacguucaagugcuacggcgucagccccaccaagcucaacgaccugugcuucaccaacguguacgccgacuccuucgugauccgcggggacgagguccggcagaucgcccccggccagaccgggaagaucgccgacuacaacuacaagcugccggacgacuucacgggcugcgugaucgccuggaacagcaacaaccucgacuccaaggucgggggcaacuacaacuaccuguuccgccuguuccgcaagagcaaccucaagcccuucgagcgggacaucuccaccgagaucuaccaggcgggcaacacccccugcaacgggguggagggcuucaacugcuacuucccccugcagagcuacggguuccagccgaccaacggcgugggguaccagcccuaccggguggucgugcuguccuucgagcuccugcacgcccccgccacggugugcggccccaagaaguccaccaaccuggucaagaacaagugcgugaacuucaacuucaacggccucaccgggaccggcgugcugaccgagagcaacaagaaguuccugccguuccagcaguucgggcgcgacaucgccgacacgaccgacgccguccgcgacccccagacccuggagauccucgacaucacccccugcagcuucggcggggugagcgugaucacgccgggcaccaacaccuccaaccaggucgcggugcuguaccagggcgugaacugcaccgagguccccguggccauccacgccgaccagcugacgcccaccuggcggguguacagcaccggguccaacgucuuccagacccgcgccggcugccucaucggggccgagcacgugaacaacagcuacgagugcgacauccccaucggcgcgggcaucugcgccuccuaccagacgcagaccaacagcccgcggcgcgcccgguccguggccagccaguccgucaucgcguacaccaugagccugggggccgagaacuccguggccuacagcaacaacuccaucgccauccccaccaacuucacgaucagcgugaccaccgagauccugcccgucuccaugaccaagacgagcguggacugcaccauguacaucugcggcgacagcaccgagugcuccaaccuccugcugcaguacgggagcuucugcacccagcucaaccgcgcccugacgggcaucgcgguggagcaggacaagaacacccaggaggucuucgcccaggugaagcagaucuacaagacgcccccgaucaaggacuucgggggcuucaacuucucccagauccugcccgaccccagcaagcccuccaagcggagcuucaucgaggaccuccuguucaacaaggugacccuggccgacgccggcuucaucaagcaguacggggacugccucggcgacaucgccgcgcgcgaccugaucugcgcccagaaguucaacgggcugaccguccucccgccccugcugaccgacgagaugaucgcccaguacaccuccgcccuccuggccggcaccaucacgagcggguggaccuucggcgcgggcgccgcccugcagauccccuucgccaugcagauggcguaccgguucaacgggaucggcgugacccagaacgugcucuacgagaaccagaagcugaucgccaaccaguucaacuccgccaucgggaagauccaggacagccuguccagcaccgccuccgcccucggcaagcugcaggacgucgugaaccagaacgcgcaggcccugaacacgcucgugaagcagcugagcuccaacuucggggccaucagcuccguccugaacgacauccucagccgccuggacaagguggaggccgaggugcagaucgaccggcugaucaccggccgccuccagucccugcagaccuacgucacccagcagcugauccgggccgcggagauccgcgccagcgccaaccucgccgccaccaagaugagcgagugcgugcugggccaguccaagcggguggacuucugcgggaagggcuaccaccugaugagcuucccccaguccgcgccgcacggggucguguuccuccacgucacguacgugcccgcccaggagaagaacuucaccaccgcccccgccaucugccacgacggcaaggcgcacuucccccgcgaggggguguucgucagcaacggcacccacugguucgugacgcagcggaacuucuacgagccgcagaucaucaccaccgacaacaccuucguguccggcaacugcgacgucgugaucgggaucgugaacaacacggucuacgacccccugcagcccgagcuggacagcuucaaggaggagcucgacaaguacuucaagaaccacaccucccccgacguggaccugggcgacaucagcgggaucaacgccuccguggucaacauccagaaggagaucgaccgccugaacgagguggccaagaaccucaacgagagccugaucgaccugcaggagcucggcaaguacgagcaguacaucaaguggccgugguacaucuggcugggcuucaucgccgggcugaucgccaucgugauggucaccaucaugcucugcugcaugaccuccugcugcagcugccugaagggcugcugcuccugcgggagcugcugcaaguucgacgaggacgacuccgagcccgugcugaagggcgugaagcuccacuacacgugaggacuaguuauaagacugacuagcccgaugggccucccaacgggcccuccuccccuccuugcaccgagagaucuaaaaaaaaaaaaaaaaaaaaaaaaaaaaaaaaaaaaaaaaaaaaaaaaaaaaaaaaaaaaaaaaaaaaaaaaaaaaaaaaaaaaaaaaaaaaaaaaaaaa

SEQ ID NO: 25858 - RNA, 4005 nt, Artificial Sequence
  SARS-CoV-2/Wuhan/WIV05/2019__EPI_ISL_402128 spike protein mRNA gc (1-1273)(H69del_V70del_Y453F_D614G_I692V_M1229I)
aggagaaagcuuaccauguucguguuccugguccuccugccccuggugagcucccagugcgugaaccucaccacccgcacgcagcugccgcccgccuacaccaacagcuucacccggggcgucuacuaccccgacaagguguuccgcuccagcgugcugcacuccacccaggaccucuuccugcccuucuucagcaacgucacgugguuccacgccaucuccgggaccaacggcaccaagcgguucgacaacccggugcugcccuucaacgacgggguguacuucgcgagcaccgagaaguccaacaucauccgcggcuggaucuucgggacgacccucgacagcaagacccagucccugcugaucgucaacaacgccaccaacguggugaucaaggucugcgaguuccaguucugcaacgaccccuuccucggcguguacuaccacaagaacaacaagagcuggauggaguccgaguuccggguguacagcuccgccaacaacugcacguucgaguacgucagccagcccuuccugauggaccuggagggcaagcaggggaacuucaagaaccuccgcgaguucguguucaagaacaucgacggcuacuucaagaucuacuccaagcacaccccgaucaaccuggugcgggaccugccccagggguucagcgcccucgagccccuggucgaccugcccaucggcaucaacaucacccgcuuccagacccuccuggcccugcaccgguccuaccucacgccgggggacagcagcuccggcuggaccgcgggcgccgccgccuacuacgugggguaccugcagccccgcaccuuccugcucaaguacaacgagaacggcaccaucacggacgcgguggacugcgcccuggacccccugagcgagaccaagugcacccucaaguccuucaccgucgagaaggggaucuaccagacgagcaacuuccgggugcagcccaccgaguccaucgugcgcuucccgaacaucaccaaccugugccccuucggcgaggucuucaacgccacccgguucgccagcguguacgccuggaaccgcaagcggaucuccaacugcgucgcggacuacagcgugcuguacaacuccgccagcuucuccacguucaagugcuacggcgugagccccaccaagcucaacgaccugugcuucaccaacgucuacgccgacuccuucgugauccgcggggacgaggugcggcagaucgcccccggccagaccgggaagaucgccgacuacaacuacaagcugccggacgacuucacgggcugcgucaucgcguggaacagcaacaaccucgacuccaaggucgggggcaacuacaacuaccuguuccgccuguuccgcaagagcaaccucaagcccuucgagcgggacaucuccaccgagaucuaccaggccggcagcacccccugcaacgggguggagggcuucaacugcuacuucccccugcaguccuacggguuccagccgaccaacggcgugggguaccagcccuaccggguggugguccugagcuucgagcuccugcacgcccccgccacggugugcggccccaagaaguccaccaaccuggugaagaacaagugcgucaacuucaacuucaacggccucaccgggaccggcgugcugaccgagagcaacaagaaguuccugccguuccagcaguucgggcgcgacaucgccgacacgaccgacgcggugcgcgacccccagacccuggagauccucgacaucacccccugcagcuucggcggggucuccgugaucacgccgggcaccaacaccagcaaccagguggccguccuguaccagggcgugaacugcaccgaggugcccgucgccauccacgccgaccagcugacgcccaccuggcggguguacuccaccgggagcaacguguuccagacccgcgccggcugccucaucggggcggagcacgucaacaacuccuacgagugcgacauccccaucggcgccggcaucugcgccagcuaccagacgcagaccaacuccccgcggcgcgcccggagcguggcgucccagagcgugaucgccuacaccaugucccugggggccgagaacagcgucgccuacuccaacaacagcaucgccauccccaccaacuucacgaucuccgugaccaccgagauccugcccgugagcaugaccaagacgagcgucgacugcaccauguacaucugcggcgacuccaccgagugcagcaaccuccugcugcaguacggguccuucugcacccagcucaaccgcgcgcugacgggcaucgccguggagcaggacaagaacacccaggagguguucgcccaggucaagcagaucuacaagacgcccccgaucaaggacuucgggggcuucaacuucagccagauccugcccgaccccuccaagcccagcaagcgguccuucaucgaggaccuccuguucaacaaggugacccuggccgacgccggcuucaucaagcaguacggggacugccucggcgacaucgcggcccgcgaccugaucugcgcccagaaguucaacgggcugaccgugcucccgccccugcugaccgacgagaugaucgcccaguacaccagcgcccuccuggcgggcaccaucacguccggguggaccuucggcgccggcgccgcccugcagauccccuucgcgaugcagauggccuaccgguucaacgggaucggcgucacccagaacgugcucuacgagaaccagaagcugaucgccaaccaguucaacagcgccaucgggaagauccaggacucccugagcuccaccgccagcgcgcucggcaagcugcaggacguggucaaccagaacgcccaggcccugaacacgcucgugaagcagcuguccagcaacuucggggccaucuccagcgugcugaacgacauccucucccgccuggacaaggucgaggccgaggugcagaucgaccggcugaucaccggccgccuccagagccugcagaccuacgugacccagcagcugauccgggcggccgagauccgcgccagcgccaaccucgccgcgaccaagauguccgagugcguccugggccagagcaagcggguggacuucugcgggaagggcuaccaccugauguccuucccccagagcgccccgcacgggguggucuuccuccacgugacguacguccccgcccaggagaagaacuucaccaccgcccccgcgaucugccacgacggcaaggcccacuucccccgcgaggggguguucguguccaacggcacccacugguucgucacgcagcggaacuucuacgagccgcagaucaucaccaccgacaacaccuucgugagcggcaacugcgacguggucaucgggaucgugaacaacacgguguacgacccccugcagcccgagcuggacuccuucaaggaggagcucgacaaguacuucaagaaccacaccagccccgacgucgaccugggcgacaucuccgggaucaacgccagcguggugaacauccagaaggagaucgaccgccugaacgaggucgccaagaaccucaacgagucccugaucgaccugcaggagcucggcaaguacgagcaguacaucaaguggccgugguacaucuggcugggcuucaucgccgggcugaucgcgaucgugaucgugaccaucaugcucugcugcaugaccagcugcugcuccugccugaagggcugcugcagcugcggguccugcugcaaguucgacgaggacgacagcgagcccguccugaagggcgugaagcuccacuacacgugaggacuaguuauaagacugacuagcccgaugggccucccaacgggcccuccuccccuccuugcaccgagagaucuaaaaaaaaaaaaaaaaaaaaaaaaaaaaaaaaaaaaaaaaaaaaaaaaaaaaaaaaaaaaaaaaaaaaaaaaaaaaaaaaaaaaaaaaaaaaaaaaaaaa

SEQ ID NO: 25859 - RNA, 4002 nt, Artificial Sequence
  SARS-CoV-2/Wuhan/WIV05/2019__EPI_ISL_402128 spike protein mRNA gc (1-1273)(H69del_V70del_Y144del_N501Y_A570D_D614G_P681H_T716I_S982 A_D1118H)
aggagaaagcuuaccauguucguguuccugguccuccugccccuggugagcucccagugcgugaaccucaccacccgcacgcagcugccgcccgccuacaccaacagcuucacccggggcgucuacuaccccgacaagguguuccgcuccagcgugcugcacuccacccaggaccucuuccugcccuucuucagcaacgucacgugguuccacgccaucuccgggaccaacggcaccaagcgguucgacaacccggugcugcccuucaacgacgggguguacuucgcgagcaccgagaaguccaacaucauccgcggcuggaucuucgggacgacccucgacagcaagacccagucccugcugaucgucaacaacgccaccaacguggugaucaaggucugcgaguuccaguucugcaacgaccccuuccucggcguguaccacaagaacaacaagagcuggauggaguccgaguuccggguguacagcuccgccaacaacugcacguucgaguacgucagccagcccuuccugauggaccuggagggcaagcaggggaacuucaagaaccuccgcgaguucguguucaagaacaucgacggcuacuucaagaucuacuccaagcacaccccgaucaaccuggugcgggaccugccccagggguucagcgcccucgagccccuggucgaccugcccaucggcaucaacaucacccgcuuccagacccuccuggcccugcaccgguccuaccucacgccgggggacagcagcuccggcuggaccgcgggcgccgccgccuacuacgugggguaccugcagccccgcaccuuccugcucaaguacaacgagaacggcaccaucacggacgcgguggacugcgcccuggacccccugagcgagaccaagugcacccucaaguccuucaccgucgagaaggggaucuaccagacgagcaacuuccgggugcagcccaccgaguccaucgugcgcuucccgaacaucaccaaccugugccccuucggcgaggucuucaacgccacccgguucgccagcguguacgccuggaaccgcaagcggaucuccaacugcgucgcggacuacagcgugcuguacaacuccgccagcuucuccacguucaagugcuacggcgugagccccaccaagcucaacgaccugugcuucaccaacgucuacgccgacuccuucgugauccgcggggacgaggugcggcagaucgcccccggccagaccgggaagaucgccgacuacaacuacaagcugccggacgacuucacgggcugcgucaucgcguggaacagcaacaaccucgacuccaaggucgggggcaacuacaacuaccuguaccgccuguuccgcaagagcaaccucaagcccuucgagcgggacaucuccaccgagaucuaccaggccggcagcacccccugcaacgggguggagggcuucaacugcuacuucccccugcaguccuacggguuccagccgaccuacggcgugggguaccagcccuaccggguggugguccugagcuucgagcuccugcacgcccccgccacggugugcggccccaagaaguccaccaaccuggugaagaacaagugcgucaacuucaacuucaacggccucaccgggaccggcgugcugaccgagagcaacaagaaguuccugccguuccagcaguucgggcgcgacaucgacgacacgaccgacgccgugcgcgacccccagacccuggagauccucgacaucacccccugcagcuucggcggggucuccgugaucacgccgggcaccaacaccagcaaccagguggcgguccuguaccagggcgugaacugcaccgaggugcccgucgccauccacgccgaccagcugacgcccaccuggcggguguacuccaccgggagcaacguguuccagacccgcgccggcugccucaucggggccgagcacgucaacaacuccuacgagugcgacauccccaucggcgcgggcaucugcgccagcuaccagacgcagaccaacucccaccggcgcgcccggagcguggccucccagagcaucaucgcguacaccaugucccugggggccgagaacagcguggccuacuccaacaacagcaucgccaucccgaucaacuucaccaucuccgucacgaccgagauccugcccgugagcaugaccaagaccagcguggacugcacgauguacaucugcggcgacuccaccgagugcagcaaccuccugcugcaguacggguccuucugcacccagcucaaccgcgcccugaccggcaucgcggucgagcaggacaagaacacgcaggagguguucgcccaggugaagcagaucuacaagaccccgcccaucaaggacuucgggggcuucaacuucagccagauccugcccgaccccuccaagcccagcaagcgguccuucaucgaggaccuccuguucaacaaggucacccuggccgacgccggcuucaucaagcaguacggggacugccucggcgacaucgccgcgcgcgaccugaucugcgcccagaaguucaacgggcugaccgugcugcccccgcuccugacggacgagaugaucgcccaguacaccagcgcccuccuggccggcaccaucaccuccggguggacguucggcgcgggcgccgcccugcagauccccuucgccaugcagauggcguaccgguucaacgggaucggcgugacccagaacguccucuacgagaaccagaagcugaucgccaaccaguucaacagcgccaucgggaagauccaggacucccugagcuccaccgccagcgcccucggcaagcugcaggacguggugaaccagaacgcgcaggcccugaacacccucgucaagcagcuguccagcaacuucggggccaucuccagcgugcugaacgacauccucgcccgccuggacaagguggaggccgagguccagaucgaccggcugaucacgggccgccuccagucccugcagaccuacgugacccagcagcugauccgggcggccgagauccgcgccagcgccaaccucgccgcgaccaagaugagcgagugcgugcugggccaguccaagcgggucgacuucugcgggaagggcuaccaccugaugagcuucccccaguccgcgccccacggggugguguuccuccacgucaccuacgugccggcccaggagaagaacuucacgaccgcccccgccaucugccacgacggcaaggcccacuucccccgcgagggggucuucgugagcaacggcacccacugguucgugacccagcggaacuucuacgagccccagaucaucacgacccacaacaccuucgucuccggcaacugcgacguggugaucgggaucgucaacaacaccguguacgacccgcugcagcccgagcuggacagcuucaaggaggagcucgacaaguacuucaagaaccacacgucccccgacguggaccugggcgacaucagcgggaucaacgccuccgucgugaacauccagaaggagaucgaccgccugaacgagguggccaagaaccucaacgagagccugaucgaccugcaggagcucggcaaguacgagcaguacaucaaguggcccugguacaucuggcugggcuucaucgccgggcugaucgcgaucgucauggugaccaucaugcucugcugcaugaccuccugcugcagcugccugaagggcugcugcuccugcgggagcugcugcaaguucgacgaggacgacuccgagccggugcugaagggcgucaagcuccacuacaccugaggacuaguuauaagacugacuagcccgaugggccucccaacgggcccuccuccccuccuugcaccgagagaucuaaaaaaaaaaaaaaaaaaaaaaaaaaaaaaaaaaaaaaaaaaaaaaaaaaaaaaaaaaaaaaaaaaaaaaaaaaaaaaaaaaaaaaaaaaaaaaaaaaaa

SEQ ID NO: 25860 - RNA, 4011 nt, Artificial Sequence
  SARS-CoV-2/Wuhan/WIV05/2019__EPI_ISL_402128 spike protein mRNA gc (1-1273)(K417N_E484K_N501Y_D614G)
aggagaaagcuuaccauguucguguuccugguccuccugccccuggugagcucccagugcgugaaccucaccacccgcacgcagcugccgcccgccuacaccaacagcuucacccggggcgucuacuaccccgacaagguguuccgcuccagcgugcugcacuccacccaggaccucuuccugcccuucuucagcaacgucacgugguuccacgccauccacguguccgggaccaacggcaccaagcgguucgacaacccggugcugcccuucaacgacggggucuacuucgcgagcaccgagaaguccaacaucauccgcggcuggaucuucgggacgacccucgacagcaagacccagucccugcugaucgugaacaacgccaccaacguggucaucaaggugugcgaguuccaguucugcaacgaccccuuccucggcguguacuaccacaagaacaacaagagcuggauggaguccgaguuccgggucuacagcuccgccaacaacugcacguucgaguacgugagccagcccuuccugauggaccuggagggcaagcaggggaacuucaagaaccuccgcgaguucguguucaagaacaucgacggcuacuucaagaucuacuccaagcacaccccgaucaaccugguccgggaccugccccagggguucagcgcccucgagccccugguggaccugcccaucggcaucaacaucacccgcuuccagacccuccuggcccugcaccgguccuaccucacgccgggggacagcagcuccggcuggaccgcgggcgccgccgccuacuacgugggguaccugcagccccgcaccuuccugcucaaguacaacgagaacggcaccaucacggacgcggucgacugcgcccuggacccccugagcgagaccaagugcacccucaaguccuucaccguggagaaggggaucuaccagacgagcaacuuccgggugcagcccaccgaguccaucguccgcuucccgaacaucaccaaccugugccccuucggcgagguguucaacgccacccgguucgccagcgucuacgccuggaaccgcaagcggaucuccaacugcguggcggacuacagcgugcuguacaacuccgccagcuucuccacguucaagugcuacggcgucagccccaccaagcucaacgaccugugcuucaccaacguguacgccgacuccuucgugauccgcggggacgagguccggcagaucgcccccggccagaccgggaacaucgccgacuacaacuacaagcugccggacgacuucacgggcugcgugaucgcguggaacagcaacaaccucgacuccaaggucgggggcaacuacaacuaccuguaccgccuguuccgcaagagcaaccucaagcccuucgagcgggacaucuccaccgagaucuaccaggccggcagcacccccugcaacggggugaagggcuucaacugcuacuucccccugcaguccuacggguuccagccgaccuacggcgugggguaccagcccuaccggguggucgugcugagcuucgagcuccugcacgcccccgccacggugugcggccccaagaaguccaccaaccuggucaagaacaagugcgugaacuucaacuucaacggccucaccgggaccggcgugcugaccgagagcaacaagaaguuccugccguuccagcaguucgggcgcgacaucgccgacacgaccgacgcgguccgcgacccccagacccuggagauccucgacaucacccccugcagcuucggcgggguguccgugaucacgccgggcaccaacaccagcaaccaggucgccgugcuguaccagggcgugaacugcaccgagguccccguggccauccacgccgaccagcugacgcccaccuggcggguguacuccaccgggagcaacgucuuccagacccgcgccggcugccucaucggggcggagcacgugaacaacuccuacgagugcgacauccccaucggcgccggcaucugcgccagcuaccagacgcagaccaacuccccgcggcgcgcccggagcguggcgucccagagcaucaucgccuacaccaugucccugggggccgagaacagcgucgccuacuccaacaacagcaucgccauccccaccaacuucacgaucuccgugaccaccgagauccugcccgugagcaugaccaagacgagcgucgacugcaccauguacaucugcggcgacuccaccgagugcagcaaccuccugcugcaguacggguccuucugcacccagcucaaccgcgcgcugacgggcaucgccguggagcaggacaagaacacccaggagguguucgcccaggucaagcagaucuacaagacgcccccgaucaaggacuucgggggcuucaacuucagccagauccugcccgaccccuccaagcccagcaagcgguccuucaucgaggaccuccuguucaacaaggugacccuggccgacgccggcuucaucaagcaguacggggacugccucggcgacaucgcggcccgcgaccugaucugcgcccagaaguucaacgggcugaccgugcucccgccccugcugaccgacgagaugaucgcccaguacaccagcgcccuccuggcgggcaccaucacguccggguggaccuucggcgccggcgccgcccugcagauccccuucgcgaugcagauggccuaccgguucaacgggaucggcgucacccagaacgugcucuacgagaaccagaagcugaucgccaaccaguucaacagcgccaucgggaagauccaggacucccugagcuccaccgccagcgcgcucggcaagcugcaggacguggucaaccagaacgcccaggcccugaacacgcucgugaagcagcuguccagcaacuucggggccaucuccagcgugcugaacgacauccucucccgccuggacaaggucgaggccgaggugcagaucgaccggcugaucaccggccgccuccagagccugcagaccuacgugacccagcagcugauccgggcggccgagauccgcgccagcgccaaccucgccgcgaccaagauguccgagugcguccugggccagagcaagcggguggacuucugcgggaagggcuaccaccugauguccuucccccagagcgccccgcacgggguggucuuccuccacgugacguacguccccgcccaggagaagaacuucaccaccgcccccgcgaucugccacgacggcaaggcccacuucccccgcgaggggguguucguguccaacggcacccacugguucgucacgcagcggaacuucuacgagccgcagaucaucaccaccgacaacaccuucgugagcggcaacugcgacguggucaucgggaucgugaacaacacgguguacgacccccugcagcccgagcuggacuccuucaaggaggagcucgacaaguacuucaagaaccacaccagccccgacgucgaccugggcgacaucuccgggaucaacgccagcguggugaacauccagaaggagaucgaccgccugaacgaggucgccaagaaccucaacgagucccugaucgaccugcaggagcucggcaaguacgagcaguacaucaaguggccgugguacaucuggcugggcuucaucgccgggcugaucgcgaucgugauggugaccaucaugcucugcugcaugaccagcugcugcuccugccugaagggcugcugcagcugcggguccugcugcaaguucgacgaggacgacagcgagcccguccugaagggcgugaagcuccacuacacgugaggacuaguuauaagacugacuagcccgaugggccucccaacgggcccuccuccccuccuugcaccgagagaucuaaaaaaaaaaaaaaaaaaaaaaaaaaaaaaaaaaaaaaaaaaaaaaaaaaaaaaaaaaaaaaaaaaaaaaaaaaaaaaaaaaaaaaaaaaaaaaaaaaaa

SEQ ID NO: 25861 - RNA, 4002 nt, Artificial Sequence
  SARS-CoV-2/Wuhan/WIV05/2019__EPI_ISL_402128 spike protein mRNA gc (1-1273)(L18F_D80A_D215G_L242del_A243del_L244del_R246I_K417N_E484 K_N501Y_D614G_A701V)
aggagaaagcuuaccauguucguguuccugguccuccugccccuggugagcucccagugcgugaacuucaccacccgcacgcagcucccgcccgccuacaccaacagcuucacccggggcgucuacuaccccgacaagguguuccgcuccagcgugcugcacuccacccaggaccuguuccuccccuucuucagcaacgucacgugguuccacgccauccacguguccgggaccaacggcaccaagcgguucgcgaacccggugcugcccuucaacgacggggucuacuucgccagcaccgagaaguccaacaucauccgcggcuggaucuucgggacgacccuggacagcaagacccagucccuccugaucgugaacaacgccaccaacguggucaucaaggugugcgaguuccaguucugcaacgaccccuuccugggcguguacuaccacaagaacaacaagagcuggauggaguccgaguuccgggucuacagcuccgccaacaacugcacguucgaguacgugagccagcccuuccucauggaccuggagggcaagcaggggaacuucaagaaccugcgcgaguucguguucaagaacaucgacggcuacuucaagaucuacuccaagcacaccccgaucaaccucguccgggggcugccccagggcuucagcgcccuggagccccucguggaccugcccaucgggaucaacaucacccgcuuccagacccugcacaucuccuaccucacgccgggcgacagcagcuccggcuggaccgcgggggccgccgccuacuacgugggcuaccugcagccccggaccuuccugcucaaguacaacgagaacgggaccaucacggacgcggucgacugcgcccuggacccccugagcgagaccaagugcacccucaaguccuucaccguggagaagggcaucuaccagacgagcaacuuccgcgugcagcccaccgaguccaucguccgguucccgaacaucaccaaccugugccccuucggcgagguguucaacgccacccgcuucgccagcgucuacgccuggaaccggaagcgcaucuccaacugcguggcggacuacagcgugcuguacaacuccgccagcuucuccacguucaagugcuacggggucagccccaccaagcucaacgaccugugcuucaccaacguguacgccgacuccuucgugauccggggcgacgagguccgccagaucgcccccgggcagaccggcaacaucgccgacuacaacuacaagcugccggacgacuucacggggugcgugaucgcguggaacagcaacaaccucgacuccaaggugggcggcaacuacaacuaccuguaccggcuguuccgcaagagcaaccucaagcccuucgagcgggacaucuccaccgagaucuaccaggccgggagcacccccugcaacggcgucaagggguucaacugcuacuucccccugcaguccuacggcuuccagccgaccuacggggugggcuaccagcccuaccgcguggucgugcugagcuucgagcuccugcacgcccccgccacggugugcggccccaagaaguccaccaaccuggucaagaacaagugcgugaacuucaacuucaacgggcucaccggcaccggggugcugaccgagagcaacaagaaguuccugccguuccagcaguucggccgggacaucgccgacacgaccgacgcgguccgcgacccccagacccucgagauccuggacaucacccccugcagcuucgggggcguguccgugaucacgccgggcaccaacaccagcaaccaggucgccgugcuguaccagggggugaacugcaccgagguccccguggccauccacgccgaccagcugacgcccaccuggcgcguguacuccaccggcagcaacgucuuccagacccgggccgggugccucaucggcgcggagcacgugaacaacuccuacgagugcgacauccccaucggcgccgggaucugcgccagcuaccagacgcagaccaacuccccgcgccgggcccgcagcguggcgucccagagcaucaucgccuacaccaugucccugggcgucgagaacagcguggccuacuccaacaacagcaucgccauccccaccaacuucacgaucuccgugaccaccgagauccugcccgucagcaugaccaagacgagcguggacugcaccauguacaucugcggggacuccaccgagugcagcaaccuccugcugcaguacggcuccuucugcacccagcucaaccgggcccugacggggaucgcgguggagcaggacaagaacacccaggaggucuucgcccaggugaagcagaucuacaagacgcccccgaucaaggacuucggcggcuucaacuucagccagauccugcccgaccccuccaagcccagcaagcgcuccuucaucgaggaccuccuguucaacaaggugacccuggccgacgccggguucaucaagcaguacggcgacugccucggggacaucgccgcgcgggaccugaucugcgcccagaaguucaacggccugaccguccucccgccccugcugaccgacgagaugaucgcccaguacaccagcgcccuccuggccgggaccaucacguccggcuggaccuucggcgcgggggccgcccugcagauccccuucgccaugcagauggcguaccgcuucaacggcaucggggugacccagaacgugcucuacgagaaccagaagcugaucgccaaccaguucaacagcgccaucggcaagauccaggacucccugagcuccaccgccagcgcccucgggaagcugcaggacgucgugaaccagaacgcgcaggcccugaacacgcucgugaagcagcuguccagcaacuucggcgccaucuccagcguccugaacgacauccucucccggcuggacaagguggaggccgaggugcagaucgaccgccugaucaccggccggcuccagagccugcagaccuacgucacccagcagcugauccgcgccgcggagauccgggccagcgccaaccucgccgccaccaagauguccgagugcgugcuggggcagagcaagcgcguggacuucugcggcaagggguaccaccugauguccuucccccagagcgcgccgcacggcgucguguuccuccacgucacguacgugcccgcccaggagaagaacuucaccaccgcccccgccaucugccacgacgggaaggcgcacuucccccgggagggcguguucgucuccaacggcacccacugguucgugacgcagcgcaacuucuacgagccgcagaucaucaccaccgacaacaccuucgugagcgggaacugcgacgucgugaucggcaucgugaacaacacggucuacgacccccugcagcccgagcuggacuccuucaaggaggagcucgacaaguacuucaagaaccacaccagccccgacguggaccugggggacaucuccggcaucaacgccagcguggucaacauccagaaggagaucgaccggcugaacgagguggccaagaaccucaacgagucccugaucgaccugcaggagcucggcaaguacgagcaguacaucaaguggccgugguacaucuggcugggguucaucgccggccugaucgccaucgugauggucaccaucaugcucugcugcaugaccagcugcugcuccugccugaaggggugcugcagcugcggcuccugcugcaaguucgacgaggacgacagcgagcccgugcugaagggggugaagcuccacuacacgugaggacuaguuauaagacugacuagcccgaugggccucccaacgggcccuccuccccuccuugcaccgagagaucuaaaaaaaaaaaaaaaaaaaaaaaaaaaaaaaaaaaaaaaaaaaaaaaaaaaaaaaaaaaaaaaaaaaaaaaaaaaaaaaaaaaaaaaaaaaaaaaaaaaa

SEQ ID NO: 25862 - RNA, 4011 nt, Artificial Sequence
  SARS-CoV-2/Wuhan/WIV05/2019__EPI_ISL_402128 spike protein mRNA gc (1-1273)(E484K_D614G)
aggagaaagcuuaccauguucguguuccugguccuccugccccuggugagcucccagugcgugaaccucaccacccgcacgcagcugccgcccgccuacaccaacagcuucacccggggcgucuacuaccccgacaagguguuccgcuccagcgugcugcacuccacccaggaccucuuccugcccuucuucagcaacgucacgugguuccacgccauccacguguccgggaccaacggcaccaagcgguucgacaacccggugcugcccuucaacgacggggucuacuucgcgagcaccgagaaguccaacaucauccgcggcuggaucuucgggacgacccucgacagcaagacccagucccugcugaucgugaacaacgccaccaacguggucaucaaggugugcgaguuccaguucugcaacgaccccuuccucggcguguacuaccacaagaacaacaagagcuggauggaguccgaguuccgggucuacagcuccgccaacaacugcacguucgaguacgugagccagcccuuccugauggaccuggagggcaagcaggggaacuucaagaaccuccgcgaguucguguucaagaacaucgacggcuacuucaagaucuacuccaagcacaccccgaucaaccugguccgggaccugccccagggguucagcgcccucgagccccugguggaccugcccaucggcaucaacaucacccgcuuccagacccuccuggcccugcaccgguccuaccucacgccgggggacagcagcuccggcuggaccgcgggcgccgccgccuacuacgugggguaccugcagccccgcaccuuccugcucaaguacaacgagaacggcaccaucacggacgcggucgacugcgcccuggacccccugagcgagaccaagugcacccucaaguccuucaccguggagaaggggaucuaccagacgagcaacuuccgggugcagcccaccgaguccaucguccgcuucccgaacaucaccaaccugugccccuucggcgagguguucaacgccacccgguucgccagcgucuacgccuggaaccgcaagcggaucuccaacugcguggcggacuacagcgugcuguacaacuccgccagcuucuccacguucaagugcuacggcgucagccccaccaagcucaacgaccugugcuucaccaacguguacgccgacuccuucgugauccgcggggacgagguccggcagaucgcccccggccagaccgggaagaucgccgacuacaacuacaagcugccggacgacuucacgggcugcgugaucgcguggaacagcaacaaccucgacuccaaggucgggggcaacuacaacuaccuguaccgccuguuccgcaagagcaaccucaagcccuucgagcgggacaucuccaccgagaucuaccaggccggcagcacccccugcaacggggugaagggcuucaacugcuacuucccccugcaguccuacggguuccagccgaccaacggcgugggguaccagcccuaccggguggucgugcugagcuucgagcuccugcacgcccccgccacggugugcggccccaagaaguccaccaaccuggucaagaacaagugcgugaacuucaacuucaacggccucaccgggaccggcgugcugaccgagagcaacaagaaguuccugccguuccagcaguucgggcgcgacaucgccgacacgaccgacgcgguccgcgacccccagacccuggagauccucgacaucacccccugcagcuucggcgggguguccgugaucacgccgggcaccaacaccagcaaccaggucgccgugcuguaccagggcgugaacugcaccgagguccccguggccauccacgccgaccagcugacgcccaccuggcggguguacuccaccgggagcaacgucuuccagacccgcgccggcugccucaucggggcggagcacgugaacaacuccuacgagugcgacauccccaucggcgccggcaucugcgccagcuaccagacgcagaccaacuccccgcggcgcgcccggagcguggcgucccagagcaucaucgccuacaccaugucccugggggccgagaacagcgucgccuacuccaacaacagcaucgccauccccaccaacuucacgaucuccgugaccaccgagauccugcccgugagcaugaccaagacgagcgucgacugcaccauguacaucugcggcgacuccaccgagugcagcaaccuccugcugcaguacggguccuucugcacccagcucaaccgcgcgcugacgggcaucgccguggagcaggacaagaacacccaggagguguucgcccaggucaagcagaucuacaagacgcccccgaucaaggacuucgggggcuucaacuucagccagauccugcccgaccccuccaagcccagcaagcgguccuucaucgaggaccuccuguucaacaaggugacccuggccgacgccggcuucaucaagcaguacggggacugccucggcgacaucgcggcccgcgaccugaucugcgcccagaaguucaacgggcugaccgugcucccgccccugcugaccgacgagaugaucgcccaguacaccagcgcccuccuggcgggcaccaucacguccggguggaccuucggcgccggcgccgcccugcagauccccuucgcgaugcagauggccuaccgguucaacgggaucggcgucacccagaacgugcucuacgagaaccagaagcugaucgccaaccaguucaacagcgccaucgggaagauccaggacucccugagcuccaccgccagcgcgcucggcaagcugcaggacguggucaaccagaacgcccaggcccugaacacgcucgugaagcagcuguccagcaacuucggggccaucuccagcgugcugaacgacauccucucccgccuggacaaggucgaggccgaggugcagaucgaccggcugaucaccggccgccuccagagccugcagaccuacgugacccagcagcugauccgggcggccgagauccgcgccagcgccaaccucgccgcgaccaagauguccgagugcguccugggccagagcaagcggguggacuucugcgggaagggcuaccaccugauguccuucccccagagcgccccgcacgggguggucuuccuccacgugacguacguccccgcccaggagaagaacuucaccaccgcccccgcgaucugccacgacggcaaggcccacuucccccgcgaggggguguucguguccaacggcacccacugguucgucacgcagcggaacuucuacgagccgcagaucaucaccaccgacaacaccuucgugagcggcaacugcgacguggucaucgggaucgugaacaacacgguguacgacccccugcagcccgagcuggacuccuucaaggaggagcucgacaaguacuucaagaaccacaccagccccgacgucgaccugggcgacaucuccgggaucaacgccagcguggugaacauccagaaggagaucgaccgccugaacgaggucgccaagaaccucaacgagucccugaucgaccugcaggagcucggcaaguacgagcaguacaucaaguggccgugguacaucuggcugggcuucaucgccgggcugaucgcgaucgugauggugaccaucaugcucugcugcaugaccagcugcugcuccugccugaagggcugcugcagcugcggguccugcugcaaguucgacgaggacgacagcgagcccguccugaagggcgugaagcuccacuacacgugaggacuaguuauaagacugacuagcccgaugggccucccaacgggcccuccuccccuccuugcaccgagagaucuaaaaaaaaaaaaaaaaaaaaaaaaaaaaaaaaaaaaaaaaaaaaaaaaaaaaaaaaaaaaaaaaaaaaaaaaaaaaaaaaaaaaaaaaaaaaaaaaaaaa

SEQ ID NO: 25863 - RNA, 4011 nt, Artificial Sequence
  SARS-CoV-2/Wuhan/WIV05/2019__EPI_ISL_402128 spike protein mRNA gc (1-1273)(L18F_T20N_P26S_D138Y_R190S_K417T_E484K_N501Y_D614G_H655Y _T1027I)
aggagaaagcuuaccauguucguguuccugguccuccugccccuggugagcucccagugcgugaacuucaccaaccgcacccagcucccgagcgccuacacgaacuccuucacccggggcgucuacuaccccgacaagguguuccgcagcuccgugcugcacagcacccaggaccuguuccuccccuucuucuccaacgucaccugguuccacgccauccacgugagcgggacgaacggcaccaagcgguucgacaaccccgugcugccguucaacgacggggucuacuucgcguccaccgagaaguccaacaucauccgcggcuggaucuucgggaccacgcuggacuccaagacccagagccuccugaucgugaacaacgccaccaacguggucaucaaggugugcgaguuccaguucugcaacuaccccuuccugggcguguacuaccacaagaacaacaaguccuggauggagagcgaguuccgggucuacuccagcgccaacaacugcaccuucgaguacgugucccagcccuuccucauggaccuggagggcaagcaggggaacuucaagaaccugagcgaguucguguucaagaacaucgacggcuacuucaagaucuacuccaagcacacgcccaucaaccucguccgcgaccugccgcagggguucagcgcccuggagccccucguggaccugcccaucggcaucaacaucacccgguuccagacccugcucgcccugcaccgcagcuaccugacccccggggacuccagcuccggcuggacggcgggcgccgccgccuacuacgugggguaccuccagccgcggaccuuccugcugaaguacaacgagaacggcaccaucaccgacgcggucgacugcgcccucgacccccugagcgagacgaagugcacccugaaguccuucaccguggagaaggggaucuaccagaccagcaacuuccgcgugcagcccacggaguccaucguccgguuccccaacaucaccaaccucugcccguucggcgagguguucaacgccacccgcuucgccagcgucuacgccuggaaccggaagcgcaucuccaacugcguggcggacuacagcgugcuguacaacuccgccagcuucuccaccuucaagugcuacggcgucagccccacgaagcugaacgaccucugcuucaccaacguguacgccgacuccuucgugauccgcggggacgagguccggcagaucgcccccggccagaccgggaccaucgccgacuacaacuacaagcugcccgacgacuucacgggcugcgugaucgcguggaacagcaacaaccuggacuccaaggucgggggcaacuacaacuaccucuaccggcuguuccgcaagagcaaccugaagccguucgagcgggacaucuccaccgagaucuaccaggccggcagcacccccugcaacggggugaagggcuucaacugcuacuucccccuccagagcuacggguuccagcccaccuacggcgugggguaccagccguaccgcguggucgugcuguccuucgagcugcuccacgcccccgccacggugugcggccccaagaaguccaccaaccuggucaagaacaagugcgugaacuucaacuucaacggccugaccgggaccggcgugcucaccgagagcaacaagaaguuccugcccuuccagcaguucgggcgggacaucgccgacacgaccgacgcgguccgcgacccgcagacccuggagauccuggacaucacccccugcagcuucggcgggguguccgugaucacgcccggcaccaacaccagcaaccaggucgccgugcucuaccagggcgugaacugcaccgaggucccgguggccauccacgccgaccagcugacgcccaccuggcgcguguacuccaccgggagcaacgucuuccagacccgggccggcugccugaucggggcggaguacgugaacaacuccuacgagugcgacauccccaucggcgccggcaucugcgccagcuaccagacgcagaccaacagcccccgccgggcccgcagcguggcgucccagagcaucaucgccuacaccaugucccucggggccgagaacagcgucgccuacuccaacaacagcaucgccaucccgaccaacuucacgaucagcgugaccaccgagauccugcccguguccaugaccaagacgagcgucgacugcaccauguacaucugcggcgacuccaccgagugcagcaaccugcuccugcaguacggguccuucugcacccagcugaaccgggcgcucacgggcaucgccguggagcaggacaagaacacccaggagguguucgcccaggucaagcagaucuacaagaccccgcccaucaaggacuucgggggcuucaacuucagccagauccugcccgaccccuccaagcccagcaagcgcuccuucaucgaggaccuccuguucaacaaggugacccuggccgacgccggcuucaucaagcaguacggggacugccugggcgacaucgcggcccgggaccucaucugcgcccagaaguucaacgggcugacggugcugcccccgcuccugaccgacgagaugaucgcccaguacaccagcgcccugcucgcgggcaccaucacguccggguggaccuucggcgccggcgccgcccugcagauccccuucgcgaugcagauggccuaccgcuucaacgggaucggcgucacccagaacgugcuguacgagaaccagaagcucaucgccaaccaguucaacagcgccaucgggaagauccaggacucccugagcuccaccgccagcgcgcugggcaagcuccaggacguggucaaccagaacgcccaggcccugaacacgcuggugaagcagcucuccagcaacuucggggccaucuccagcgugcugaacgacauccugagccggcucgacaaggucgaggccgaggugcagaucgaccgccugaucaccggccggcugcagucccuccagaccuacgugacccagcagcugauccgcgcggccgagauccgggccagcgccaaccuggccgcgaucaagauguccgagugcguccucggccagagcaagcgcguggacuucugcgggaagggcuaccaccugauguccuucccccagagcgcgccccacgggguggucuuccugcacgugaccuacgucccggcccaggagaagaacuucacgaccgcccccgccaucugccacgacggcaaggcccacuucccccgggaggggguguucguguccaacggcacccacugguucgucacccagcgcaacuucuacgagccccagaucaucacgaccgacaacaccuucgugagcggcaacugcgacguggucaucgggaucgugaacaacaccguguacgacccgcuccagcccgagcuggacuccuucaaggaggagcuggacaaguacuucaagaaccacacgagccccgacgucgaccucggcgacaucuccgggaucaacgccagcguggugaacauccagaaggagaucgaccggcugaacgaggucgccaagaaccugaacgagucccucaucgaccugcaggagcugggcaaguacgagcaguacaucaaguggcccugguacaucuggcucggcuucaucgccgggcugaucgcgaucgugauggugaccaucaugcugugcugcaugaccagcugcugcuccugccucaagggcugcugcagcugcggguccugcugcaaguucgacgaggacgacagcgagccgguccugaagggcgugaagcugcacuacaccugaggacuaguuauaagacugacuagcccgaugggccucccaacgggcccuccuccccuccuugcaccgagagaucuaaaaaaaaaaaaaaaaaaaaaaaaaaaaaaaaaaaaaaaaaaaaaaaaaaaaaaaaaaaaaaaaaaaaaaaaaaaaaaaaaaaaaaaaaaaaaaaaaaaa

SEQ ID NO: 25864 - RNA, 4011 nt, Artificial Sequence
  SARS-CoV-2/Wuhan/WIV05/2019__EPI_ISL_402128 spike protein mRNA gc (1-1273)(S13I_W152C_L452R_D614G)
aggagaaagcuuaccauguucguguuccugguccuccugccccuggugagcauccagugcgugaaccucaccacccgcacgcagcugccgcccgccuacaccaacuccuucacccggggcgucuacuaccccgacaagguguuccgcagcuccgugcugcacagcacccaggaccucuuccugcccuucuucuccaacgucacgugguuccacgccauccacgugagcgggaccaacggcaccaagcgguucgacaacccggugcugcccuucaacgacggggucuacuucgcguccaccgagaaguccaacaucauccgcggcuggaucuucgggacgacccucgacagcaagacccagagccugcugaucgugaacaacgccaccaacguggucaucaaggugugcgaguuccaguucugcaacgaccccuuccucggcguguacuaccacaagaacaacaaguccugcauggagagcgaguuccgggucuacuccagcgccaacaacugcacguucgaguacgugucccagcccuuccugauggaccuggagggcaagcaggggaacuucaagaaccuccgcgaguucguguucaagaacaucgacggcuacuucaagaucuacagcaagcacaccccgaucaaccugguccgggaccugccccagggguucuccgcccucgagccccugguggaccugcccaucggcaucaacaucacccgcuuccagacccuccuggcccugcaccggagcuaccucacgccgggggacuccagcagcggcuggaccgcgggcgccgccgccuacuacgugggguaccugcagccccgcaccuuccugcucaaguacaacgagaacggcaccaucacggacgcggucgacugcgcccuggacccccuguccgagaccaagugcacccucaagagcuucaccguggagaaggggaucuaccagacguccaacuuccgggugcagcccaccgagagcaucguccgcuucccgaacaucaccaaccugugccccuucggcgagguguucaacgccacccgguucgccuccgucuacgccuggaaccgcaagcggaucagcaacugcguggcggacuacuccgugcuguacaacagcgccuccuucagcacguucaagugcuacggcgucucccccaccaagcucaacgaccugugcuucaccaacguguacgccgacagcuucgugauccgcggggacgagguccggcagaucgcccccggccagaccgggaagaucgccgacuacaacuacaagcugccggacgacuucacgggcugcgugaucgcguggaacuccaacaaccucgacagcaaggucgggggcaacuacaacuaccgcuaccggcuguuccgcaaguccaaccugaagcccuucgagcgggacaucagcaccgagaucuaccaggccggcuccacccccugcaacgggguggagggcuucaacugcuacuucccccuccagagcuacggguuccagccgaccaacggcgugggguaccagcccuaccgcguggucgugcuguccuucgagcugcuccacgcccccgccacggugugcggccccaagaaguccaccaaccuggucaagaacaagugcgugaacuucaacuucaacggccugaccgggaccggcgugcucaccgagagcaacaagaaguuccugccguuccagcaguucgggcgcgacaucgccgacacgaccgacgcgguccgggacccccagacccuggagauccuggacaucacccccugcagcuucggcggggugagcgugaucacgccgggcaccaacaccuccaaccaggucgccgugcucuaccagggcgugaacugcaccgagguccccguggccauccacgccgaccagcugacgcccaccuggcgcguguacagcaccggguccaacgucuuccagacccgggccggcugccugaucggggcggagcacgugaacaacagcuacgagugcgacauccccaucggcgccggcaucugcgccuccuaccagacgcagaccaacagcccgcgccgggcccgcuccguggcgagccaguccaucaucgccuacaccaugagccucggggccgagaacuccgucgccuacagcaacaacuccaucgccauccccaccaacuucacgaucagcgugaccaccgagauccugcccguguccaugaccaagacgagcgucgacugcaccauguacaucugcggcgacagcaccgagugcuccaaccugcuccugcaguacgggagcuucugcacccagcugaaccgggcgcucacgggcaucgccguggagcaggacaagaacacccaggagguguucgcccaggucaagcagaucuacaagacgcccccgaucaaggacuucgggggcuucaacuucucccagauccugcccgaccccagcaagcccuccaagcgcagcuucaucgaggaccuccuguucaacaaggugacccuggccgacgccggcuucaucaagcaguacggggacugccugggcgacaucgcggcccgggaccucaucugcgcccagaaguucaacgggcugaccgugcugccgccccuccugaccgacgagaugaucgcccaguacaccuccgcccugcucgcgggcaccaucacgagcggguggaccuucggcgccggcgccgcccugcagauccccuucgcgaugcagauggccuaccgcuucaacgggaucggcgucacccagaacgugcuguacgagaaccagaagcucaucgccaaccaguucaacuccgccaucgggaagauccaggacagccuguccagcaccgccuccgcgcugggcaagcuccaggacguggucaaccagaacgcccaggcccugaacacgcuggugaagcagcucagcuccaacuucggggccaucagcuccgugcugaacgacauccugagccggcucgacaaggucgaggccgaggugcagaucgaccgccugaucaccggccggcugcagucccuccagaccuacgugacccagcagcugauccgcgcggccgagauccgggccagcgccaaccuggccgcgaccaagaugagcgagugcguccucggccaguccaagcgcguggacuucugcgggaagggcuaccaccugaugagcuucccccaguccgccccgcacgggguggucuuccugcacgugacguacguccccgcccaggagaagaacuucaccaccgcccccgcgaucugccacgacggcaaggcccacuucccccgggaggggguguucgugagcaacggcacccacugguucgucacgcagcgcaacuucuacgagccgcagaucaucaccaccgacaacaccuucguguccggcaacugcgacguggucaucgggaucgugaacaacacgguguacgacccccuccagcccgagcuggacagcuucaaggaggagcuggacaaguacuucaagaaccacaccucccccgacgucgaccucggcgacaucagcgggaucaacgccuccguggugaacauccagaaggagaucgaccggcugaacgaggucgccaagaaccugaacgagagccucaucgaccugcaggagcugggcaaguacgagcaguacaucaaguggccgugguacaucuggcucggcuucaucgccgggcugaucgcgaucgugauggugaccaucaugcugugcugcaugaccuccugcugcagcugccucaagggcugcugcuccugcgggagcugcugcaaguucgacgaggacgacuccgagcccguccugaagggcgugaagcugcacuacacgugaggacuaguuauaagacugacuagcccgaugggccucccaacgggcccuccuccccuccuugcaccgagagaucuaaaaaaaaaaaaaaaaaaaaaaaaaaaaaaaaaaaaaaaaaaaaaaaaaaaaaaaaaaaaaaaaaaaaaaaaaaaaaaaaaaaaaaaaaaaaaaaaaaaa

SEQ ID NO: 25865 - RNA, 4011 nt, Artificial Sequence
  SARS-CoV-2/Wuhan/WIV05/2019__EPI_ISL_402128 spike protein mRNA gc (1-1273)
aggagaaagcuuaccauguucguguuccuggugcugcugccccuggugagcagccagugcgugaaccugaccacccggacccagcugccaccagccuacaccaacagcuucacccggggcgucuacuaccccgacaagguguuccggagcagcguccugcacagcacccaggaccuguuccugcccuucuucagcaacgugaccugguuccacgccauccacgugagcggcaccaacggcaccaagcgguucgacaaccccgugcugcccuucaacgacggcguguacuucgccagcaccgagaagagcaacaucauccggggcuggaucuucggcaccacccuggacagcaagacccagagccugcugaucgugaauaacgccaccaacguggugaucaaggugugcgaguuccaguucugcaacgaccccuuccugggcguguacuaccacaagaacaacaagagcuggauggagagcgaguuccggguguacagcagcgccaacaacugcaccuucgaguacgugagccagcccuuccugauggaccuggagggcaagcagggcaacuucaagaaccugcgggaguucguguucaagaacaucgacggcuacuucaagaucuacagcaagcacaccccaaucaaccuggugcgggaucugccccagggcuucucagcccuggagccccugguggaccugcccaucggcaucaacaucacccgguuccagacccugcuggcccugcaccggagcuaccugaccccaggcgacagcagcagcggguggacagcaggcgcggcugcuuacuacgugggcuaccugcagccccggaccuuccugcugaaguacaacgagaacggcaccaucaccgacgccguggacugcgcccuggacccucugagcgagaccaagugcacccugaagagcuucaccguggagaagggcaucuaccagaccagcaacuuccgggugcagcccaccgagagcaucgugcgguuccccaacaucaccaaccugugccccuucggcgagguguucaacgccacccgguucgccagcguguacgccuggaaccggaagcggaucagcaacugcguggccgacuacagcgugcuguacaacagcgccagcuucagcaccuucaagugcuacggcgugagccccaccaagcugaacgaccugugcuucaccaacguguacgccgacagcuucgugauccguggcgacgaggugcggcagaucgcacccggccagacaggcaagaucgccgacuacaacuacaagcugcccgacgacuucaccggcugcgugaucgccuggaacagcaacaaccucgacagcaaggugggcggcaacuacaacuaccuguaccggcuguuccggaagagcaaccugaagcccuucgagcgggacaucagcaccgagaucuaccaagccggcuccaccccuugcaacggcguggagggcuucaacugcuacuucccucugcagagcuacggcuuccagcccaccaacggcgugggcuaccagcccuaccgggugguggugcugagcuucgagcugcugcacgccccagccaccguguguggccccaagaagagcaccaaccuggugaagaacaagugcgugaacuucaacuucaacggccuuaccggcaccggcgugcugaccgagagcaacaagaaauuccugcccuuucagcaguucggccgggacaucgccgacaccaccgacgcugugcgggauccccagacccuggagauccuggacaucaccccuugcagcuucggcggcgugagcgugaucaccccaggcaccaacaccagcaaccagguggccgugcuguaccaggacgugaacugcaccgaggugcccguggccauccacgccgaccagcugacacccaccuggcgggucuacagcaccggcagcaacguguuccagacccgggccgguugccugaucggcgccgagcacgugaacaacagcuacgagugcgacauccccaucggcgccggcaucugugccagcuaccagacccagaccaauucaccccggagggcaaggagcguggccagccagagcaucaucgccuacaccaugagccugggcgccgagaacagcguggccuacagcaacaacagcaucgccauccccaccaacuucaccaucagcgugaccaccgagauucugcccgugagcaugaccaagaccagcguggacugcaccauguacaucugcggcgacagcaccgagugcagcaaccugcugcugcaguacggcagcuucugcacccagcugaaccgggcccugaccggcaucgccguggagcaggacaagaacacccaggagguguucgcccaggugaagcagaucuacaagaccccucccaucaaggacuucggcggcuucaacuucagccagauccugcccgaccccagcaagcccagcaagcggagcuucaucgaggaccugcuguucaacaaggugacccuagccgacgccggcuucaucaagcaguacggcgacugccucggcgacauagccgcccgggaccugaucugcgcccagaaguucaacggccugaccgugcugccuccccugcugaccgacgagaugaucgcccaguacaccagcgcccuguuagccggaaccaucaccagcggcuggacuuucggcgcuggagccgcucugcagauccccuucgccaugcagauggccuaccgguucaacggcaucggcgugacccagaacgugcuguacgagaaccagaagcugaucgccaaccaguucaacagcgccaucggcaagauccaggacagccugagcagcaccgcuagcgcccugggcaagcugcaggacguggugaaccagaacgcccaggcccugaacacccuggugaagcagcugagcagcaacuucggcgccaucagcagcgugcugaacgacauccugagccggcuggacaaggucgaggccgaggugcagaucgaccggcugaucacuggccggcugcagagccugcagaccuacgugacccagcagcugauccgggccgccgagauucgggccagcgccaaccuggccgccaccaagaugagcgagugcgugcugggccagagcaagcggguggacuucugcggcaagggcuaccaccugaugagcuuuccccagagcgcaccccacggagugguguuccugcacgugaccuacgugcccgcccaggagaagaacuucaccaccgccccagccaucugccacgacggcaaggcccacuuuccccgggagggcguguucgugagcaacggcacccacugguucgugacccagcggaacuucuacgagccccagaucaucaccaccgacaacaccuucgugagcggcaacugcgacguggugaucggcaucgugaacaacaccguguacgauccccugcagcccgagcuggacagcuucaaggaggagcuggacaaguacuucaagaaucacaccagccccgacguggaccugggcgacaucagcggcaucaacgccagcguggugaacauccagaaggagaucgaucggcugaacgagguggccaagaaccugaacgagagccugaucgaccugcaggagcugggcaaguacgagcaguacaucaaguggcccugguacaucuggcugggcuucaucgccggccugaucgccaucgugauggugaccaucaugcugugcugcaugaccagcugcugcagcugccugaagggcuguugcagcugcggcagcugcugcaaguucgacgaggacgacagcgagcccgugcugaagggcgugaagcugcacuacaccugaggacuaguuauaagacugacuagcccgaugggccucccaacgggcccuccuccccuccuugcaccgagagaucuaaaaaaaaaaaaaaaaaaaaaaaaaaaaaaaaaaaaaaaaaaaaaaaaaaaaaaaaaaaaaaaaaaaaaaaaaaaaaaaaaaaaaaaaaaaaaaaaaaaa

SEQ ID NO: 25866 - RNA, 4011 nt, Artificial Sequence
  SARS-CoV-2/Wuhan/WIV05/2019__EPI_ISL_402128 spike protein mRNA gc (1-1273)(D614G)
aggagaaagcuuaccauguucguguuccuggugcugcugccccuggugagcagccagugcgugaaccugaccacccggacccagcugccaccagccuacaccaacagcuucacccggggcgucuacuaccccgacaagguguuccggagcagcguccugcacagcacccaggaccuguuccugcccuucuucagcaacgugaccugguuccacgccauccacgugagcggcaccaacggcaccaagcgguucgacaaccccgugcugcccuucaacgacggcguguacuucgccagcaccgagaagagcaacaucauccggggcuggaucuucggcaccacccuggacagcaagacccagagccugcugaucgugaauaacgccaccaacguggugaucaaggugugcgaguuccaguucugcaacgaccccuuccugggcguguacuaccacaagaacaacaagagcuggauggagagcgaguuccggguguacagcagcgccaacaacugcaccuucgaguacgugagccagcccuuccugauggaccuggagggcaagcagggcaacuucaagaaccugcgggaguucguguucaagaacaucgacggcuacuucaagaucuacagcaagcacaccccaaucaaccuggugcgggaucugccccagggcuucucagcccuggagccccugguggaccugcccaucggcaucaacaucacccgguuccagacccugcuggcccugcaccggagcuaccugaccccaggcgacagcagcagcggguggacagcaggcgcggcugcuuacuacgugggcuaccugcagccccggaccuuccugcugaaguacaacgagaacggcaccaucaccgacgccguggacugcgcccuggacccucugagcgagaccaagugcacccugaagagcuucaccguggagaagggcaucuaccagaccagcaacuuccgggugcagcccaccgagagcaucgugcgguuccccaacaucaccaaccugugccccuucggcgagguguucaacgccacccgguucgccagcguguacgccuggaaccggaagcggaucagcaacugcguggccgacuacagcgugcuguacaacagcgccagcuucagcaccuucaagugcuacggcgugagccccaccaagcugaacgaccugugcuucaccaacguguacgccgacagcuucgugauccguggcgacgaggugcggcagaucgcacccggccagacaggcaagaucgccgacuacaacuacaagcugcccgacgacuucaccggcugcgugaucgccuggaacagcaacaaccucgacagcaaggugggcggcaacuacaacuaccuguaccggcuguuccggaagagcaaccugaagcccuucgagcgggacaucagcaccgagaucuaccaagccggcuccaccccuugcaacggcguggagggcuucaacugcuacuucccucugcagagcuacggcuuccagcccaccaacggcgugggcuaccagcccuaccgggugguggugcugagcuucgagcugcugcacgccccagccaccguguguggccccaagaagagcaccaaccuggugaagaacaagugcgugaacuucaacuucaacggccuuaccggcaccggcgugcugaccgagagcaacaagaaauuccugcccuuucagcaguucggccgggacaucgccgacaccaccgacgcugugcgggauccccagacccuggagauccuggacaucaccccuugcagcuucggcggcgugagcgugaucaccccaggcaccaacaccagcaaccagguggccgugcuguaccagggcgugaacugcaccgaggugcccguggccauccacgccgaccagcugacacccaccuggcgggucuacagcaccggcagcaacguguuccagacccgggccgguugccugaucggcgccgagcacgugaacaacagcuacgagugcgacauccccaucggcgccggcaucugugccagcuaccagacccagaccaauucaccccggagggcaaggagcguggccagccagagcaucaucgccuacaccaugagccugggcgccgagaacagcguggccuacagcaacaacagcaucgccauccccaccaacuucaccaucagcgugaccaccgagauucugcccgugagcaugaccaagaccagcguggacugcaccauguacaucugcggcgacagcaccgagugcagcaaccugcugcugcaguacggcagcuucugcacccagcugaaccgggcccugaccggcaucgccguggagcaggacaagaacacccaggagguguucgcccaggugaagcagaucuacaagaccccucccaucaaggacuucggcggcuucaacuucagccagauccugcccgaccccagcaagcccagcaagcggagcuucaucgaggaccugcuguucaacaaggugacccuagccgacgccggcuucaucaagcaguacggcgacugccucggcgacauagccgcccgggaccugaucugcgcccagaaguucaacggccugaccgugcugccuccccugcugaccgacgagaugaucgcccaguacaccagcgcccuguuagccggaaccaucaccagcggcuggacuuucggcgcuggagccgcucugcagauccccuucgccaugcagauggccuaccgguucaacggcaucggcgugacccagaacgugcuguacgagaaccagaagcugaucgccaaccaguucaacagcgccaucggcaagauccaggacagccugagcagcaccgcuagcgcccugggcaagcugcaggacguggugaaccagaacgcccaggcccugaacacccuggugaagcagcugagcagcaacuucggcgccaucagcagcgugcugaacgacauccugagccggcuggacaaggucgaggccgaggugcagaucgaccggcugaucacuggccggcugcagagccugcagaccuacgugacccagcagcugauccgggccgccgagauucgggccagcgccaaccuggccgccaccaagaugagcgagugcgugcugggccagagcaagcggguggacuucugcggcaagggcuaccaccugaugagcuuuccccagagcgcaccccacggagugguguuccugcacgugaccuacgugcccgcccaggagaagaacuucaccaccgccccagccaucugccacgacggcaaggcccacuuuccccgggagggcguguucgugagcaacggcacccacugguucgugacccagcggaacuucuacgagccccagaucaucaccaccgacaacaccuucgugagcggcaacugcgacguggugaucggcaucgugaacaacaccguguacgauccccugcagcccgagcuggacagcuucaaggaggagcuggacaaguacuucaagaaucacaccagccccgacguggaccugggcgacaucagcggcaucaacgccagcguggugaacauccagaaggagaucgaucggcugaacgagguggccaagaaccugaacgagagccugaucgaccugcaggagcugggcaaguacgagcaguacaucaaguggcccugguacaucuggcugggcuucaucgccggccugaucgccaucgugauggugaccaucaugcugugcugcaugaccagcugcugcagcugccugaagggcuguugcagcugcggcagcugcugcaaguucgacgaggacgacagcgagcccgugcugaagggcgugaagcugcacuacaccugaggacuaguuauaagacugacuagcccgaugggccucccaacgggcccuccuccccuccuugcaccgagagaucuaaaaaaaaaaaaaaaaaaaaaaaaaaaaaaaaaaaaaaaaaaaaaaaaaaaaaaaaaaaaaaaaaaaaaaaaaaaaaaaaaaaaaaaaaaaaaaaaaaaa

SEQ ID NO: 25867 - RNA, 4011 nt, Artificial Sequence
  SARS-CoV-2/Wuhan/WIV05/2019__EPI_ISL_402128 spike protein mRNA gc (1-1273)(A222V_D614G)
aggagaaagcuuaccauguucguguuccuggugcugcugccccuggugagcagccagugcgugaaccugaccacccggacccagcugccaccagccuacaccaacagcuucacccggggcgucuacuaccccgacaagguguuccggagcagcguccugcacagcacccaggaccuguuccugcccuucuucagcaacgugaccugguuccacgccauccacgugagcggcaccaacggcaccaagcgguucgacaaccccgugcugcccuucaacgacggcguguacuucgccagcaccgagaagagcaacaucauccggggcuggaucuucggcaccacccuggacagcaagacccagagccugcugaucgugaauaacgccaccaacguggugaucaaggugugcgaguuccaguucugcaacgaccccuuccugggcguguacuaccacaagaacaacaagagcuggauggagagcgaguuccggguguacagcagcgccaacaacugcaccuucgaguacgugagccagcccuuccugauggaccuggagggcaagcagggcaacuucaagaaccugcgggaguucguguucaagaacaucgacggcuacuucaagaucuacagcaagcacaccccaaucaaccuggugcgggaucugccccagggcuucucagugcuggagccccugguggaccugcccaucggcaucaacaucacccgguuccagacccugcuggcccugcaccggagcuaccugaccccaggcgacagcagcagcggguggacagcaggcgcggcugcuuacuacgugggcuaccugcagccccggaccuuccugcugaaguacaacgagaacggcaccaucaccgacgccguggacugcgcccuggacccucugagcgagaccaagugcacccugaagagcuucaccguggagaagggcaucuaccagaccagcaacuuccgggugcagcccaccgagagcaucgugcgguuccccaacaucaccaaccugugccccuucggcgagguguucaacgccacccgguucgccagcguguacgccuggaaccggaagcggaucagcaacugcguggccgacuacagcgugcuguacaacagcgccagcuucagcaccuucaagugcuacggcgugagccccaccaagcugaacgaccugugcuucaccaacguguacgccgacagcuucgugauccguggcgacgaggugcggcagaucgcacccggccagacaggcaagaucgccgacuacaacuacaagcugcccgacgacuucaccggcugcgugaucgccuggaacagcaacaaccucgacagcaaggugggcggcaacuacaacuaccuguaccggcuguuccggaagagcaaccugaagcccuucgagcgggacaucagcaccgagaucuaccaagccggcuccaccccuugcaacggcguggagggcuucaacugcuacuucccucugcagagcuacggcuuccagcccaccaacggcgugggcuaccagcccuaccgggugguggugcugagcuucgagcugcugcacgccccagccaccguguguggccccaagaagagcaccaaccuggugaagaacaagugcgugaacuucaacuucaacggccuuaccggcaccggcgugcugaccgagagcaacaagaaauuccugcccuuucagcaguucggccgggacaucgccgacaccaccgacgcugugcgggauccccagacccuggagauccuggacaucaccccuugcagcuucggcggcgugagcgugaucaccccaggcaccaacaccagcaaccagguggccgugcuguaccagggcgugaacugcaccgaggugcccguggccauccacgccgaccagcugacacccaccuggcgggucuacagcaccggcagcaacguguuccagacccgggccgguugccugaucggcgccgagcacgugaacaacagcuacgagugcgacauccccaucggcgccggcaucugugccagcuaccagacccagaccaauucaccccggagggcaaggagcguggccagccagagcaucaucgccuacaccaugagccugggcgccgagaacagcguggccuacagcaacaacagcaucgccauccccaccaacuucaccaucagcgugaccaccgagauucugcccgugagcaugaccaagaccagcguggacugcaccauguacaucugcggcgacagcaccgagugcagcaaccugcugcugcaguacggcagcuucugcacccagcugaaccgggcccugaccggcaucgccguggagcaggacaagaacacccaggagguguucgcccaggugaagcagaucuacaagaccccucccaucaaggacuucggcggcuucaacuucagccagauccugcccgaccccagcaagcccagcaagcggagcuucaucgaggaccugcuguucaacaaggugacccuagccgacgccggcuucaucaagcaguacggcgacugccucggcgacauagccgcccgggaccugaucugcgcccagaaguucaacggccugaccgugcugccuccccugcugaccgacgagaugaucgcccaguacaccagcgcccuguuagccggaaccaucaccagcggcuggacuuucggcgcuggagccgcucugcagauccccuucgccaugcagauggccuaccgguucaacggcaucggcgugacccagaacgugcuguacgagaaccagaagcugaucgccaaccaguucaacagcgccaucggcaagauccaggacagccugagcagcaccgcuagcgcccugggcaagcugcaggacguggugaaccagaacgcccaggcccugaacacccuggugaagcagcugagcagcaacuucggcgccaucagcagcgugcugaacgacauccugagccggcuggacaaggucgaggccgaggugcagaucgaccggcugaucacuggccggcugcagagccugcagaccuacgugacccagcagcugauccgggccgccgagauucgggccagcgccaaccuggccgccaccaagaugagcgagugcgugcugggccagagcaagcggguggacuucugcggcaagggcuaccaccugaugagcuuuccccagagcgcaccccacggagugguguuccugcacgugaccuacgugcccgcccaggagaagaacuucaccaccgccccagccaucugccacgacggcaaggcccacuuuccccgggagggcguguucgugagcaacggcacccacugguucgugacccagcggaacuucuacgagccccagaucaucaccaccgacaacaccuucgugagcggcaacugcgacguggugaucggcaucgugaacaacaccguguacgauccccugcagcccgagcuggacagcuucaaggaggagcuggacaaguacuucaagaaucacaccagccccgacguggaccugggcgacaucagcggcaucaacgccagcguggugaacauccagaaggagaucgaucggcugaacgagguggccaagaaccugaacgagagccugaucgaccugcaggagcugggcaaguacgagcaguacaucaaguggcccugguacaucuggcugggcuucaucgccggccugaucgccaucgugauggugaccaucaugcugugcugcaugaccagcugcugcagcugccugaagggcuguugcagcugcggcagcugcugcaaguucgacgaggacgacagcgagcccgugcugaagggcgugaagcugcacuacaccugaggacuaguuauaagacugacuagcccgaugggccucccaacgggcccuccuccccuccuugcaccgagagaucuaaaaaaaaaaaaaaaaaaaaaaaaaaaaaaaaaaaaaaaaaaaaaaaaaaaaaaaaaaaaaaaaaaaaaaaaaaaaaaaaaaaaaaaaaaaaaaaaaaaa

SEQ ID NO: 25868 - RNA, 4011 nt, Artificial Sequence
  SARS-CoV-2/Wuhan/WIV05/2019__EPI_ISL_402128 spike protein mRNA gc (1-1273)(N439K_D614G)
aggagaaagcuuaccauguucguguuccuggugcugcugccccuggugagcagccagugcgugaaccugaccacccggacccagcugccaccagccuacaccaacagcuucacccggggcgucuacuaccccgacaagguguuccggagcagcguccugcacagcacccaggaccuguuccugcccuucuucagcaacgugaccugguuccacgccauccacgugagcggcaccaacggcaccaagcgguucgacaaccccgugcugcccuucaacgacggcguguacuucgccagcaccgagaagagcaacaucauccggggcuggaucuucggcaccacccuggacagcaagacccagagccugcugaucgugaauaacgccaccaacguggugaucaaggugugcgaguuccaguucugcaacgaccccuuccugggcguguacuaccacaagaacaacaagagcuggauggagagcgaguuccggguguacagcagcgccaacaacugcaccuucgaguacgugagccagcccuuccugauggaccuggagggcaagcagggcaacuucaagaaccugcgggaguucguguucaagaacaucgacggcuacuucaagaucuacagcaagcacaccccaaucaaccuggugcgggaucugccccagggcuucucagcccuggagccccugguggaccugcccaucggcaucaacaucacccgguuccagacccugcuggcccugcaccggagcuaccugaccccaggcgacagcagcagcggguggacagcaggcgcggcugcuuacuacgugggcuaccugcagccccggaccuuccugcugaaguacaacgagaacggcaccaucaccgacgccguggacugcgcccuggacccucugagcgagaccaagugcacccugaagagcuucaccguggagaagggcaucuaccagaccagcaacuuccgggugcagcccaccgagagcaucgugcgguuccccaacaucaccaaccugugccccuucggcgagguguucaacgccacccgguucgccagcguguacgccuggaaccggaagcggaucagcaacugcguggccgacuacagcgugcuguacaacagcgccagcuucagcaccuucaagugcuacggcgugagccccaccaagcugaacgaccugugcuucaccaacguguacgccgacagcuucgugauccguggcgacgaggugcggcagaucgcacccggccagacaggcaagaucgccgacuacaacuacaagcugcccgacgacuucaccggcugcgugaucgccuggaacagcaagaaccucgacagcaaggugggcggcaacuacaacuaccuguaccggcuguuccggaagagcaaccugaagcccuucgagcgggacaucagcaccgagaucuaccaagccggcuccaccccuugcaacggcguggagggcuucaacugcuacuucccucugcagagcuacggcuuccagcccaccaacggcgugggcuaccagcccuaccgggugguggugcugagcuucgagcugcugcacgccccagccaccguguguggccccaagaagagcaccaaccuggugaagaacaagugcgugaacuucaacuucaacggccuuaccggcaccggcgugcugaccgagagcaacaagaaauuccugcccuuucagcaguucggccgggacaucgccgacaccaccgacgcugugcgggauccccagacccuggagauccuggacaucaccccuugcagcuucggcggcgugagcgugaucaccccaggcaccaacaccagcaaccagguggccgugcuguaccagggcgugaacugcaccgaggugcccguggccauccacgccgaccagcugacacccaccuggcgggucuacagcaccggcagcaacguguuccagacccgggccgguugccugaucggcgccgagcacgugaacaacagcuacgagugcgacauccccaucggcgccggcaucugugccagcuaccagacccagaccaauucaccccggagggcaaggagcguggccagccagagcaucaucgccuacaccaugagccugggcgccgagaacagcguggccuacagcaacaacagcaucgccauccccaccaacuucaccaucagcgugaccaccgagauucugcccgugagcaugaccaagaccagcguggacugcaccauguacaucugcggcgacagcaccgagugcagcaaccugcugcugcaguacggcagcuucugcacccagcugaaccgggcccugaccggcaucgccguggagcaggacaagaacacccaggagguguucgcccaggugaagcagaucuacaagaccccucccaucaaggacuucggcggcuucaacuucagccagauccugcccgaccccagcaagcccagcaagcggagcuucaucgaggaccugcuguucaacaaggugacccuagccgacgccggcuucaucaagcaguacggcgacugccucggcgacauagccgcccgggaccugaucugcgcccagaaguucaacggccugaccgugcugccuccccugcugaccgacgagaugaucgcccaguacaccagcgcccuguuagccggaaccaucaccagcggcuggacuuucggcgcuggagccgcucugcagauccccuucgccaugcagauggccuaccgguucaacggcaucggcgugacccagaacgugcuguacgagaaccagaagcugaucgccaaccaguucaacagcgccaucggcaagauccaggacagccugagcagcaccgcuagcgcccugggcaagcugcaggacguggugaaccagaacgcccaggcccugaacacccuggugaagcagcugagcagcaacuucggcgccaucagcagcgugcugaacgacauccugagccggcuggacaaggucgaggccgaggugcagaucgaccggcugaucacuggccggcugcagagccugcagaccuacgugacccagcagcugauccgggccgccgagauucgggccagcgccaaccuggccgccaccaagaugagcgagugcgugcugggccagagcaagcggguggacuucugcggcaagggcuaccaccugaugagcuuuccccagagcgcaccccacggagugguguuccugcacgugaccuacgugcccgcccaggagaagaacuucaccaccgccccagccaucugccacgacggcaaggcccacuuuccccgggagggcguguucgugagcaacggcacccacugguucgugacccagcggaacuucuacgagccccagaucaucaccaccgacaacaccuucgugagcggcaacugcgacguggugaucggcaucgugaacaacaccguguacgauccccugcagcccgagcuggacagcuucaaggaggagcuggacaaguacuucaagaaucacaccagccccgacguggaccugggcgacaucagcggcaucaacgccagcguggugaacauccagaaggagaucgaucggcugaacgagguggccaagaaccugaacgagagccugaucgaccugcaggagcugggcaaguacgagcaguacaucaaguggcccugguacaucuggcugggcuucaucgccggccugaucgccaucgugauggugaccaucaugcugugcugcaugaccagcugcugcagcugccugaagggcuguugcagcugcggcagcugcugcaaguucgacgaggacgacagcgagcccgugcugaagggcgugaagcugcacuacaccugaggacuaguuauaagacugacuagcccgaugggccucccaacgggcccuccuccccuccuugcaccgagagaucuaaaaaaaaaaaaaaaaaaaaaaaaaaaaaaaaaaaaaaaaaaaaaaaaaaaaaaaaaaaaaaaaaaaaaaaaaaaaaaaaaaaaaaaaaaaaaaaaaaaa

SEQ ID NO: 25869 - RNA, 4011 nt, Artificial Sequence
  SARS-CoV-2/Wuhan/WIV05/2019__EPI_ISL_402128 spike protein mRNA gc (1-1273)(S477N_D614G)
aggagaaagcuuaccauguucguguuccuggugcugcugccccuggugagcagccagugcgugaaccugaccacccggacccagcugccaccagccuacaccaacagcuucacccggggcgucuacuaccccgacaagguguuccggagcagcguccugcacagcacccaggaccuguuccugcccuucuucagcaacgugaccugguuccacgccauccacgugagcggcaccaacggcaccaagcgguucgacaaccccgugcugcccuucaacgacggcguguacuucgccagcaccgagaagagcaacaucauccggggcuggaucuucggcaccacccuggacagcaagacccagagccugcugaucgugaauaacgccaccaacguggugaucaaggugugcgaguuccaguucugcaacgaccccuuccugggcguguacuaccacaagaacaacaagagcuggauggagagcgaguuccggguguacagcagcgccaacaacugcaccuucgaguacgugagccagcccuuccugauggaccuggagggcaagcagggcaacuucaagaaccugcgggaguucguguucaagaacaucgacggcuacuucaagaucuacagcaagcacaccccaaucaaccuggugcgggaucugccccagggcuucucagcccuggagccccugguggaccugcccaucggcaucaacaucacccgguuccagacccugcuggcccugcaccggagcuaccugaccccaggcgacagcagcagcggguggacagcaggcgcggcugcuuacuacgugggcuaccugcagccccggaccuuccugcugaaguacaacgagaacggcaccaucaccgacgccguggacugcgcccuggacccucugagcgagaccaagugcacccugaagagcuucaccguggagaagggcaucuaccagaccagcaacuuccgggugcagcccaccgagagcaucgugcgguuccccaacaucaccaaccugugccccuucggcgagguguucaacgccacccgguucgccagcguguacgccuggaaccggaagcggaucagcaacugcguggccgacuacagcgugcuguacaacagcgccagcuucagcaccuucaagugcuacggcgugagccccaccaagcugaacgaccugugcuucaccaacguguacgccgacagcuucgugauccguggcgacgaggugcggcagaucgcacccggccagacaggcaagaucgccgacuacaacuacaagcugcccgacgacuucaccggcugcgugaucgccuggaacagcaacaaccucgacagcaaggugggcggcaacuacaacuaccuguaccggcuguuccggaagagcaaccugaagcccuucgagcgggacaucagcaccgagaucuaccaagccggcaacaccccuugcaacggcguggagggcuucaacugcuacuucccucugcagagcuacggcuuccagcccaccaacggcgugggcuaccagcccuaccgggugguggugcugagcuucgagcugcugcacgccccagccaccguguguggccccaagaagagcaccaaccuggugaagaacaagugcgugaacuucaacuucaacggccuuaccggcaccggcgugcugaccgagagcaacaagaaauuccugcccuuucagcaguucggccgggacaucgccgacaccaccgacgcugugcgggauccccagacccuggagauccuggacaucaccccuugcagcuucggcggcgugagcgugaucaccccaggcaccaacaccagcaaccagguggccgugcuguaccagggcgugaacugcaccgaggugcccguggccauccacgccgaccagcugacacccaccuggcgggucuacagcaccggcagcaacguguuccagacccgggccgguugccugaucggcgccgagcacgugaacaacagcuacgagugcgacauccccaucggcgccggcaucugugccagcuaccagacccagaccaauucaccccggagggcaaggagcguggccagccagagcaucaucgccuacaccaugagccugggcgccgagaacagcguggccuacagcaacaacagcaucgccauccccaccaacuucaccaucagcgugaccaccgagauucugcccgugagcaugaccaagaccagcguggacugcaccauguacaucugcggcgacagcaccgagugcagcaaccugcugcugcaguacggcagcuucugcacccagcugaaccgggcccugaccggcaucgccguggagcaggacaagaacacccaggagguguucgcccaggugaagcagaucuacaagaccccucccaucaaggacuucggcggcuucaacuucagccagauccugcccgaccccagcaagcccagcaagcggagcuucaucgaggaccugcuguucaacaaggugacccuagccgacgccggcuucaucaagcaguacggcgacugccucggcgacauagccgcccgggaccugaucugcgcccagaaguucaacggccugaccgugcugccuccccugcugaccgacgagaugaucgcccaguacaccagcgcccuguuagccggaaccaucaccagcggcuggacuuucggcgcuggagccgcucugcagauccccuucgccaugcagauggccuaccgguucaacggcaucggcgugacccagaacgugcuguacgagaaccagaagcugaucgccaaccaguucaacagcgccaucggcaagauccaggacagccugagcagcaccgcuagcgcccugggcaagcugcaggacguggugaaccagaacgcccaggcccugaacacccuggugaagcagcugagcagcaacuucggcgccaucagcagcgugcugaacgacauccugagccggcuggacaaggucgaggccgaggugcagaucgaccggcugaucacuggccggcugcagagccugcagaccuacgugacccagcagcugauccgggccgccgagauucgggccagcgccaaccuggccgccaccaagaugagcgagugcgugcugggccagagcaagcggguggacuucugcggcaagggcuaccaccugaugagcuuuccccagagcgcaccccacggagugguguuccugcacgugaccuacgugcccgcccaggagaagaacuucaccaccgccccagccaucugccacgacggcaaggcccacuuuccccgggagggcguguucgugagcaacggcacccacugguucgugacccagcggaacuucuacgagccccagaucaucaccaccgacaacaccuucgugagcggcaacugcgacguggugaucggcaucgugaacaacaccguguacgauccccugcagcccgagcuggacagcuucaaggaggagcuggacaaguacuucaagaaucacaccagccccgacguggaccugggcgacaucagcggcaucaacgccagcguggugaacauccagaaggagaucgaucggcugaacgagguggccaagaaccugaacgagagccugaucgaccugcaggagcugggcaaguacgagcaguacaucaaguggcccugguacaucuggcugggcuucaucgccggccugaucgccaucgugauggugaccaucaugcugugcugcaugaccagcugcugcagcugccugaagggcuguugcagcugcggcagcugcugcaaguucgacgaggacgacagcgagcccgugcugaagggcgugaagcugcacuacaccugaggacuaguuauaagacugacuagcccgaugggccucccaacgggcccuccuccccuccuugcaccgagagaucuaaaaaaaaaaaaaaaaaaaaaaaaaaaaaaaaaaaaaaaaaaaaaaaaaaaaaaaaaaaaaaaaaaaaaaaaaaaaaaaaaaaaaaaaaaaaaaaaaaaa

SEQ ID NO: 25870 - RNA, 4011 nt, Artificial Sequence
  SARS-CoV-2/Wuhan/WIV05/2019__EPI_ISL_402128 spike protein mRNA gc (1-1273)(N501Y_D614G)
aggagaaagcuuaccauguucguguuccuggugcugcugccccuggugagcagccagugcgugaaccugaccacccggacccagcugccaccagccuacaccaacagcuucacccggggcgucuacuaccccgacaagguguuccggagcagcguccugcacagcacccaggaccuguuccugcccuucuucagcaacgugaccugguuccacgccauccacgugagcggcaccaacggcaccaagcgguucgacaaccccgugcugcccuucaacgacggcguguacuucgccagcaccgagaagagcaacaucauccggggcuggaucuucggcaccacccuggacagcaagacccagagccugcugaucgugaauaacgccaccaacguggugaucaaggugugcgaguuccaguucugcaacgaccccuuccugggcguguacuaccacaagaacaacaagagcuggauggagagcgaguuccggguguacagcagcgccaacaacugcaccuucgaguacgugagccagcccuuccugauggaccuggagggcaagcagggcaacuucaagaaccugcgggaguucguguucaagaacaucgacggcuacuucaagaucuacagcaagcacaccccaaucaaccuggugcgggaucugccccagggcuucucagcccuggagccccugguggaccugcccaucggcaucaacaucacccgguuccagacccugcuggcccugcaccggagcuaccugaccccaggcgacagcagcagcggguggacagcaggcgcggcugcuuacuacgugggcuaccugcagccccggaccuuccugcugaaguacaacgagaacggcaccaucaccgacgccguggacugcgcccuggacccucugagcgagaccaagugcacccugaagagcuucaccguggagaagggcaucuaccagaccagcaacuuccgggugcagcccaccgagagcaucgugcgguuccccaacaucaccaaccugugccccuucggcgagguguucaacgccacccgguucgccagcguguacgccuggaaccggaagcggaucagcaacugcguggccgacuacagcgugcuguacaacagcgccagcuucagcaccuucaagugcuacggcgugagccccaccaagcugaacgaccugugcuucaccaacguguacgccgacagcuucgugauccguggcgacgaggugcggcagaucgcacccggccagacaggcaagaucgccgacuacaacuacaagcugcccgacgacuucaccggcugcgugaucgccuggaacagcaacaaccucgacagcaaggugggcggcaacuacaacuaccuguaccggcuguuccggaagagcaaccugaagcccuucgagcgggacaucagcaccgagaucuaccaagccggcuccaccccuugcaacggcguggagggcuucaacugcuacuucccucugcagagcuacggcuuccagcccaccuacggcgugggcuaccagcccuaccgggugguggugcugagcuucgagcugcugcacgccccagccaccguguguggccccaagaagagcaccaaccuggugaagaacaagugcgugaacuucaacuucaacggccuuaccggcaccggcgugcugaccgagagcaacaagaaauuccugcccuuucagcaguucggccgggacaucgccgacaccaccgacgcugugcgggauccccagacccuggagauccuggacaucaccccuugcagcuucggcggcgugagcgugaucaccccaggcaccaacaccagcaaccagguggccgugcuguaccagggcgugaacugcaccgaggugcccguggccauccacgccgaccagcugacacccaccuggcgggucuacagcaccggcagcaacguguuccagacccgggccgguugccugaucggcgccgagcacgugaacaacagcuacgagugcgacauccccaucggcgccggcaucugugccagcuaccagacccagaccaauucaccccggagggcaaggagcguggccagccagagcaucaucgccuacaccaugagccugggcgccgagaacagcguggccuacagcaacaacagcaucgccauccccaccaacuucaccaucagcgugaccaccgagauucugcccgugagcaugaccaagaccagcguggacugcaccauguacaucugcggcgacagcaccgagugcagcaaccugcugcugcaguacggcagcuucugcacccagcugaaccgggcccugaccggcaucgccguggagcaggacaagaacacccaggagguguucgcccaggugaagcagaucuacaagaccccucccaucaaggacuucggcggcuucaacuucagccagauccugcccgaccccagcaagcccagcaagcggagcuucaucgaggaccugcuguucaacaaggugacccuagccgacgccggcuucaucaagcaguacggcgacugccucggcgacauagccgcccgggaccugaucugcgcccagaaguucaacggccugaccgugcugccuccccugcugaccgacgagaugaucgcccaguacaccagcgcccuguuagccggaaccaucaccagcggcuggacuuucggcgcuggagccgcucugcagauccccuucgccaugcagauggccuaccgguucaacggcaucggcgugacccagaacgugcuguacgagaaccagaagcugaucgccaaccaguucaacagcgccaucggcaagauccaggacagccugagcagcaccgcuagcgcccugggcaagcugcaggacguggugaaccagaacgcccaggcccugaacacccuggugaagcagcugagcagcaacuucggcgccaucagcagcgugcugaacgacauccugagccggcuggacaaggucgaggccgaggugcagaucgaccggcugaucacuggccggcugcagagccugcagaccuacgugacccagcagcugauccgggccgccgagauucgggccagcgccaaccuggccgccaccaagaugagcgagugcgugcugggccagagcaagcggguggacuucugcggcaagggcuaccaccugaugagcuuuccccagagcgcaccccacggagugguguuccugcacgugaccuacgugcccgcccaggagaagaacuucaccaccgccccagccaucugccacgacggcaaggcccacuuuccccgggagggcguguucgugagcaacggcacccacugguucgugacccagcggaacuucuacgagccccagaucaucaccaccgacaacaccuucgugagcggcaacugcgacguggugaucggcaucgugaacaacaccguguacgauccccugcagcccgagcuggacagcuucaaggaggagcuggacaaguacuucaagaaucacaccagccccgacguggaccugggcgacaucagcggcaucaacgccagcguggugaacauccagaaggagaucgaucggcugaacgagguggccaagaaccugaacgagagccugaucgaccugcaggagcugggcaaguacgagcaguacaucaaguggcccugguacaucuggcugggcuucaucgccggccugaucgccaucgugauggugaccaucaugcugugcugcaugaccagcugcugcagcugccugaagggcuguugcagcugcggcagcugcugcaaguucgacgaggacgacagcgagcccgugcugaagggcgugaagcugcacuacaccugaggacuaguuauaagacugacuagcccgaugggccucccaacgggcccuccuccccuccuugcaccgagagaucuaaaaaaaaaaaaaaaaaaaaaaaaaaaaaaaaaaaaaaaaaaaaaaaaaaaaaaaaaaaaaaaaaaaaaaaaaaaaaaaaaaaaaaaaaaaaaaaaaaaa

SEQ ID NO: 25871 - RNA, 4005 nt, Artificial Sequence
  SARS-CoV-2/Wuhan/WIV05/2019__EPI_ISL_402128 spike protein mRNA gc (1-1273)(H69del_V70del_D614G)
aggagaaagcuuaccauguucguguuccuggugcugcugccccuggugagcagccagugcgugaaccugaccacccggacccagcugccaccagccuacaccaacagcuucacccggggcgucuacuaccccgacaagguguuccggagcagcguccugcacagcacccaggaccuguuccugcccuucuucagcaacgugaccugguuccacgccaucagcggcaccaacggcaccaagcgguucgacaaccccgugcugcccuucaacgacggcguguacuucgccagcaccgagaagagcaacaucauccggggcuggaucuucggcaccacccuggacagcaagacccagagccugcugaucgugaauaacgccaccaacguggugaucaaggugugcgaguuccaguucugcaacgaccccuuccugggcguguacuaccacaagaacaacaagagcuggauggagagcgaguuccggguguacagcagcgccaacaacugcaccuucgaguacgugagccagcccuuccugauggaccuggagggcaagcagggcaacuucaagaaccugcgggaguucguguucaagaacaucgacggcuacuucaagaucuacagcaagcacaccccaaucaaccuggugcgggaucugccccagggcuucucagcccuggagccccugguggaccugcccaucggcaucaacaucacccgguuccagacccugcuggcccugcaccggagcuaccugaccccaggcgacagcagcagcggguggacagcaggcgcggcugcuuacuacgugggcuaccugcagccccggaccuuccugcugaaguacaacgagaacggcaccaucaccgacgccguggacugcgcccuggacccucugagcgagaccaagugcacccugaagagcuucaccguggagaagggcaucuaccagaccagcaacuuccgggugcagcccaccgagagcaucgugcgguuccccaacaucaccaaccugugccccuucggcgagguguucaacgccacccgguucgccagcguguacgccuggaaccggaagcggaucagcaacugcguggccgacuacagcgugcuguacaacagcgccagcuucagcaccuucaagugcuacggcgugagccccaccaagcugaacgaccugugcuucaccaacguguacgccgacagcuucgugauccguggcgacgaggugcggcagaucgcacccggccagacaggcaagaucgccgacuacaacuacaagcugcccgacgacuucaccggcugcgugaucgccuggaacagcaacaaccucgacagcaaggugggcggcaacuacaacuaccuguaccggcuguuccggaagagcaaccugaagcccuucgagcgggacaucagcaccgagaucuaccaagccggcuccaccccuugcaacggcguggagggcuucaacugcuacuucccucugcagagcuacggcuuccagcccaccaacggcgugggcuaccagcccuaccgggugguggugcugagcuucgagcugcugcacgccccagccaccguguguggccccaagaagagcaccaaccuggugaagaacaagugcgugaacuucaacuucaacggccuuaccggcaccggcgugcugaccgagagcaacaagaaauuccugcccuuucagcaguucggccgggacaucgccgacaccaccgacgcugugcgggauccccagacccuggagauccuggacaucaccccuugcagcuucggcggcgugagcgugaucaccccaggcaccaacaccagcaaccagguggccgugcuguaccagggcgugaacugcaccgaggugcccguggccauccacgccgaccagcugacacccaccuggcgggucuacagcaccggcagcaacguguuccagacccgggccgguugccugaucggcgccgagcacgugaacaacagcuacgagugcgacauccccaucggcgccggcaucugugccagcuaccagacccagaccaauucaccccggagggcaaggagcguggccagccagagcaucaucgccuacaccaugagccugggcgccgagaacagcguggccuacagcaacaacagcaucgccauccccaccaacuucaccaucagcgugaccaccgagauucugcccgugagcaugaccaagaccagcguggacugcaccauguacaucugcggcgacagcaccgagugcagcaaccugcugcugcaguacggcagcuucugcacccagcugaaccgggcccugaccggcaucgccguggagcaggacaagaacacccaggagguguucgcccaggugaagcagaucuacaagaccccucccaucaaggacuucggcggcuucaacuucagccagauccugcccgaccccagcaagcccagcaagcggagcuucaucgaggaccugcuguucaacaaggugacccuagccgacgccggcuucaucaagcaguacggcgacugccucggcgacauagccgcccgggaccugaucugcgcccagaaguucaacggccugaccgugcugccuccccugcugaccgacgagaugaucgcccaguacaccagcgcccuguuagccggaaccaucaccagcggcuggacuuucggcgcuggagccgcucugcagauccccuucgccaugcagauggccuaccgguucaacggcaucggcgugacccagaacgugcuguacgagaaccagaagcugaucgccaaccaguucaacagcgccaucggcaagauccaggacagccugagcagcaccgcuagcgcccugggcaagcugcaggacguggugaaccagaacgcccaggcccugaacacccuggugaagcagcugagcagcaacuucggcgccaucagcagcgugcugaacgacauccugagccggcuggacaaggucgaggccgaggugcagaucgaccggcugaucacuggccggcugcagagccugcagaccuacgugacccagcagcugauccgggccgccgagauucgggccagcgccaaccuggccgccaccaagaugagcgagugcgugcugggccagagcaagcggguggacuucugcggcaagggcuaccaccugaugagcuuuccccagagcgcaccccacggagugguguuccugcacgugaccuacgugcccgcccaggagaagaacuucaccaccgccccagccaucugccacgacggcaaggcccacuuuccccgggagggcguguucgugagcaacggcacccacugguucgugacccagcggaacuucuacgagccccagaucaucaccaccgacaacaccuucgugagcggcaacugcgacguggugaucggcaucgugaacaacaccguguacgauccccugcagcccgagcuggacagcuucaaggaggagcuggacaaguacuucaagaaucacaccagccccgacguggaccugggcgacaucagcggcaucaacgccagcguggugaacauccagaaggagaucgaucggcugaacgagguggccaagaaccugaacgagagccugaucgaccugcaggagcugggcaaguacgagcaguacaucaaguggcccugguacaucuggcugggcuucaucgccggccugaucgccaucgugauggugaccaucaugcugugcugcaugaccagcugcugcagcugccugaagggcuguugcagcugcggcagcugcugcaaguucgacgaggacgacagcgagcccgugcugaagggcgugaagcugcacuacaccugaggacuaguuauaagacugacuagcccgaugggccucccaacgggcccuccuccccuccuugcaccgagagaucuaaaaaaaaaaaaaaaaaaaaaaaaaaaaaaaaaaaaaaaaaaaaaaaaaaaaaaaaaaaaaaaaaaaaaaaaaaaaaaaaaaaaaaaaaaaaaaaaaaaa

SEQ ID NO: 25872 - RNA, 4011 nt, Artificial Sequence
  SARS-CoV-2/Wuhan/WIV05/2019__EPI_ISL_402128 spike protein mRNA gc (1-1273)(Y453F_D614G)
aggagaaagcuuaccauguucguguuccuggugcugcugccccuggugagcagccagugcgugaaccugaccacccggacccagcugccaccagccuacaccaacagcuucacccggggcgucuacuaccccgacaagguguuccggagcagcguccugcacagcacccaggaccuguuccugcccuucuucagcaacgugaccugguuccacgccauccacgugagcggcaccaacggcaccaagcgguucgacaaccccgugcugcccuucaacgacggcguguacuucgccagcaccgagaagagcaacaucauccggggcuggaucuucggcaccacccuggacagcaagacccagagccugcugaucgugaauaacgccaccaacguggugaucaaggugugcgaguuccaguucugcaacgaccccuuccugggcguguacuaccacaagaacaacaagagcuggauggagagcgaguuccggguguacagcagcgccaacaacugcaccuucgaguacgugagccagcccuuccugauggaccuggagggcaagcagggcaacuucaagaaccugcgggaguucguguucaagaacaucgacggcuacuucaagaucuacagcaagcacaccccaaucaaccuggugcgggaucugccccagggcuucucagcccuggagccccugguggaccugcccaucggcaucaacaucacccgguuccagacccugcuggcccugcaccggagcuaccugaccccaggcgacagcagcagcggguggacagcaggcgcggcugcuuacuacgugggcuaccugcagccccggaccuuccugcugaaguacaacgagaacggcaccaucaccgacgccguggacugcgcccuggacccucugagcgagaccaagugcacccugaagagcuucaccguggagaagggcaucuaccagaccagcaacuuccgggugcagcccaccgagagcaucgugcgguuccccaacaucaccaaccugugccccuucggcgagguguucaacgccacccgguucgccagcguguacgccuggaaccggaagcggaucagcaacugcguggccgacuacagcgugcuguacaacagcgccagcuucagcaccuucaagugcuacggcgugagccccaccaagcugaacgaccugugcuucaccaacguguacgccgacagcuucgugauccguggcgacgaggugcggcagaucgcacccggccagacaggcaagaucgccgacuacaacuacaagcugcccgacgacuucaccggcugcgugaucgccuggaacagcaacaaccucgacagcaaggugggcggcaacuacaacuaccuguuccggcuguuccggaagagcaaccugaagcccuucgagcgggacaucagcaccgagaucuaccaagccggcuccaccccuugcaacggcguggagggcuucaacugcuacuucccucugcagagcuacggcuuccagcccaccaacggcgugggcuaccagcccuaccgggugguggugcugagcuucgagcugcugcacgccccagccaccguguguggccccaagaagagcaccaaccuggugaagaacaagugcgugaacuucaacuucaacggccuuaccggcaccggcgugcugaccgagagcaacaagaaauuccugcccuuucagcaguucggccgggacaucgccgacaccaccgacgcugugcgggauccccagacccuggagauccuggacaucaccccuugcagcuucggcggcgugagcgugaucaccccaggcaccaacaccagcaaccagguggccgugcuguaccagggcgugaacugcaccgaggugcccguggccauccacgccgaccagcugacacccaccuggcgggucuacagcaccggcagcaacguguuccagacccgggccgguugccugaucggcgccgagcacgugaacaacagcuacgagugcgacauccccaucggcgccggcaucugugccagcuaccagacccagaccaauucaccccggagggcaaggagcguggccagccagagcaucaucgccuacaccaugagccugggcgccgagaacagcguggccuacagcaacaacagcaucgccauccccaccaacuucaccaucagcgugaccaccgagauucugcccgugagcaugaccaagaccagcguggacugcaccauguacaucugcggcgacagcaccgagugcagcaaccugcugcugcaguacggcagcuucugcacccagcugaaccgggcccugaccggcaucgccguggagcaggacaagaacacccaggagguguucgcccaggugaagcagaucuacaagaccccucccaucaaggacuucggcggcuucaacuucagccagauccugcccgaccccagcaagcccagcaagcggagcuucaucgaggaccugcuguucaacaaggugacccuagccgacgccggcuucaucaagcaguacggcgacugccucggcgacauagccgcccgggaccugaucugcgcccagaaguucaacggccugaccgugcugccuccccugcugaccgacgagaugaucgcccaguacaccagcgcccuguuagccggaaccaucaccagcggcuggacuuucggcgcuggagccgcucugcagauccccuucgccaugcagauggccuaccgguucaacggcaucggcgugacccagaacgugcuguacgagaaccagaagcugaucgccaaccaguucaacagcgccaucggcaagauccaggacagccugagcagcaccgcuagcgcccugggcaagcugcaggacguggugaaccagaacgcccaggcccugaacacccuggugaagcagcugagcagcaacuucggcgccaucagcagcgugcugaacgacauccugagccggcuggacaaggucgaggccgaggugcagaucgaccggcugaucacuggccggcugcagagccugcagaccuacgugacccagcagcugauccgggccgccgagauucgggccagcgccaaccuggccgccaccaagaugagcgagugcgugcugggccagagcaagcggguggacuucugcggcaagggcuaccaccugaugagcuuuccccagagcgcaccccacggagugguguuccugcacgugaccuacgugcccgcccaggagaagaacuucaccaccgccccagccaucugccacgacggcaaggcccacuuuccccgggagggcguguucgugagcaacggcacccacugguucgugacccagcggaacuucuacgagccccagaucaucaccaccgacaacaccuucgugagcggcaacugcgacguggugaucggcaucgugaacaacaccguguacgauccccugcagcccgagcuggacagcuucaaggaggagcuggacaaguacuucaagaaucacaccagccccgacguggaccugggcgacaucagcggcaucaacgccagcguggugaacauccagaaggagaucgaucggcugaacgagguggccaagaaccugaacgagagccugaucgaccugcaggagcugggcaaguacgagcaguacaucaaguggcccugguacaucuggcugggcuucaucgccggccugaucgccaucgugauggugaccaucaugcugugcugcaugaccagcugcugcagcugccugaagggcuguugcagcugcggcagcugcugcaaguucgacgaggacgacagcgagcccgugcugaagggcgugaagcugcacuacaccugaggacuaguuauaagacugacuagcccgaugggccucccaacgggcccuccuccccuccuugcaccgagagaucuaaaaaaaaaaaaaaaaaaaaaaaaaaaaaaaaaaaaaaaaaaaaaaaaaaaaaaaaaaaaaaaaaaaaaaaaaaaaaaaaaaaaaaaaaaaaaaaaaaaa

SEQ ID NO: 25873 - RNA, 4011 nt, Artificial Sequence
  SARS-CoV-2/Wuhan/WIV05/2019__EPI_ISL_402128 spike protein mRNA gc (1-1273)(D614G_I692V)
aggagaaagcuuaccauguucguguuccuggugcugcugccccuggugagcagccagugcgugaaccugaccacccggacccagcugccaccagccuacaccaacagcuucacccggggcgucuacuaccccgacaagguguuccggagcagcguccugcacagcacccaggaccuguuccugcccuucuucagcaacgugaccugguuccacgccauccacgugagcggcaccaacggcaccaagcgguucgacaaccccgugcugcccuucaacgacggcguguacuucgccagcaccgagaagagcaacaucauccggggcuggaucuucggcaccacccuggacagcaagacccagagccugcugaucgugaauaacgccaccaacguggugaucaaggugugcgaguuccaguucugcaacgaccccuuccugggcguguacuaccacaagaacaacaagagcuggauggagagcgaguuccggguguacagcagcgccaacaacugcaccuucgaguacgugagccagcccuuccugauggaccuggagggcaagcagggcaacuucaagaaccugcgggaguucguguucaagaacaucgacggcuacuucaagaucuacagcaagcacaccccaaucaaccuggugcgggaucugccccagggcuucucagcccuggagccccugguggaccugcccaucggcaucaacaucacccgguuccagacccugcuggcccugcaccggagcuaccugaccccaggcgacagcagcagcggguggacagcaggcgcggcugcuuacuacgugggcuaccugcagccccggaccuuccugcugaaguacaacgagaacggcaccaucaccgacgccguggacugcgcccuggacccucugagcgagaccaagugcacccugaagagcuucaccguggagaagggcaucuaccagaccagcaacuuccgggugcagcccaccgagagcaucgugcgguuccccaacaucaccaaccugugccccuucggcgagguguucaacgccacccgguucgccagcguguacgccuggaaccggaagcggaucagcaacugcguggccgacuacagcgugcuguacaacagcgccagcuucagcaccuucaagugcuacggcgugagccccaccaagcugaacgaccugugcuucaccaacguguacgccgacagcuucgugauccguggcgacgaggugcggcagaucgcacccggccagacaggcaagaucgccgacuacaacuacaagcugcccgacgacuucaccggcugcgugaucgccuggaacagcaacaaccucgacagcaaggugggcggcaacuacaacuaccuguaccggcuguuccggaagagcaaccugaagcccuucgagcgggacaucagcaccgagaucuaccaagccggcuccaccccuugcaacggcguggagggcuucaacugcuacuucccucugcagagcuacggcuuccagcccaccaacggcgugggcuaccagcccuaccgggugguggugcugagcuucgagcugcugcacgccccagccaccguguguggccccaagaagagcaccaaccuggugaagaacaagugcgugaacuucaacuucaacggccuuaccggcaccggcgugcugaccgagagcaacaagaaauuccugcccuuucagcaguucggccgggacaucgccgacaccaccgacgcugugcgggauccccagacccuggagauccuggacaucaccccuugcagcuucggcggcgugagcgugaucaccccaggcaccaacaccagcaaccagguggccgugcuguaccagggcgugaacugcaccgaggugcccguggccauccacgccgaccagcugacacccaccuggcgggucuacagcaccggcagcaacguguuccagacccgggccgguugccugaucggcgccgagcacgugaacaacagcuacgagugcgacauccccaucggcgccggcaucugugccagcuaccagacccagaccaauucaccccggagggcaaggagcguggccagccagagcgugaucgccuacaccaugagccugggcgccgagaacagcguggccuacagcaacaacagcaucgccauccccaccaacuucaccaucagcgugaccaccgagauucugcccgugagcaugaccaagaccagcguggacugcaccauguacaucugcggcgacagcaccgagugcagcaaccugcugcugcaguacggcagcuucugcacccagcugaaccgggcccugaccggcaucgccguggagcaggacaagaacacccaggagguguucgcccaggugaagcagaucuacaagaccccucccaucaaggacuucggcggcuucaacuucagccagauccugcccgaccccagcaagcccagcaagcggagcuucaucgaggaccugcuguucaacaaggugacccuagccgacgccggcuucaucaagcaguacggcgacugccucggcgacauagccgcccgggaccugaucugcgcccagaaguucaacggccugaccgugcugccuccccugcugaccgacgagaugaucgcccaguacaccagcgcccuguuagccggaaccaucaccagcggcuggacuuucggcgcuggagccgcucugcagauccccuucgccaugcagauggccuaccgguucaacggcaucggcgugacccagaacgugcuguacgagaaccagaagcugaucgccaaccaguucaacagcgccaucggcaagauccaggacagccugagcagcaccgcuagcgcccugggcaagcugcaggacguggugaaccagaacgcccaggcccugaacacccuggugaagcagcugagcagcaacuucggcgccaucagcagcgugcugaacgacauccugagccggcuggacaaggucgaggccgaggugcagaucgaccggcugaucacuggccggcugcagagccugcagaccuacgugacccagcagcugauccgggccgccgagauucgggccagcgccaaccuggccgccaccaagaugagcgagugcgugcugggccagagcaagcggguggacuucugcggcaagggcuaccaccugaugagcuuuccccagagcgcaccccacggagugguguuccugcacgugaccuacgugcccgcccaggagaagaacuucaccaccgccccagccaucugccacgacggcaaggcccacuuuccccgggagggcguguucgugagcaacggcacccacugguucgugacccagcggaacuucuacgagccccagaucaucaccaccgacaacaccuucgugagcggcaacugcgacguggugaucggcaucgugaacaacaccguguacgauccccugcagcccgagcuggacagcuucaaggaggagcuggacaaguacuucaagaaucacaccagccccgacguggaccugggcgacaucagcggcaucaacgccagcguggugaacauccagaaggagaucgaucggcugaacgagguggccaagaaccugaacgagagccugaucgaccugcaggagcugggcaaguacgagcaguacaucaaguggcccugguacaucuggcugggcuucaucgccggccugaucgccaucgugauggugaccaucaugcugugcugcaugaccagcugcugcagcugccugaagggcuguugcagcugcggcagcugcugcaaguucgacgaggacgacagcgagcccgugcugaagggcgugaagcugcacuacaccugaggacuaguuauaagacugacuagcccgaugggccucccaacgggcccuccuccccuccuugcaccgagagaucuaaaaaaaaaaaaaaaaaaaaaaaaaaaaaaaaaaaaaaaaaaaaaaaaaaaaaaaaaaaaaaaaaaaaaaaaaaaaaaaaaaaaaaaaaaaaaaaaaaaa

SEQ ID NO: 25874 - RNA, 4011 nt, Artificial Sequence
  SARS-CoV-2/Wuhan/WIV05/2019__EPI_ISL_402128 spike protein mRNA gc (1-1273)(D614G_M1229I)
aggagaaagcuuaccauguucguguuccuggugcugcugccccuggugagcagccagugcgugaaccugaccacccggacccagcugccaccagccuacaccaacagcuucacccggggcgucuacuaccccgacaagguguuccggagcagcguccugcacagcacccaggaccuguuccugcccuucuucagcaacgugaccugguuccacgccauccacgugagcggcaccaacggcaccaagcgguucgacaaccccgugcugcccuucaacgacggcguguacuucgccagcaccgagaagagcaacaucauccggggcuggaucuucggcaccacccuggacagcaagacccagagccugcugaucgugaauaacgccaccaacguggugaucaaggugugcgaguuccaguucugcaacgaccccuuccugggcguguacuaccacaagaacaacaagagcuggauggagagcgaguuccggguguacagcagcgccaacaacugcaccuucgaguacgugagccagcccuuccugauggaccuggagggcaagcagggcaacuucaagaaccugcgggaguucguguucaagaacaucgacggcuacuucaagaucuacagcaagcacaccccaaucaaccuggugcgggaucugccccagggcuucucagcccuggagccccugguggaccugcccaucggcaucaacaucacccgguuccagacccugcuggcccugcaccggagcuaccugaccccaggcgacagcagcagcggguggacagcaggcgcggcugcuuacuacgugggcuaccugcagccccggaccuuccugcugaaguacaacgagaacggcaccaucaccgacgccguggacugcgcccuggacccucugagcgagaccaagugcacccugaagagcuucaccguggagaagggcaucuaccagaccagcaacuuccgggugcagcccaccgagagcaucgugcgguuccccaacaucaccaaccugugccccuucggcgagguguucaacgccacccgguucgccagcguguacgccuggaaccggaagcggaucagcaacugcguggccgacuacagcgugcuguacaacagcgccagcuucagcaccuucaagugcuacggcgugagccccaccaagcugaacgaccugugcuucaccaacguguacgccgacagcuucgugauccguggcgacgaggugcggcagaucgcacccggccagacaggcaagaucgccgacuacaacuacaagcugcccgacgacuucaccggcugcgugaucgccuggaacagcaacaaccucgacagcaaggugggcggcaacuacaacuaccuguaccggcuguuccggaagagcaaccugaagcccuucgagcgggacaucagcaccgagaucuaccaagccggcuccaccccuugcaacggcguggagggcuucaacugcuacuucccucugcagagcuacggcuuccagcccaccaacggcgugggcuaccagcccuaccgggugguggugcugagcuucgagcugcugcacgccccagccaccguguguggccccaagaagagcaccaaccuggugaagaacaagugcgugaacuucaacuucaacggccuuaccggcaccggcgugcugaccgagagcaacaagaaauuccugcccuuucagcaguucggccgggacaucgccgacaccaccgacgcugugcgggauccccagacccuggagauccuggacaucaccccuugcagcuucggcggcgugagcgugaucaccccaggcaccaacaccagcaaccagguggccgugcuguaccagggcgugaacugcaccgaggugcccguggccauccacgccgaccagcugacacccaccuggcgggucuacagcaccggcagcaacguguuccagacccgggccgguugccugaucggcgccgagcacgugaacaacagcuacgagugcgacauccccaucggcgccggcaucugugccagcuaccagacccagaccaauucaccccggagggcaaggagcguggccagccagagcaucaucgccuacaccaugagccugggcgccgagaacagcguggccuacagcaacaacagcaucgccauccccaccaacuucaccaucagcgugaccaccgagauucugcccgugagcaugaccaagaccagcguggacugcaccauguacaucugcggcgacagcaccgagugcagcaaccugcugcugcaguacggcagcuucugcacccagcugaaccgggcccugaccggcaucgccguggagcaggacaagaacacccaggagguguucgcccaggugaagcagaucuacaagaccccucccaucaaggacuucggcggcuucaacuucagccagauccugcccgaccccagcaagcccagcaagcggagcuucaucgaggaccugcuguucaacaaggugacccuagccgacgccggcuucaucaagcaguacggcgacugccucggcgacauagccgcccgggaccugaucugcgcccagaaguucaacggccugaccgugcugccuccccugcugaccgacgagaugaucgcccaguacaccagcgcccuguuagccggaaccaucaccagcggcuggacuuucggcgcuggagccgcucugcagauccccuucgccaugcagauggccuaccgguucaacggcaucggcgugacccagaacgugcuguacgagaaccagaagcugaucgccaaccaguucaacagcgccaucggcaagauccaggacagccugagcagcaccgcuagcgcccugggcaagcugcaggacguggugaaccagaacgcccaggcccugaacacccuggugaagcagcugagcagcaacuucggcgccaucagcagcgugcugaacgacauccugagccggcuggacaaggucgaggccgaggugcagaucgaccggcugaucacuggccggcugcagagccugcagaccuacgugacccagcagcugauccgggccgccgagauucgggccagcgccaaccuggccgccaccaagaugagcgagugcgugcugggccagagcaagcggguggacuucugcggcaagggcuaccaccugaugagcuuuccccagagcgcaccccacggagugguguuccugcacgugaccuacgugcccgcccaggagaagaacuucaccaccgccccagccaucugccacgacggcaaggcccacuuuccccgggagggcguguucgugagcaacggcacccacugguucgugacccagcggaacuucuacgagccccagaucaucaccaccgacaacaccuucgugagcggcaacugcgacguggugaucggcaucgugaacaacaccguguacgauccccugcagcccgagcuggacagcuucaaggaggagcuggacaaguacuucaagaaucacaccagccccgacguggaccugggcgacaucagcggcaucaacgccagcguggugaacauccagaaggagaucgaucggcugaacgagguggccaagaaccugaacgagagccugaucgaccugcaggagcugggcaaguacgagcaguacaucaaguggcccugguacaucuggcugggcuucaucgccggccugaucgccaucgugaucgugaccaucaugcugugcugcaugaccagcugcugcagcugccugaagggcuguugcagcugcggcagcugcugcaaguucgacgaggacgacagcgagcccgugcugaagggcgugaagcugcacuacaccugaggacuaguuauaagacugacuagcccgaugggccucccaacgggcccuccuccccuccuugcaccgagagaucuaaaaaaaaaaaaaaaaaaaaaaaaaaaaaaaaaaaaaaaaaaaaaaaaaaaaaaaaaaaaaaaaaaaaaaaaaaaaaaaaaaaaaaaaaaaaaaaaaaaa

SEQ ID NO: 25875 - RNA, 4005 nt, Artificial Sequence
  SARS-CoV-2/Wuhan/WIV05/2019__EPI_ISL_402128 spike protein mRNA gc (1-1273)(H69del_V70del_A222V_Y453F_S477N_D614G_I692V)
aggagaaagcuuaccauguucguguuccuggugcugcugccccuggugagcagccagugcgugaaccugaccacccggacccagcugccaccagccuacaccaacagcuucacccggggcgucuacuaccccgacaagguguuccggagcagcguccugcacagcacccaggaccuguuccugcccuucuucagcaacgugaccugguuccacgccaucagcggcaccaacggcaccaagcgguucgacaaccccgugcugcccuucaacgacggcguguacuucgccagcaccgagaagagcaacaucauccggggcuggaucuucggcaccacccuggacagcaagacccagagccugcugaucgugaauaacgccaccaacguggugaucaaggugugcgaguuccaguucugcaacgaccccuuccugggcguguacuaccacaagaacaacaagagcuggauggagagcgaguuccggguguacagcagcgccaacaacugcaccuucgaguacgugagccagcccuuccugauggaccuggagggcaagcagggcaacuucaagaaccugcgggaguucguguucaagaacaucgacggcuacuucaagaucuacagcaagcacaccccaaucaaccuggugcgggaucugccccagggcuucucagugcuggagccccugguggaccugcccaucggcaucaacaucacccgguuccagacccugcuggcccugcaccggagcuaccugaccccaggcgacagcagcagcggguggacagcaggcgcggcugcuuacuacgugggcuaccugcagccccggaccuuccugcugaaguacaacgagaacggcaccaucaccgacgccguggacugcgcccuggacccucugagcgagaccaagugcacccugaagagcuucaccguggagaagggcaucuaccagaccagcaacuuccgggugcagcccaccgagagcaucgugcgguuccccaacaucaccaaccugugccccuucggcgagguguucaacgccacccgguucgccagcguguacgccuggaaccggaagcggaucagcaacugcguggccgacuacagcgugcuguacaacagcgccagcuucagcaccuucaagugcuacggcgugagccccaccaagcugaacgaccugugcuucaccaacguguacgccgacagcuucgugauccguggcgacgaggugcggcagaucgcacccggccagacaggcaagaucgccgacuacaacuacaagcugcccgacgacuucaccggcugcgugaucgccuggaacagcaacaaccucgacagcaaggugggcggcaacuacaacuaccuguuccggcuguuccggaagagcaaccugaagcccuucgagcgggacaucagcaccgagaucuaccaagccggcaacaccccuugcaacggcguggagggcuucaacugcuacuucccucugcagagcuacggcuuccagcccaccaacggcgugggcuaccagcccuaccgggugguggugcugagcuucgagcugcugcacgccccagccaccguguguggccccaagaagagcaccaaccuggugaagaacaagugcgugaacuucaacuucaacggccuuaccggcaccggcgugcugaccgagagcaacaagaaauuccugcccuuucagcaguucggccgggacaucgccgacaccaccgacgcugugcgggauccccagacccuggagauccuggacaucaccccuugcagcuucggcggcgugagcgugaucaccccaggcaccaacaccagcaaccagguggccgugcuguaccagggcgugaacugcaccgaggugcccguggccauccacgccgaccagcugacacccaccuggcgggucuacagcaccggcagcaacguguuccagacccgggccgguugccugaucggcgccgagcacgugaacaacagcuacgagugcgacauccccaucggcgccggcaucugugccagcuaccagacccagaccaauucaccccggagggcaaggagcguggccagccagagcgugaucgccuacaccaugagccugggcgccgagaacagcguggccuacagcaacaacagcaucgccauccccaccaacuucaccaucagcgugaccaccgagauucugcccgugagcaugaccaagaccagcguggacugcaccauguacaucugcggcgacagcaccgagugcagcaaccugcugcugcaguacggcagcuucugcacccagcugaaccgggcccugaccggcaucgccguggagcaggacaagaacacccaggagguguucgcccaggugaagcagaucuacaagaccccucccaucaaggacuucggcggcuucaacuucagccagauccugcccgaccccagcaagcccagcaagcggagcuucaucgaggaccugcuguucaacaaggugacccuagccgacgccggcuucaucaagcaguacggcgacugccucggcgacauagccgcccgggaccugaucugcgcccagaaguucaacggccugaccgugcugccuccccugcugaccgacgagaugaucgcccaguacaccagcgcccuguuagccggaaccaucaccagcggcuggacuuucggcgcuggagccgcucugcagauccccuucgccaugcagauggccuaccgguucaacggcaucggcgugacccagaacgugcuguacgagaaccagaagcugaucgccaaccaguucaacagcgccaucggcaagauccaggacagccugagcagcaccgcuagcgcccugggcaagcugcaggacguggugaaccagaacgcccaggcccugaacacccuggugaagcagcugagcagcaacuucggcgccaucagcagcgugcugaacgacauccugagccggcuggacaaggucgaggccgaggugcagaucgaccggcugaucacuggccggcugcagagccugcagaccuacgugacccagcagcugauccgggccgccgagauucgggccagcgccaaccuggccgccaccaagaugagcgagugcgugcugggccagagcaagcggguggacuucugcggcaagggcuaccaccugaugagcuuuccccagagcgcaccccacggagugguguuccugcacgugaccuacgugcccgcccaggagaagaacuucaccaccgccccagccaucugccacgacggcaaggcccacuuuccccgggagggcguguucgugagcaacggcacccacugguucgugacccagcggaacuucuacgagccccagaucaucaccaccgacaacaccuucgugagcggcaacugcgacguggugaucggcaucgugaacaacaccguguacgauccccugcagcccgagcuggacagcuucaaggaggagcuggacaaguacuucaagaaucacaccagccccgacguggaccugggcgacaucagcggcaucaacgccagcguggugaacauccagaaggagaucgaucggcugaacgagguggccaagaaccugaacgagagccugaucgaccugcaggagcugggcaaguacgagcaguacaucaaguggcccugguacaucuggcugggcuucaucgccggccugaucgccaucgugauggugaccaucaugcugugcugcaugaccagcugcugcagcugccugaagggcuguugcagcugcggcagcugcugcaaguucgacgaggacgacagcgagcccgugcugaagggcgugaagcugcacuacaccugaggacuaguuauaagacugacuagcccgaugggccucccaacgggcccuccuccccuccuugcaccgagagaucuaaaaaaaaaaaaaaaaaaaaaaaaaaaaaaaaaaaaaaaaaaaaaaaaaaaaaaaaaaaaaaaaaaaaaaaaaaaaaaaaaaaaaaaaaaaaaaaaaaaa

SEQ ID NO: 25876 - RNA, 4005 nt, Artificial Sequence
  SARS-CoV-2/Wuhan/WIV05/2019__EPI_ISL_402128 spike protein mRNA gc (1-1273)(H69del_V70del_Y453F_D614G_I692V_M1229I)
aggagaaagcuuaccauguucguguuccuggugcugcugccccuggugagcagccagugcgugaaccugaccacccggacccagcugccaccagccuacaccaacagcuucacccggggcgucuacuaccccgacaagguguuccggagcagcguccugcacagcacccaggaccuguuccugcccuucuucagcaacgugaccugguuccacgccaucagcggcaccaacggcaccaagcgguucgacaaccccgugcugcccuucaacgacggcguguacuucgccagcaccgagaagagcaacaucauccggggcuggaucuucggcaccacccuggacagcaagacccagagccugcugaucgugaauaacgccaccaacguggugaucaaggugugcgaguuccaguucugcaacgaccccuuccugggcguguacuaccacaagaacaacaagagcuggauggagagcgaguuccggguguacagcagcgccaacaacugcaccuucgaguacgugagccagcccuuccugauggaccuggagggcaagcagggcaacuucaagaaccugcgggaguucguguucaagaacaucgacggcuacuucaagaucuacagcaagcacaccccaaucaaccuggugcgggaucugccccagggcuucucagcccuggagccccugguggaccugcccaucggcaucaacaucacccgguuccagacccugcuggcccugcaccggagcuaccugaccccaggcgacagcagcagcggguggacagcaggcgcggcugcuuacuacgugggcuaccugcagccccggaccuuccugcugaaguacaacgagaacggcaccaucaccgacgccguggacugcgcccuggacccucugagcgagaccaagugcacccugaagagcuucaccguggagaagggcaucuaccagaccagcaacuuccgggugcagcccaccgagagcaucgugcgguuccccaacaucaccaaccugugccccuucggcgagguguucaacgccacccgguucgccagcguguacgccuggaaccggaagcggaucagcaacugcguggccgacuacagcgugcuguacaacagcgccagcuucagcaccuucaagugcuacggcgugagccccaccaagcugaacgaccugugcuucaccaacguguacgccgacagcuucgugauccguggcgacgaggugcggcagaucgcacccggccagacaggcaagaucgccgacuacaacuacaagcugcccgacgacuucaccggcugcgugaucgccuggaacagcaacaaccucgacagcaaggugggcggcaacuacaacuaccuguuccggcuguuccggaagagcaaccugaagcccuucgagcgggacaucagcaccgagaucuaccaagccggcuccaccccuugcaacggcguggagggcuucaacugcuacuucccucugcagagcuacggcuuccagcccaccaacggcgugggcuaccagcccuaccgggugguggugcugagcuucgagcugcugcacgccccagccaccguguguggccccaagaagagcaccaaccuggugaagaacaagugcgugaacuucaacuucaacggccuuaccggcaccggcgugcugaccgagagcaacaagaaauuccugcccuuucagcaguucggccgggacaucgccgacaccaccgacgcugugcgggauccccagacccuggagauccuggacaucaccccuugcagcuucggcggcgugagcgugaucaccccaggcaccaacaccagcaaccagguggccgugcuguaccagggcgugaacugcaccgaggugcccguggccauccacgccgaccagcugacacccaccuggcgggucuacagcaccggcagcaacguguuccagacccgggccgguugccugaucggcgccgagcacgugaacaacagcuacgagugcgacauccccaucggcgccggcaucugugccagcuaccagacccagaccaauucaccccggagggcaaggagcguggccagccagagcgugaucgccuacaccaugagccugggcgccgagaacagcguggccuacagcaacaacagcaucgccauccccaccaacuucaccaucagcgugaccaccgagauucugcccgugagcaugaccaagaccagcguggacugcaccauguacaucugcggcgacagcaccgagugcagcaaccugcugcugcaguacggcagcuucugcacccagcugaaccgggcccugaccggcaucgccguggagcaggacaagaacacccaggagguguucgcccaggugaagcagaucuacaagaccccucccaucaaggacuucggcggcuucaacuucagccagauccugcccgaccccagcaagcccagcaagcggagcuucaucgaggaccugcuguucaacaaggugacccuagccgacgccggcuucaucaagcaguacggcgacugccucggcgacauagccgcccgggaccugaucugcgcccagaaguucaacggccugaccgugcugccuccccugcugaccgacgagaugaucgcccaguacaccagcgcccuguuagccggaaccaucaccagcggcuggacuuucggcgcuggagccgcucugcagauccccuucgccaugcagauggccuaccgguucaacggcaucggcgugacccagaacgugcuguacgagaaccagaagcugaucgccaaccaguucaacagcgccaucggcaagauccaggacagccugagcagcaccgcuagcgcccugggcaagcugcaggacguggugaaccagaacgcccaggcccugaacacccuggugaagcagcugagcagcaacuucggcgccaucagcagcgugcugaacgacauccugagccggcuggacaaggucgaggccgaggugcagaucgaccggcugaucacuggccggcugcagagccugcagaccuacgugacccagcagcugauccgggccgccgagauucgggccagcgccaaccuggccgccaccaagaugagcgagugcgugcugggccagagcaagcggguggacuucugcggcaagggcuaccaccugaugagcuuuccccagagcgcaccccacggagugguguuccugcacgugaccuacgugcccgcccaggagaagaacuucaccaccgccccagccaucugccacgacggcaaggcccacuuuccccgggagggcguguucgugagcaacggcacccacugguucgugacccagcggaacuucuacgagccccagaucaucaccaccgacaacaccuucgugagcggcaacugcgacguggugaucggcaucgugaacaacaccguguacgauccccugcagcccgagcuggacagcuucaaggaggagcuggacaaguacuucaagaaucacaccagccccgacguggaccugggcgacaucagcggcaucaacgccagcguggugaacauccagaaggagaucgaucggcugaacgagguggccaagaaccugaacgagagccugaucgaccugcaggagcugggcaaguacgagcaguacaucaaguggcccugguacaucuggcugggcuucaucgccggccugaucgccaucgugaucgugaccaucaugcugugcugcaugaccagcugcugcagcugccugaagggcuguugcagcugcggcagcugcugcaaguucgacgaggacgacagcgagcccgugcugaagggcgugaagcugcacuacaccugaggacuaguuauaagacugacuagcccgaugggccucccaacgggcccuccuccccuccuugcaccgagagaucuaaaaaaaaaaaaaaaaaaaaaaaaaaaaaaaaaaaaaaaaaaaaaaaaaaaaaaaaaaaaaaaaaaaaaaaaaaaaaaaaaaaaaaaaaaaaaaaaaaaa

SEQ ID NO: 25877 - RNA, 4002 nt, Artificial Sequence
  SARS-CoV-2/Wuhan/WIV05/2019__EPI_ISL_402128 spike protein mRNA gc (1-1273)(H69del_V70del_Y144del_N501Y_A570D_D614G_P681H_T716I_S982 A_D1118H)
aggagaaagcuuaccauguucguguuccuggugcugcugccccuggugagcagccagugcgugaaccugaccacccggacccagcugccaccagccuacaccaacagcuucacccggggcgucuacuaccccgacaagguguuccggagcagcguccugcacagcacccaggaccuguuccugcccuucuucagcaacgugaccugguuccacgccaucagcggcaccaacggcaccaagcgguucgacaaccccgugcugcccuucaacgacggcguguacuucgccagcaccgagaagagcaacaucauccggggcuggaucuucggcaccacccuggacagcaagacccagagccugcugaucgugaauaacgccaccaacguggugaucaaggugugcgaguuccaguucugcaacgaccccuuccugggcguguaccacaagaacaacaagagcuggauggagagcgaguuccggguguacagcagcgccaacaacugcaccuucgaguacgugagccagcccuuccugauggaccuggagggcaagcagggcaacuucaagaaccugcgggaguucguguucaagaacaucgacggcuacuucaagaucuacagcaagcacaccccaaucaaccuggugcgggaucugccccagggcuucucagcccuggagccccugguggaccugcccaucggcaucaacaucacccgguuccagacccugcuggcccugcaccggagcuaccugaccccaggcgacagcagcagcggguggacagcaggcgcggcugcuuacuacgugggcuaccugcagccccggaccuuccugcugaaguacaacgagaacggcaccaucaccgacgccguggacugcgcccuggacccucugagcgagaccaagugcacccugaagagcuucaccguggagaagggcaucuaccagaccagcaacuuccgggugcagcccaccgagagcaucgugcgguuccccaacaucaccaaccugugccccuucggcgagguguucaacgccacccgguucgccagcguguacgccuggaaccggaagcggaucagcaacugcguggccgacuacagcgugcuguacaacagcgccagcuucagcaccuucaagugcuacggcgugagccccaccaagcugaacgaccugugcuucaccaacguguacgccgacagcuucgugauccguggcgacgaggugcggcagaucgcacccggccagacaggcaagaucgccgacuacaacuacaagcugcccgacgacuucaccggcugcgugaucgccuggaacagcaacaaccucgacagcaaggugggcggcaacuacaacuaccuguaccggcuguuccggaagagcaaccugaagcccuucgagcgggacaucagcaccgagaucuaccaagccggcuccaccccuugcaacggcguggagggcuucaacugcuacuucccucugcagagcuacggcuuccagcccaccuacggcgugggcuaccagcccuaccgggugguggugcugagcuucgagcugcugcacgccccagccaccguguguggccccaagaagagcaccaaccuggugaagaacaagugcgugaacuucaacuucaacggccuuaccggcaccggcgugcugaccgagagcaacaagaaauuccugcccuuucagcaguucggccgggacaucgacgacaccaccgacgcugugcgggauccccagacccuggagauccuggacaucaccccuugcagcuucggcggcgugagcgugaucaccccaggcaccaacaccagcaaccagguggccgugcuguaccagggcgugaacugcaccgaggugcccguggccauccacgccgaccagcugacacccaccuggcgggucuacagcaccggcagcaacguguuccagacccgggccgguugccugaucggcgccgagcacgugaacaacagcuacgagugcgacauccccaucggcgccggcaucugugccagcuaccagacccagaccaauucacaccggagggcaaggagcguggccagccagagcaucaucgccuacaccaugagccugggcgccgagaacagcguggccuacagcaacaacagcaucgccauccccaucaacuucaccaucagcgugaccaccgagauucugcccgugagcaugaccaagaccagcguggacugcaccauguacaucugcggcgacagcaccgagugcagcaaccugcugcugcaguacggcagcuucugcacccagcugaaccgggcccugaccggcaucgccguggagcaggacaagaacacccaggagguguucgcccaggugaagcagaucuacaagaccccucccaucaaggacuucggcggcuucaacuucagccagauccugcccgaccccagcaagcccagcaagcggagcuucaucgaggaccugcuguucaacaaggugacccuagccgacgccggcuucaucaagcaguacggcgacugccucggcgacauagccgcccgggaccugaucugcgcccagaaguucaacggccugaccgugcugccuccccugcugaccgacgagaugaucgcccaguacaccagcgcccuguuagccggaaccaucaccagcggcuggacuuucggcgcuggagccgcucugcagauccccuucgccaugcagauggccuaccgguucaacggcaucggcgugacccagaacgugcuguacgagaaccagaagcugaucgccaaccaguucaacagcgccaucggcaagauccaggacagccugagcagcaccgcuagcgcccugggcaagcugcaggacguggugaaccagaacgcccaggcccugaacacccuggugaagcagcugagcagcaacuucggcgccaucagcagcgugcugaacgacauccuggcccggcuggacaaggucgaggccgaggugcagaucgaccggcugaucacuggccggcugcagagccugcagaccuacgugacccagcagcugauccgggccgccgagauucgggccagcgccaaccuggccgccaccaagaugagcgagugcgugcugggccagagcaagcggguggacuucugcggcaagggcuaccaccugaugagcuuuccccagagcgcaccccacggagugguguuccugcacgugaccuacgugcccgcccaggagaagaacuucaccaccgccccagccaucugccacgacggcaaggcccacuuuccccgggagggcguguucgugagcaacggcacccacugguucgugacccagcggaacuucuacgagccccagaucaucaccacccacaacaccuucgugagcggcaacugcgacguggugaucggcaucgugaacaacaccguguacgauccccugcagcccgagcuggacagcuucaaggaggagcuggacaaguacuucaagaaucacaccagccccgacguggaccugggcgacaucagcggcaucaacgccagcguggugaacauccagaaggagaucgaucggcugaacgagguggccaagaaccugaacgagagccugaucgaccugcaggagcugggcaaguacgagcaguacaucaaguggcccugguacaucuggcugggcuucaucgccggccugaucgccaucgugauggugaccaucaugcugugcugcaugaccagcugcugcagcugccugaagggcuguugcagcugcggcagcugcugcaaguucgacgaggacgacagcgagcccgugcugaagggcgugaagcugcacuacaccugaggacuaguuauaagacugacuagcccgaugggccucccaacgggcccuccuccccuccuugcaccgagagaucuaaaaaaaaaaaaaaaaaaaaaaaaaaaaaaaaaaaaaaaaaaaaaaaaaaaaaaaaaaaaaaaaaaaaaaaaaaaaaaaaaaaaaaaaaaaaaaaaaaaa

SEQ ID NO: 25878 - RNA, 4011 nt, Artificial Sequence
  SARS-CoV-2/Wuhan/WIV05/2019__EPI_ISL_402128 spike protein mRNA gc (1-1273)(K417N_E484K_N501Y_D614G)
aggagaaagcuuaccauguucguguuccuggugcugcugccccuggugagcagccagugcgugaaccugaccacccggacccagcugccaccagccuacaccaacagcuucacccggggcgucuacuaccccgacaagguguuccggagcagcguccugcacagcacccaggaccuguuccugcccuucuucagcaacgugaccugguuccacgccauccacgugagcggcaccaacggcaccaagcgguucgacaaccccgugcugcccuucaacgacggcguguacuucgccagcaccgagaagagcaacaucauccggggcuggaucuucggcaccacccuggacagcaagacccagagccugcugaucgugaauaacgccaccaacguggugaucaaggugugcgaguuccaguucugcaacgaccccuuccugggcguguacuaccacaagaacaacaagagcuggauggagagcgaguuccggguguacagcagcgccaacaacugcaccuucgaguacgugagccagcccuuccugauggaccuggagggcaagcagggcaacuucaagaaccugcgggaguucguguucaagaacaucgacggcuacuucaagaucuacagcaagcacaccccaaucaaccuggugcgggaucugccccagggcuucucagcccuggagccccugguggaccugcccaucggcaucaacaucacccgguuccagacccugcuggcccugcaccggagcuaccugaccccaggcgacagcagcagcggguggacagcaggcgcggcugcuuacuacgugggcuaccugcagccccggaccuuccugcugaaguacaacgagaacggcaccaucaccgacgccguggacugcgcccuggacccucugagcgagaccaagugcacccugaagagcuucaccguggagaagggcaucuaccagaccagcaacuuccgggugcagcccaccgagagcaucgugcgguuccccaacaucaccaaccugugccccuucggcgagguguucaacgccacccgguucgccagcguguacgccuggaaccggaagcggaucagcaacugcguggccgacuacagcgugcuguacaacagcgccagcuucagcaccuucaagugcuacggcgugagccccaccaagcugaacgaccugugcuucaccaacguguacgccgacagcuucgugauccguggcgacgaggugcggcagaucgcacccggccagacaggcaacaucgccgacuacaacuacaagcugcccgacgacuucaccggcugcgugaucgccuggaacagcaacaaccucgacagcaaggugggcggcaacuacaacuaccuguaccggcuguuccggaagagcaaccugaagcccuucgagcgggacaucagcaccgagaucuaccaagccggcuccaccccuugcaacggcgugaagggcuucaacugcuacuucccucugcagagcuacggcuuccagcccaccuacggcgugggcuaccagcccuaccgggugguggugcugagcuucgagcugcugcacgccccagccaccguguguggccccaagaagagcaccaaccuggugaagaacaagugcgugaacuucaacuucaacggccuuaccggcaccggcgugcugaccgagagcaacaagaaauuccugcccuuucagcaguucggccgggacaucgccgacaccaccgacgcugugcgggauccccagacccuggagauccuggacaucaccccuugcagcuucggcggcgugagcgugaucaccccaggcaccaacaccagcaaccagguggccgugcuguaccagggcgugaacugcaccgaggugcccguggccauccacgccgaccagcugacacccaccuggcgggucuacagcaccggcagcaacguguuccagacccgggccgguugccugaucggcgccgagcacgugaacaacagcuacgagugcgacauccccaucggcgccggcaucugugccagcuaccagacccagaccaauucaccccggagggcaaggagcguggccagccagagcaucaucgccuacaccaugagccugggcgccgagaacagcguggccuacagcaacaacagcaucgccauccccaccaacuucaccaucagcgugaccaccgagauucugcccgugagcaugaccaagaccagcguggacugcaccauguacaucugcggcgacagcaccgagugcagcaaccugcugcugcaguacggcagcuucugcacccagcugaaccgggcccugaccggcaucgccguggagcaggacaagaacacccaggagguguucgcccaggugaagcagaucuacaagaccccucccaucaaggacuucggcggcuucaacuucagccagauccugcccgaccccagcaagcccagcaagcggagcuucaucgaggaccugcuguucaacaaggugacccuagccgacgccggcuucaucaagcaguacggcgacugccucggcgacauagccgcccgggaccugaucugcgcccagaaguucaacggccugaccgugcugccuccccugcugaccgacgagaugaucgcccaguacaccagcgcccuguuagccggaaccaucaccagcggcuggacuuucggcgcuggagccgcucugcagauccccuucgccaugcagauggccuaccgguucaacggcaucggcgugacccagaacgugcuguacgagaaccagaagcugaucgccaaccaguucaacagcgccaucggcaagauccaggacagccugagcagcaccgcuagcgcccugggcaagcugcaggacguggugaaccagaacgcccaggcccugaacacccuggugaagcagcugagcagcaacuucggcgccaucagcagcgugcugaacgacauccugagccggcuggacaaggucgaggccgaggugcagaucgaccggcugaucacuggccggcugcagagccugcagaccuacgugacccagcagcugauccgggccgccgagauucgggccagcgccaaccuggccgccaccaagaugagcgagugcgugcugggccagagcaagcggguggacuucugcggcaagggcuaccaccugaugagcuuuccccagagcgcaccccacggagugguguuccugcacgugaccuacgugcccgcccaggagaagaacuucaccaccgccccagccaucugccacgacggcaaggcccacuuuccccgggagggcguguucgugagcaacggcacccacugguucgugacccagcggaacuucuacgagccccagaucaucaccaccgacaacaccuucgugagcggcaacugcgacguggugaucggcaucgugaacaacaccguguacgauccccugcagcccgagcuggacagcuucaaggaggagcuggacaaguacuucaagaaucacaccagccccgacguggaccugggcgacaucagcggcaucaacgccagcguggugaacauccagaaggagaucgaucggcugaacgagguggccaagaaccugaacgagagccugaucgaccugcaggagcugggcaaguacgagcaguacaucaaguggcccugguacaucuggcugggcuucaucgccggccugaucgccaucgugauggugaccaucaugcugugcugcaugaccagcugcugcagcugccugaagggcuguugcagcugcggcagcugcugcaaguucgacgaggacgacagcgagcccgugcugaagggcgugaagcugcacuacaccugaggacuaguuauaagacugacuagcccgaugggccucccaacgggcccuccuccccuccuugcaccgagagaucuaaaaaaaaaaaaaaaaaaaaaaaaaaaaaaaaaaaaaaaaaaaaaaaaaaaaaaaaaaaaaaaaaaaaaaaaaaaaaaaaaaaaaaaaaaaaaaaaaaaa

SEQ ID NO: 25879 - RNA, 4002 nt, Artificial Sequence
  SARS-CoV-2/Wuhan/WIV05/2019__EPI_ISL_402128 spike protein mRNA gc (1-1273)(L18F_D80A_D215G_L242del_A243del_L244del_R246I_K417N_E484 K_N501Y_D614G_A701V)
aggagaaagcuuaccauguucguguuccuggugcugcugccccuggugagcagccagugcgugaacuucaccacccggacccagcugccaccagccuacaccaacagcuucacccggggcgucuacuaccccgacaagguguuccggagcagcguccugcacagcacccaggaccuguuccugcccuucuucagcaacgugaccugguuccacgccauccacgugagcggcaccaacggcaccaagcgguucgccaaccccgugcugcccuucaacgacggcguguacuucgccagcaccgagaagagcaacaucauccggggcuggaucuucggcaccacccuggacagcaagacccagagccugcugaucgugaauaacgccaccaacguggugaucaaggugugcgaguuccaguucugcaacgaccccuuccugggcguguacuaccacaagaacaacaagagcuggauggagagcgaguuccggguguacagcagcgccaacaacugcaccuucgaguacgugagccagcccuuccugauggaccuggagggcaagcagggcaacuucaagaaccugcgggaguucguguucaagaacaucgacggcuacuucaagaucuacagcaagcacaccccaaucaaccuggugcggggccugccccagggcuucucagcccuggagccccugguggaccugcccaucggcaucaacaucacccgguuccagacccugcacaucagcuaccugaccccaggcgacagcagcagcggguggacagcaggcgcggcugcuuacuacgugggcuaccugcagccccggaccuuccugcugaaguacaacgagaacggcaccaucaccgacgccguggacugcgcccuggacccucugagcgagaccaagugcacccugaagagcuucaccguggagaagggcaucuaccagaccagcaacuuccgggugcagcccaccgagagcaucgugcgguuccccaacaucaccaaccugugccccuucggcgagguguucaacgccacccgguucgccagcguguacgccuggaaccggaagcggaucagcaacugcguggccgacuacagcgugcuguacaacagcgccagcuucagcaccuucaagugcuacggcgugagccccaccaagcugaacgaccugugcuucaccaacguguacgccgacagcuucgugauccguggcgacgaggugcggcagaucgcacccggccagacaggcaacaucgccgacuacaacuacaagcugcccgacgacuucaccggcugcgugaucgccuggaacagcaacaaccucgacagcaaggugggcggcaacuacaacuaccuguaccggcuguuccggaagagcaaccugaagcccuucgagcgggacaucagcaccgagaucuaccaagccggcuccaccccuugcaacggcgugaagggcuucaacugcuacuucccucugcagagcuacggcuuccagcccaccuacggcgugggcuaccagcccuaccgggugguggugcugagcuucgagcugcugcacgccccagccaccguguguggccccaagaagagcaccaaccuggugaagaacaagugcgugaacuucaacuucaacggccuuaccggcaccggcgugcugaccgagagcaacaagaaauuccugcccuuucagcaguucggccgggacaucgccgacaccaccgacgcugugcgggauccccagacccuggagauccuggacaucaccccuugcagcuucggcggcgugagcgugaucaccccaggcaccaacaccagcaaccagguggccgugcuguaccagggcgugaacugcaccgaggugcccguggccauccacgccgaccagcugacacccaccuggcgggucuacagcaccggcagcaacguguuccagacccgggccgguugccugaucggcgccgagcacgugaacaacagcuacgagugcgacauccccaucggcgccggcaucugugccagcuaccagacccagaccaauucaccccggagggcaaggagcguggccagccagagcaucaucgccuacaccaugagccugggcguggagaacagcguggccuacagcaacaacagcaucgccauccccaccaacuucaccaucagcgugaccaccgagauucugcccgugagcaugaccaagaccagcguggacugcaccauguacaucugcggcgacagcaccgagugcagcaaccugcugcugcaguacggcagcuucugcacccagcugaaccgggcccugaccggcaucgccguggagcaggacaagaacacccaggagguguucgcccaggugaagcagaucuacaagaccccucccaucaaggacuucggcggcuucaacuucagccagauccugcccgaccccagcaagcccagcaagcggagcuucaucgaggaccugcuguucaacaaggugacccuagccgacgccggcuucaucaagcaguacggcgacugccucggcgacauagccgcccgggaccugaucugcgcccagaaguucaacggccugaccgugcugccuccccugcugaccgacgagaugaucgcccaguacaccagcgcccuguuagccggaaccaucaccagcggcuggacuuucggcgcuggagccgcucugcagauccccuucgccaugcagauggccuaccgguucaacggcaucggcgugacccagaacgugcuguacgagaaccagaagcugaucgccaaccaguucaacagcgccaucggcaagauccaggacagccugagcagcaccgcuagcgcccugggcaagcugcaggacguggugaaccagaacgcccaggcccugaacacccuggugaagcagcugagcagcaacuucggcgccaucagcagcgugcugaacgacauccugagccggcuggacaaggucgaggccgaggugcagaucgaccggcugaucacuggccggcugcagagccugcagaccuacgugacccagcagcugauccgggccgccgagauucgggccagcgccaaccuggccgccaccaagaugagcgagugcgugcugggccagagcaagcggguggacuucugcggcaagggcuaccaccugaugagcuuuccccagagcgcaccccacggagugguguuccugcacgugaccuacgugcccgcccaggagaagaacuucaccaccgccccagccaucugccacgacggcaaggcccacuuuccccgggagggcguguucgugagcaacggcacccacugguucgugacccagcggaacuucuacgagccccagaucaucaccaccgacaacaccuucgugagcggcaacugcgacguggugaucggcaucgugaacaacaccguguacgauccccugcagcccgagcuggacagcuucaaggaggagcuggacaaguacuucaagaaucacaccagccccgacguggaccugggcgacaucagcggcaucaacgccagcguggugaacauccagaaggagaucgaucggcugaacgagguggccaagaaccugaacgagagccugaucgaccugcaggagcugggcaaguacgagcaguacaucaaguggcccugguacaucuggcugggcuucaucgccggccugaucgccaucgugauggugaccaucaugcugugcugcaugaccagcugcugcagcugccugaagggcuguugcagcugcggcagcugcugcaaguucgacgaggacgacagcgagcccgugcugaagggcgugaagcugcacuacaccugaggacuaguuauaagacugacuagcccgaugggccucccaacgggcccuccuccccuccuugcaccgagagaucuaaaaaaaaaaaaaaaaaaaaaaaaaaaaaaaaaaaaaaaaaaaaaaaaaaaaaaaaaaaaaaaaaaaaaaaaaaaaaaaaaaaaaaaaaaaaaaaaaaaa

SEQ ID NO: 25880 - RNA, 4011 nt, Artificial Sequence
  SARS-CoV-2/Wuhan/WIV05/2019__EPI_ISL_402128 spike protein mRNA gc (1-1273)(E484K_D614G)
aggagaaagcuuaccauguucguguuccuggugcugcugccccuggugagcagccagugcgugaaccugaccacccggacccagcugccaccagccuacaccaacagcuucacccggggcgucuacuaccccgacaagguguuccggagcagcguccugcacagcacccaggaccuguuccugcccuucuucagcaacgugaccugguuccacgccauccacgugagcggcaccaacggcaccaagcgguucgacaaccccgugcugcccuucaacgacggcguguacuucgccagcaccgagaagagcaacaucauccggggcuggaucuucggcaccacccuggacagcaagacccagagccugcugaucgugaauaacgccaccaacguggugaucaaggugugcgaguuccaguucugcaacgaccccuuccugggcguguacuaccacaagaacaacaagagcuggauggagagcgaguuccggguguacagcagcgccaacaacugcaccuucgaguacgugagccagcccuuccugauggaccuggagggcaagcagggcaacuucaagaaccugcgggaguucguguucaagaacaucgacggcuacuucaagaucuacagcaagcacaccccaaucaaccuggugcgggaucugccccagggcuucucagcccuggagccccugguggaccugcccaucggcaucaacaucacccgguuccagacccugcuggcccugcaccggagcuaccugaccccaggcgacagcagcagcggguggacagcaggcgcggcugcuuacuacgugggcuaccugcagccccggaccuuccugcugaaguacaacgagaacggcaccaucaccgacgccguggacugcgcccuggacccucugagcgagaccaagugcacccugaagagcuucaccguggagaagggcaucuaccagaccagcaacuuccgggugcagcccaccgagagcaucgugcgguuccccaacaucaccaaccugugccccuucggcgagguguucaacgccacccgguucgccagcguguacgccuggaaccggaagcggaucagcaacugcguggccgacuacagcgugcuguacaacagcgccagcuucagcaccuucaagugcuacggcgugagccccaccaagcugaacgaccugugcuucaccaacguguacgccgacagcuucgugauccguggcgacgaggugcggcagaucgcacccggccagacaggcaagaucgccgacuacaacuacaagcugcccgacgacuucaccggcugcgugaucgccuggaacagcaacaaccucgacagcaaggugggcggcaacuacaacuaccuguaccggcuguuccggaagagcaaccugaagcccuucgagcgggacaucagcaccgagaucuaccaagccggcuccaccccuugcaacggcgugaagggcuucaacugcuacuucccucugcagagcuacggcuuccagcccaccaacggcgugggcuaccagcccuaccgggugguggugcugagcuucgagcugcugcacgccccagccaccguguguggccccaagaagagcaccaaccuggugaagaacaagugcgugaacuucaacuucaacggccuuaccggcaccggcgugcugaccgagagcaacaagaaauuccugcccuuucagcaguucggccgggacaucgccgacaccaccgacgcugugcgggauccccagacccuggagauccuggacaucaccccuugcagcuucggcggcgugagcgugaucaccccaggcaccaacaccagcaaccagguggccgugcuguaccagggcgugaacugcaccgaggugcccguggccauccacgccgaccagcugacacccaccuggcgggucuacagcaccggcagcaacguguuccagacccgggccgguugccugaucggcgccgagcacgugaacaacagcuacgagugcgacauccccaucggcgccggcaucugugccagcuaccagacccagaccaauucaccccggagggcaaggagcguggccagccagagcaucaucgccuacaccaugagccugggcgccgagaacagcguggccuacagcaacaacagcaucgccauccccaccaacuucaccaucagcgugaccaccgagauucugcccgugagcaugaccaagaccagcguggacugcaccauguacaucugcggcgacagcaccgagugcagcaaccugcugcugcaguacggcagcuucugcacccagcugaaccgggcccugaccggcaucgccguggagcaggacaagaacacccaggagguguucgcccaggugaagcagaucuacaagaccccucccaucaaggacuucggcggcuucaacuucagccagauccugcccgaccccagcaagcccagcaagcggagcuucaucgaggaccugcuguucaacaaggugacccuagccgacgccggcuucaucaagcaguacggcgacugccucggcgacauagccgcccgggaccugaucugcgcccagaaguucaacggccugaccgugcugccuccccugcugaccgacgagaugaucgcccaguacaccagcgcccuguuagccggaaccaucaccagcggcuggacuuucggcgcuggagccgcucugcagauccccuucgccaugcagauggccuaccgguucaacggcaucggcgugacccagaacgugcuguacgagaaccagaagcugaucgccaaccaguucaacagcgccaucggcaagauccaggacagccugagcagcaccgcuagcgcccugggcaagcugcaggacguggugaaccagaacgcccaggcccugaacacccuggugaagcagcugagcagcaacuucggcgccaucagcagcgugcugaacgacauccugagccggcuggacaaggucgaggccgaggugcagaucgaccggcugaucacuggccggcugcagagccugcagaccuacgugacccagcagcugauccgggccgccgagauucgggccagcgccaaccuggccgccaccaagaugagcgagugcgugcugggccagagcaagcggguggacuucugcggcaagggcuaccaccugaugagcuuuccccagagcgcaccccacggagugguguuccugcacgugaccuacgugcccgcccaggagaagaacuucaccaccgccccagccaucugccacgacggcaaggcccacuuuccccgggagggcguguucgugagcaacggcacccacugguucgugacccagcggaacuucuacgagccccagaucaucaccaccgacaacaccuucgugagcggcaacugcgacguggugaucggcaucgugaacaacaccguguacgauccccugcagcccgagcuggacagcuucaaggaggagcuggacaaguacuucaagaaucacaccagccccgacguggaccugggcgacaucagcggcaucaacgccagcguggugaacauccagaaggagaucgaucggcugaacgagguggccaagaaccugaacgagagccugaucgaccugcaggagcugggcaaguacgagcaguacaucaaguggcccugguacaucuggcugggcuucaucgccggccugaucgccaucgugauggugaccaucaugcugugcugcaugaccagcugcugcagcugccugaagggcuguugcagcugcggcagcugcugcaaguucgacgaggacgacagcgagcccgugcugaagggcgugaagcugcacuacaccugaggacuaguuauaagacugacuagcccgaugggccucccaacgggcccuccuccccuccuugcaccgagagaucuaaaaaaaaaaaaaaaaaaaaaaaaaaaaaaaaaaaaaaaaaaaaaaaaaaaaaaaaaaaaaaaaaaaaaaaaaaaaaaaaaaaaaaaaaaaaaaaaaaaa

SEQ ID NO: 25881 - RNA, 4011 nt, Artificial Sequence
  SARS-CoV-2/Wuhan/WIV05/2019__EPI_ISL_402128 spike protein mRNA gc (1-1273)(L18F_T20N_P26S_D138Y_R190S_K417T_E484K_N501Y_D614G_H655Y _T1027I)
aggagaaagcuuaccauguucguguuccuggugcugcugccccuggugagcagccagugcgugaacuucaccaaccggacccagcugccaagcgccuacaccaacagcuucacccggggcgucuacuaccccgacaagguguuccggagcagcguccugcacagcacccaggaccuguuccugcccuucuucagcaacgugaccugguuccacgccauccacgugagcggcaccaacggcaccaagcgguucgacaaccccgugcugcccuucaacgacggcguguacuucgccagcaccgagaagagcaacaucauccggggcuggaucuucggcaccacccuggacagcaagacccagagccugcugaucgugaauaacgccaccaacguggugaucaaggugugcgaguuccaguucugcaacuaccccuuccugggcguguacuaccacaagaacaacaagagcuggauggagagcgaguuccggguguacagcagcgccaacaacugcaccuucgaguacgugagccagcccuuccugauggaccuggagggcaagcagggcaacuucaagaaccugagcgaguucguguucaagaacaucgacggcuacuucaagaucuacagcaagcacaccccaaucaaccuggugcgggaucugccccagggcuucucagcccuggagccccugguggaccugcccaucggcaucaacaucacccgguuccagacccugcuggcccugcaccggagcuaccugaccccaggcgacagcagcagcggguggacagcaggcgcggcugcuuacuacgugggcuaccugcagccccggaccuuccugcugaaguacaacgagaacggcaccaucaccgacgccguggacugcgcccuggacccucugagcgagaccaagugcacccugaagagcuucaccguggagaagggcaucuaccagaccagcaacuuccgggugcagcccaccgagagcaucgugcgguuccccaacaucaccaaccugugccccuucggcgagguguucaacgccacccgguucgccagcguguacgccuggaaccggaagcggaucagcaacugcguggccgacuacagcgugcuguacaacagcgccagcuucagcaccuucaagugcuacggcgugagccccaccaagcugaacgaccugugcuucaccaacguguacgccgacagcuucgugauccguggcgacgaggugcggcagaucgcacccggccagacaggcaccaucgccgacuacaacuacaagcugcccgacgacuucaccggcugcgugaucgccuggaacagcaacaaccucgacagcaaggugggcggcaacuacaacuaccuguaccggcuguuccggaagagcaaccugaagcccuucgagcgggacaucagcaccgagaucuaccaagccggcuccaccccuugcaacggcgugaagggcuucaacugcuacuucccucugcagagcuacggcuuccagcccaccuacggcgugggcuaccagcccuaccgggugguggugcugagcuucgagcugcugcacgccccagccaccguguguggccccaagaagagcaccaaccuggugaagaacaagugcgugaacuucaacuucaacggccuuaccggcaccggcgugcugaccgagagcaacaagaaauuccugcccuuucagcaguucggccgggacaucgccgacaccaccgacgcugugcgggauccccagacccuggagauccuggacaucaccccuugcagcuucggcggcgugagcgugaucaccccaggcaccaacaccagcaaccagguggccgugcuguaccagggcgugaacugcaccgaggugcccguggccauccacgccgaccagcugacacccaccuggcgggucuacagcaccggcagcaacguguuccagacccgggccgguugccugaucggcgccgaguacgugaacaacagcuacgagugcgacauccccaucggcgccggcaucugugccagcuaccagacccagaccaauucaccccggagggcaaggagcguggccagccagagcaucaucgccuacaccaugagccugggcgccgagaacagcguggccuacagcaacaacagcaucgccauccccaccaacuucaccaucagcgugaccaccgagauucugcccgugagcaugaccaagaccagcguggacugcaccauguacaucugcggcgacagcaccgagugcagcaaccugcugcugcaguacggcagcuucugcacccagcugaaccgggcccugaccggcaucgccguggagcaggacaagaacacccaggagguguucgcccaggugaagcagaucuacaagaccccucccaucaaggacuucggcggcuucaacuucagccagauccugcccgaccccagcaagcccagcaagcggagcuucaucgaggaccugcuguucaacaaggugacccuagccgacgccggcuucaucaagcaguacggcgacugccucggcgacauagccgcccgggaccugaucugcgcccagaaguucaacggccugaccgugcugccuccccugcugaccgacgagaugaucgcccaguacaccagcgcccuguuagccggaaccaucaccagcggcuggacuuucggcgcuggagccgcucugcagauccccuucgccaugcagauggccuaccgguucaacggcaucggcgugacccagaacgugcuguacgagaaccagaagcugaucgccaaccaguucaacagcgccaucggcaagauccaggacagccugagcagcaccgcuagcgcccugggcaagcugcaggacguggugaaccagaacgcccaggcccugaacacccuggugaagcagcugagcagcaacuucggcgccaucagcagcgugcugaacgacauccugagccggcuggacaaggucgaggccgaggugcagaucgaccggcugaucacuggccggcugcagagccugcagaccuacgugacccagcagcugauccgggccgccgagauucgggccagcgccaaccuggccgccaucaagaugagcgagugcgugcugggccagagcaagcggguggacuucugcggcaagggcuaccaccugaugagcuuuccccagagcgcaccccacggagugguguuccugcacgugaccuacgugcccgcccaggagaagaacuucaccaccgccccagccaucugccacgacggcaaggcccacuuuccccgggagggcguguucgugagcaacggcacccacugguucgugacccagcggaacuucuacgagccccagaucaucaccaccgacaacaccuucgugagcggcaacugcgacguggugaucggcaucgugaacaacaccguguacgauccccugcagcccgagcuggacagcuucaaggaggagcuggacaaguacuucaagaaucacaccagccccgacguggaccugggcgacaucagcggcaucaacgccagcguggugaacauccagaaggagaucgaucggcugaacgagguggccaagaaccugaacgagagccugaucgaccugcaggagcugggcaaguacgagcaguacaucaaguggcccugguacaucuggcugggcuucaucgccggccugaucgccaucgugauggugaccaucaugcugugcugcaugaccagcugcugcagcugccugaagggcuguugcagcugcggcagcugcugcaaguucgacgaggacgacagcgagcccgugcugaagggcgugaagcugcacuacaccugaggacuaguuauaagacugacuagcccgaugggccucccaacgggcccuccuccccuccuugcaccgagagaucuaaaaaaaaaaaaaaaaaaaaaaaaaaaaaaaaaaaaaaaaaaaaaaaaaaaaaaaaaaaaaaaaaaaaaaaaaaaaaaaaaaaaaaaaaaaaaaaaaaaa

SEQ ID NO: 25882 - RNA, 4011 nt, Artificial Sequence
  SARS-CoV-2/Wuhan/WIV05/2019__EPI_ISL_402128 spike protein mRNA gc (1-1273)(S13I_W152C_L452R_D614G)
aggagaaagcuuaccauguucguguuccuggugcugcugccccuggugagcauccagugcgugaaccugaccacccggacccagcugccaccagccuacaccaacagcuucacccggggcgucuacuaccccgacaagguguuccggagcagcguccugcacagcacccaggaccuguuccugcccuucuucagcaacgugaccugguuccacgccauccacgugagcggcaccaacggcaccaagcgguucgacaaccccgugcugcccuucaacgacggcguguacuucgccagcaccgagaagagcaacaucauccggggcuggaucuucggcaccacccuggacagcaagacccagagccugcugaucgugaauaacgccaccaacguggugaucaaggugugcgaguuccaguucugcaacgaccccuuccugggcguguacuaccacaagaacaacaagagcugcauggagagcgaguuccggguguacagcagcgccaacaacugcaccuucgaguacgugagccagcccuuccugauggaccuggagggcaagcagggcaacuucaagaaccugcgggaguucguguucaagaacaucgacggcuacuucaagaucuacagcaagcacaccccaaucaaccuggugcgggaucugccccagggcuucucagcccuggagccccugguggaccugcccaucggcaucaacaucacccgguuccagacccugcuggcccugcaccggagcuaccugaccccaggcgacagcagcagcggguggacagcaggcgcggcugcuuacuacgugggcuaccugcagccccggaccuuccugcugaaguacaacgagaacggcaccaucaccgacgccguggacugcgcccuggacccucugagcgagaccaagugcacccugaagagcuucaccguggagaagggcaucuaccagaccagcaacuuccgggugcagcccaccgagagcaucgugcgguuccccaacaucaccaaccugugccccuucggcgagguguucaacgccacccgguucgccagcguguacgccuggaaccggaagcggaucagcaacugcguggccgacuacagcgugcuguacaacagcgccagcuucagcaccuucaagugcuacggcgugagccccaccaagcugaacgaccugugcuucaccaacguguacgccgacagcuucgugauccguggcgacgaggugcggcagaucgcacccggccagacaggcaagaucgccgacuacaacuacaagcugcccgacgacuucaccggcugcgugaucgccuggaacagcaacaaccucgacagcaaggugggcggcaacuacaacuaccgcuaccggcuguuccggaagagcaaccugaagcccuucgagcgggacaucagcaccgagaucuaccaagccggcuccaccccuugcaacggcguggagggcuucaacugcuacuucccucugcagagcuacggcuuccagcccaccaacggcgugggcuaccagcccuaccgggugguggugcugagcuucgagcugcugcacgccccagccaccguguguggccccaagaagagcaccaaccuggugaagaacaagugcgugaacuucaacuucaacggccuuaccggcaccggcgugcugaccgagagcaacaagaaauuccugcccuuucagcaguucggccgggacaucgccgacaccaccgacgcugugcgggauccccagacccuggagauccuggacaucaccccuugcagcuucggcggcgugagcgugaucaccccaggcaccaacaccagcaaccagguggccgugcuguaccagggcgugaacugcaccgaggugcccguggccauccacgccgaccagcugacacccaccuggcgggucuacagcaccggcagcaacguguuccagacccgggccgguugccugaucggcgccgagcacgugaacaacagcuacgagugcgacauccccaucggcgccggcaucugugccagcuaccagacccagaccaauucaccccggagggcaaggagcguggccagccagagcaucaucgccuacaccaugagccugggcgccgagaacagcguggccuacagcaacaacagcaucgccauccccaccaacuucaccaucagcgugaccaccgagauucugcccgugagcaugaccaagaccagcguggacugcaccauguacaucugcggcgacagcaccgagugcagcaaccugcugcugcaguacggcagcuucugcacccagcugaaccgggcccugaccggcaucgccguggagcaggacaagaacacccaggagguguucgcccaggugaagcagaucuacaagaccccucccaucaaggacuucggcggcuucaacuucagccagauccugcccgaccccagcaagcccagcaagcggagcuucaucgaggaccugcuguucaacaaggugacccuagccgacgccggcuucaucaagcaguacggcgacugccucggcgacauagccgcccgggaccugaucugcgcccagaaguucaacggccugaccgugcugccuccccugcugaccgacgagaugaucgcccaguacaccagcgcccuguuagccggaaccaucaccagcggcuggacuuucggcgcuggagccgcucugcagauccccuucgccaugcagauggccuaccgguucaacggcaucggcgugacccagaacgugcuguacgagaaccagaagcugaucgccaaccaguucaacagcgccaucggcaagauccaggacagccugagcagcaccgcuagcgcccugggcaagcugcaggacguggugaaccagaacgcccaggcccugaacacccuggugaagcagcugagcagcaacuucggcgccaucagcagcgugcugaacgacauccugagccggcuggacaaggucgaggccgaggugcagaucgaccggcugaucacuggccggcugcagagccugcagaccuacgugacccagcagcugauccgggccgccgagauucgggccagcgccaaccuggccgccaccaagaugagcgagugcgugcugggccagagcaagcggguggacuucugcggcaagggcuaccaccugaugagcuuuccccagagcgcaccccacggagugguguuccugcacgugaccuacgugcccgcccaggagaagaacuucaccaccgccccagccaucugccacgacggcaaggcccacuuuccccgggagggcguguucgugagcaacggcacccacugguucgugacccagcggaacuucuacgagccccagaucaucaccaccgacaacaccuucgugagcggcaacugcgacguggugaucggcaucgugaacaacaccguguacgauccccugcagcccgagcuggacagcuucaaggaggagcuggacaaguacuucaagaaucacaccagccccgacguggaccugggcgacaucagcggcaucaacgccagcguggugaacauccagaaggagaucgaucggcugaacgagguggccaagaaccugaacgagagccugaucgaccugcaggagcugggcaaguacgagcaguacaucaaguggcccugguacaucuggcugggcuucaucgccggccugaucgccaucgugauggugaccaucaugcugugcugcaugaccagcugcugcagcugccugaagggcuguugcagcugcggcagcugcugcaaguucgacgaggacgacagcgagcccgugcugaagggcgugaagcugcacuacaccugaggacuaguuauaagacugacuagcccgaugggccucccaacgggcccuccuccccuccuugcaccgagagaucuaaaaaaaaaaaaaaaaaaaaaaaaaaaaaaaaaaaaaaaaaaaaaaaaaaaaaaaaaaaaaaaaaaaaaaaaaaaaaaaaaaaaaaaaaaaaaaaaaaaa

SEQ ID NO: 25883 - RNA, 4011 nt, Artificial Sequence
  SARS-CoV-2/Wuhan/WIV05/2019__EPI_ISL_402128 spike protein mRNA gc (1-1273)
aggagaaagcuuaccauguucguguuccuggugcugcugccccuggugagcagccagugcgugaaccugaccacccggacccagcugcccccugccuacaccaacagcuucacccggggcguguacuaccccgacaagguguuccggagcagcgugcugcacagcacccaggaccuguuccugcccuucuucagcaacgugaccugguuccacgccauccacgugagcggcaccaacggcaccaagcgguucgacaacccagugcugcccuucaacgacggcguguacuucgccagcaccgagaagucaaacaucauccggggcuggaucuucggcaccacccuggacagcaagacacagagccugcugaucgugaacaacgccaccaacguggugaucaaggugugcgaguuucaguucugcaacgaccccuuccugggcguguacuaccacaagaacaacaagagcuggauggagagcgaguuccgggucuacagcagcgcuaacaauugcaccuucgaguacgugagccagcccuuccugauggaccucgagggcaagcagggcaacuucaagaaccugcgggaguucguguucaagaacaucgauggcuacuucaagaucuacagcaagcacacccccaucaaccuggugcgggaccugccccagggauucagcgcccuggagccucugguggaccugcccaucggcaucaacaucaccagguuccagacccugcuggcccugcaccggagcuaccugacccccggcgacagcagcagcggcuggaccgccggcgccgccgcauacuacgugggcuaccugcagccacggaccuuccugcugaaguacaacgagaacggcaccaucaccgacgccguggacugcgcccuggacccccugagcgagaccaagugcacccuaaagagcuucaccguggagaagggcaucuaccagaccagcaacuuccgggugcagcccacugagagcaucgugcgguuccccaacauuaccaaccugugucccuucggcgagguguucaacgccacccgguucgccagcguguacgccuggaaccggaagcggaucagcaacugcguggccgacuacagcgugcuguacaacagcgccagcuucagcaccuucaagugcuacggcgugagcccuaccaagcugaacgaccugugcuucaccaacguguacgcugacagcuucgugauccggggcgacgaggugcggcagaucgcccccggccagaccggcaagaucgccgacuacaacuacaagcugcccgacgacuucaccggcugcgugaucgccuggaacagcaacaaccuggacagcaaggugggcggcaacuacaacuaccuguaccggcuguuccguaagagcaaccugaagccauucgagcgggacaucagcaccgagaucuaccaggccggcagcacccccugcaacgguguggagggcuuuaacugcuacuucccccugcagagcuacggcuuccagcccaccaacggcgugggcuaccagcccuaccgggugguggugcugagcuucgagcugcugcacgcccccgccaccgugugcggcccuaaaaagagcaccaaccuggugaagaacaagugcgugaacuucaauuucaacggccugaccggcaccggcgugcugaccgagagcaacaagaaguuccugcccuuccagcaguucggccgggauaucgccgacaccaccgacgcagugcgggacccccagacccuggagauccuggacaucaccccaugcagcuucggcggcgugagcgucaucacccccggcacaaacaccagcaaccagguggccgugcuguaccaggacgugaacugcaccgaggugcccguggccauccacgccgaccagcugacccccaccuggcggguguacagcaccggaagcaacguguuccagacccgggccggcugccugaucggcgccgagcacgugaacaacuccuacgagugcgacauccccaucggcgcuggcaucugcgccagcuaccagacccagaccaacagcccccggcgggcccggagcguggccagccagagcaucaucgccuacaccaugagcuuaggcgccgagaacagcguggccuacagcaacaacagcaucgcgaucccuaccaacuucaccaucagcgugaccaccgagauacugcccgugagcaugaccaagaccagcguggacuguaccauguacaucugcggcgacagcaccgagugcagcaaccugcugcugcaguacggcagcuucugcacccagcugaaccgggcccugaccggcaucgccguggagcaggacaagaacacccaagagguguucgcccaggugaagcagaucuacaagacucccccaaucaaggacuucggcggcuucaacuucagccagauccugcccgaccccagcaagcccagcaagcggagcuucaucgaggaccugcuguucaacaaggugacccuggccgacgccggcuucaucaagcaguacggcgauugccugggcgacaucgccgcucgggaccugaucugcgcccagaaguucaacgggcugaccgugcugcccccucugcugaccgacgagaugaucgcccaguacaccagcgcccugcuugccggcaccaucaccagcggcuggaccuucggcgccggcgcagcccugcagauccccuucgccaugcagauggccuaccgguucaacggcaucggcgugacccagaacgugcuguacgagaaccagaagcugaucgccaaccaguucaacagcgccaucggcaagauccaggacagccugagcagcaccgccagcgcccugggcaagcugcaggacguggugaaccagaacgcucaggcccugaacacccuggugaagcagcugagcagcaacuucggcgccaucagcucagugcugaaugacauccugagcaggcuggacaagguggaggccgaggugcagaucgaccggcugaucaccggccggcugcagagccugcagaccuacgugacccagcagcugauccgggccgccgagauccgggccagcgccaaccuggcagccaccaagaugagcgagugcgugcugggccagagcaagcggguggacuuuugcggcaagggcuaccaccugaugagcuucccccagagcgccccacacggcgugguguuccuccacgucacauacgugcccgcccaggagaagaacuucaccaccgcccccgccauuugccacgacggcaaggcucacuucccccgggagggcguguucgugagcaacggaacccacugguucgugacccagcggaacuucuacgagccccagaucaucaccaccgacaacaccuucgugagcggcaacugcgacguggugaucggcaucgugaacaacaccguguacgacccccugcagccugagcuggacagcuucaaggaggagcuggacaaguacuucaagaaccacaccagccccgauguggaccugggcgacaucagcggcaucaacgccagcguggugaacauccagaaggagaucgaccggcugaacgagguggccaagaaccugaacgagagccugaucgaccugcaggagcugggcaaguacgagcaguacaucaaguggcccugguacaucuggcugggcuucaucgccggccugaucgccaucgugauggugaccaucaugcugugcugcaugaccagcugcuguagcugccugaagggcugcugcagcugcggcagcugcugcaaguucgacgaggacgacagcgagccagugcugaagggcgugaagcugcacuacaccugaggacuaguuauaagacugacuagcccgaugggccucccaacgggcccuccuccccuccuugcaccgagagaucuaaaaaaaaaaaaaaaaaaaaaaaaaaaaaaaaaaaaaaaaaaaaaaaaaaaaaaaaaaaaaaaaaaaaaaaaaaaaaaaaaaaaaaaaaaaaaaaaaaaa

SEQ ID NO: 25884 - RNA, 4011 nt, Artificial Sequence
  SARS-CoV-2/Wuhan/WIV05/2019__EPI_ISL_402128 spike protein mRNA gc (1-1273)(D614G)
aggagaaagcuuaccauguucguguuccuggugcugcugccccuggugagcagccagugcgugaaccugaccacccggacccagcugcccccugccuacaccaacagcuucacccggggcguguacuaccccgacaagguguuccggagcagcgugcugcacagcacccaggaccuguuccugcccuucuucagcaacgugaccugguuccacgccauccacgugagcggcaccaacggcaccaagcgguucgacaacccagugcugcccuucaacgacggcguguacuucgccagcaccgagaagucaaacaucauccggggcuggaucuucggcaccacccuggacagcaagacacagagccugcugaucgugaacaacgccaccaacguggugaucaaggugugcgaguuucaguucugcaacgaccccuuccugggcguguacuaccacaagaacaacaagagcuggauggagagcgaguuccgggucuacagcagcgcuaacaauugcaccuucgaguacgugagccagcccuuccugauggaccucgagggcaagcagggcaacuucaagaaccugcgggaguucguguucaagaacaucgauggcuacuucaagaucuacagcaagcacacccccaucaaccuggugcgggaccugccccagggauucagcgcccuggagccucugguggaccugcccaucggcaucaacaucaccagguuccagacccugcuggcccugcaccggagcuaccugacccccggcgacagcagcagcggcuggaccgccggcgccgccgcauacuacgugggcuaccugcagccacggaccuuccugcugaaguacaacgagaacggcaccaucaccgacgccguggacugcgcccuggacccccugagcgagaccaagugcacccuaaagagcuucaccguggagaagggcaucuaccagaccagcaacuuccgggugcagcccacugagagcaucgugcgguuccccaacauuaccaaccugugucccuucggcgagguguucaacgccacccgguucgccagcguguacgccuggaaccggaagcggaucagcaacugcguggccgacuacagcgugcuguacaacagcgccagcuucagcaccuucaagugcuacggcgugagcccuaccaagcugaacgaccugugcuucaccaacguguacgcugacagcuucgugauccggggcgacgaggugcggcagaucgcccccggccagaccggcaagaucgccgacuacaacuacaagcugcccgacgacuucaccggcugcgugaucgccuggaacagcaacaaccuggacagcaaggugggcggcaacuacaacuaccuguaccggcuguuccguaagagcaaccugaagccauucgagcgggacaucagcaccgagaucuaccaggccggcagcacccccugcaacgguguggagggcuuuaacugcuacuucccccugcagagcuacggcuuccagcccaccaacggcgugggcuaccagcccuaccgggugguggugcugagcuucgagcugcugcacgcccccgccaccgugugcggcccuaaaaagagcaccaaccuggugaagaacaagugcgugaacuucaauuucaacggccugaccggcaccggcgugcugaccgagagcaacaagaaguuccugcccuuccagcaguucggccgggauaucgccgacaccaccgacgcagugcgggacccccagacccuggagauccuggacaucaccccaugcagcuucggcggcgugagcgucaucacccccggcacaaacaccagcaaccagguggccgugcuguaccagggagugaacugcaccgaggugcccguggccauccacgccgaccagcugacccccaccuggcggguguacagcaccggcagcaacguguuccagacccgggccggcugccugaucggcgccgagcacgugaacaacuccuacgagugcgacauccccaucggcgcuggcaucugcgccagcuaccagacccagaccaacagcccccggcgggcccggagcguggccagccagagcaucaucgccuacaccaugagcuuaggcgccgagaacagcguggccuacagcaacaacagcaucgcgaucccuaccaacuucaccaucagcgugaccaccgagauacugcccgugagcaugaccaagaccagcguggacuguaccauguacaucugcggcgacagcaccgagugcagcaaccugcugcugcaguacggcagcuucugcacccagcugaaccgggcccugaccggcaucgccguggagcaggacaagaacacccaagagguguucgcccaggugaagcagaucuacaagacucccccaaucaaggacuucggcggcuucaacuucagccagauccugcccgaccccagcaagcccagcaagcggagcuucaucgaggaccugcuguucaacaaggugacccuggccgacgccggcuucaucaagcaguacggcgacugccugggggauaucgccgcucgggaccugaucugcgcccagaaguucaacggccugaccgugcugcccccucugcugaccgacgagaugaucgcccaguacaccagcgcccugcuugccggcaccaucaccagcggcuggaccuucggcgccggcgcagcccugcagauccccuucgccaugcagauggccuaccgguucaacggcaucggcgugacccagaacgugcuguacgagaaccagaagcugaucgccaaccaguucaacagcgccaucggcaagauccaggacagccugagcagcaccgccagcgcccugggcaagcugcaggacguggugaaccagaacgcucaggcccugaacacccuggugaagcagcugagcagcaacuucggcgccaucagcucagugcugaaugacauccugagcaggcuggacaagguggaggccgaggugcagaucgaccggcugaucaccggccggcugcagagccugcagaccuacgugacccagcagcugauccgggccgccgagauccgggccagcgccaaccuggcagccaccaagaugagcgagugcgugcugggccagagcaagcggguggacuuuugcggcaagggcuaccaccugaugagcuucccccagagcgccccacacggcgugguguuccuccacgucacauacgugcccgcccaggagaagaacuucaccaccgcccccgccauuugccacgacggcaaggcucacuucccccgggagggaguguucgugagcaacggcacccacugguucgugacccagcggaacuucuacgagccccagaucaucaccaccgacaacaccuucgugagcggcaacugcgacguggugaucggcaucgugaacaacaccguguacgacccccugcagccugagcuggacagcuucaaggaggagcuggacaaguacuucaagaaccacaccagccccgacguggaucugggcgacaucagcggcaucaacgccagcguggugaacauccagaaggagaucgaccggcugaacgagguggccaagaaccugaacgagagccugaucgaccugcaggagcugggcaaguacgagcaguacaucaaguggcccugguacaucuggcugggcuucaucgccggccugaucgccaucgugauggugaccaucaugcugugcugcaugaccagcugcuguagcugccugaagggcugcugcagcugcggcagcugcugcaaguucgacgaggacgacagcgagccagugcugaagggcgugaagcugcacuacaccugaggacuaguuauaagacugacuagcccgaugggccucccaacgggcccuccuccccuccuugcaccgagagaucuaaaaaaaaaaaaaaaaaaaaaaaaaaaaaaaaaaaaaaaaaaaaaaaaaaaaaaaaaaaaaaaaaaaaaaaaaaaaaaaaaaaaaaaaaaaaaaaaaaaa

SEQ ID NO: 25885 - RNA, 4011 nt, Artificial Sequence
  SARS-CoV-2/Wuhan/WIV05/2019__EPI_ISL_402128 spike protein mRNA gc (1-1273)(A222V_D614G)
aggagaaagcuuaccauguucguguuccuggugcugcugccccuggugagcagccagugcgugaaccugaccacccggacccagcugcccccugccuacaccaacagcuucacccggggcguguacuaccccgacaagguguuccggagcagcgugcugcacagcacccaggaccuguuccugcccuucuucagcaacgugaccugguuccacgccauccacgugagcggcaccaacggcaccaagcgguucgacaacccagugcugcccuucaacgacggcguguacuucgccagcaccgagaagucaaacaucauccggggcuggaucuucggcaccacccuggacagcaagacacagagccugcugaucgugaacaacgccaccaacguggugaucaaggugugcgaguuucaguucugcaacgaccccuuccugggcguguacuaccacaagaacaacaagagcuggauggagagcgaguuccgggucuacagcagcgcuaacaauugcaccuucgaguacgugagccagcccuuccugauggaccucgagggcaagcagggcaacuucaagaaccugcgggaguucguguucaagaacaucgauggcuacuucaagaucuacagcaagcacacccccaucaaccuggugcgggaccugccccagggauucagcgugcuggagccucugguggaccugcccaucggcaucaacaucaccagguuccagacccugcuggcccugcaccggagcuaccugacccccggcgacagcagcagcggcuggaccgccggcgccgccgccuacuacgugggcuaccugcagccacggaccuuccugcugaaguacaacgagaacggcaccaucaccgacgcaguggacugcgcccuggacccccugagcgagaccaagugcacccuaaagagcuucaccguggagaagggcaucuaccagaccagcaacuuccgggugcagcccacugagagcaucgugcgguuccccaacauuaccaaccugugucccuucggcgagguguucaacgccacccgguucgccagcguguacgccuggaaccggaagcggaucagcaacugcguggccgacuacagcgugcuguacaacagcgccagcuucagcaccuucaagugcuacggcgugagcccuaccaagcugaacgaccugugcuucaccaacguguacgccgacagcuucgugauccggggcgacgaggugcggcagaucgcucccggccagaccggcaagaucgccgacuacaacuacaagcugcccgacgacuucaccggcugcgugaucgccuggaacagcaacaaccuggacagcaaggugggcggcaacuacaacuaccuguaccggcuguuccguaagagcaaccugaagccauucgagcgggacaucagcaccgagaucuaccaggccggcagcacccccugcaacgguguggagggcuuuaacugcuacuucccccugcagagcuacggcuuccagcccaccaacggcgugggcuaccagcccuaccgggugguggugcugagcuucgagcugcugcacgcccccgccaccgugugcggcccuaaaaagagcaccaaccuggugaagaacaagugcgugaacuucaauuucaacggccugaccggcaccggcgugcugaccgagagcaacaagaaguuccugcccuuccagcaguucggccgggauaucgccgacaccaccgacgccgugcgggacccccagacccuggagauccuggacaucaccccaugcagcuucggcggcgucagcgugaucacccccggcacaaacaccagcaaccagguggcagugcuguaccagggagugaacugcaccgaggugcccguggccauccacgccgaccagcugacccccaccuggcggguguacagcaccggcagcaacguguuccagacccgggccggcugccugaucggcgccgagcacgugaacaacuccuacgagugcgacauccccaucggcgccggcaucugcgcuagcuaccagacccagaccaacagcccccggcgggcccggagcguggccagccagagcaucaucgccuacaccaugagcuuaggcgccgagaacagcguggccuacagcaacaacagcaucgccaucccuaccaacuucaccaucagcgugaccaccgagauacugcccgugagcaugaccaagaccagcguggacuguaccauguacaucugcggcgacagcaccgagugcagcaaccugcugcugcaguacggcagcuucugcacccagcugaaccgggcgcugaccggcaucgccguggagcaggacaagaacacccaagagguguucgcccaggugaagcagaucuacaagacucccccaaucaaggacuucggcggcuucaacuucagccagauccugcccgaccccagcaagcccagcaagcggagcuucaucgaggaccugcuguucaacaaggugacccuggccgacgccggcuucaucaagcaguacggcgacugccugggggauaucgccgcccgggaccugaucugcgcucagaaguucaacggccugaccgugcugcccccucugcugaccgacgagaugaucgcccaguacaccagcgcccugcuugccggcaccaucaccagcggcuggaccuucggcgccggcgccgcacugcagauccccuucgccaugcagauggccuaccgguucaacggcaucggcgugacccagaacgugcuguacgagaaccagaagcugaucgccaaccaguucaacagcgccaucggcaagauccaggacagccugagcagcaccgccagcgcccugggcaagcugcaggacguggugaaccagaacgcccaggcucugaacacccuggugaagcagcugagcagcaacuucggcgccaucagcucagugcugaaugacauccugagcaggcuggacaagguggaggccgaggugcagaucgaccggcugaucaccggccggcugcagagccugcagaccuacgugacccagcagcugauccgggccgccgagauccgggccagcgccaaccuggccgcaaccaagaugagcgagugcgugcugggccagagcaagcggguggacuuuugcggcaagggcuaccaccugaugagcuucccccagagcgccccacacggcguggucuuccuccacgugacauacgugcccgcccaggagaagaacuucaccaccgcccccgccauuugccacgacggcaaggcccacuucccccgggagggaguguucgugagcaacggcacccacugguucgugacccagcggaacuucuacgagccccagaucaucaccaccgacaacaccuucgugagcggcaacugcgacguggugaucggcaucgugaacaacaccguguacgacccccugcagccugagcuggacagcuucaaggaggagcuggacaaguacuucaagaaccacaccagccccgacguggaucugggcgacaucagcggcaucaacgcuagcguggugaacauccagaaggagaucgaccggcugaacgagguggccaagaaccugaacgagagccugaucgaccugcaggagcugggcaaguacgagcaguacaucaaguggcccugguacaucuggcugggcuucaucgccggccugaucgccaucgugauggugaccaucaugcugugcugcaugaccagcugcuguagcugccugaagggcugcugcagcugcggcagcugcugcaaguucgacgaggacgacagcgagccagugcugaagggcgugaagcugcacuacaccugaggacuaguuauaagacugacuagcccgaugggccucccaacgggcccuccuccccuccuugcaccgagagaucuaaaaaaaaaaaaaaaaaaaaaaaaaaaaaaaaaaaaaaaaaaaaaaaaaaaaaaaaaaaaaaaaaaaaaaaaaaaaaaaaaaaaaaaaaaaaaaaaaaaa

SEQ ID NO: 25886 - RNA, 4011 nt, Artificial Sequence
  SARS-CoV-2/Wuhan/WIV05/2019__EPI_ISL_402128 spike protein mRNA gc (1-1273)(N439K_D614G)
aggagaaagcuuaccauguucguguuccuggugcugcugccccuggugagcagccagugcgugaaccugaccacccggacccagcugcccccugccuacaccaacagcuucacccggggcguguacuaccccgacaagguguuccggagcagcgugcugcacagcacccaggaccuguuccugcccuucuucagcaacgugaccugguuccacgccauccacgugagcggcaccaacggcaccaagcgguucgacaacccagugcugcccuucaacgacggcguguacuucgccagcaccgagaagucaaacaucauccggggcuggaucuucggcaccacccuggacagcaagacacagagccugcugaucgugaacaacgccaccaacguggugaucaaggugugcgaguuucaguucugcaacgaccccuuccugggcguguacuaccacaagaacaacaagagcuggauggagagcgaguuccgggucuacagcagcgcuaacaauugcaccuucgaguacgugagccagcccuuccugauggaccucgagggcaagcagggcaacuucaagaaccugcgggaguucguguucaagaacaucgauggcuacuucaagaucuacagcaagcacacccccaucaaccuggugcgggaccugccccagggauucagcgcccuggagccucugguggaccugcccaucggcaucaacaucaccagguuccagacccugcuggcccugcaccggagcuaccugacccccggcgacagcagcagcggcuggaccgccggcgccgccgcauacuacgugggcuaccugcagccacggaccuuccugcugaaguacaacgagaacggcaccaucaccgacgccguggacugcgcccuggacccccugagcgagaccaagugcacccuaaagagcuucaccguggagaagggcaucuaccagaccagcaacuuccgggugcagcccacugagagcaucgugcgguuccccaacauuaccaaccugugucccuucggcgagguguucaacgccacccgguucgccagcguguacgccuggaaccggaagcggaucagcaacugcguggccgacuacagcgugcuguacaacagcgccagcuucagcaccuucaagugcuacggcgugagcccuaccaagcugaacgaccugugcuucaccaacguguacgcugacagcuucgugauccggggcgacgaggugcggcagaucgcccccggccagaccggcaagaucgccgacuacaacuacaagcugcccgacgacuucaccggcugcgugaucgccuggaacagcaagaaccuggacagcaaggugggcggcaacuacaacuaccuguaccggcuguuccguaagagcaaccugaagccauucgagcgggacaucagcaccgagaucuaccaggccggcagcacccccugcaacgguguggagggcuuuaacugcuacuucccccugcagagcuacggcuuccagcccaccaacggcgugggcuaccagcccuaccgggugguggugcugagcuucgagcugcugcacgcccccgccaccgugugcggcccuaaaaagagcaccaaccuggugaagaacaagugcgugaacuucaacuucaauggccugaccggcaccggcgugcugaccgagagcaacaagaaguuccugcccuuccagcaguucggccgggauaucgccgacaccaccgacgcagugcgggacccccagacccuggagauccuggacaucaccccaugcagcuucggcggcgugagcgucaucacccccggcacaaacaccagcaaccagguggccgugcuguaccagggagugaacugcaccgaggugcccguggccauccacgccgaccagcugacccccaccuggcggguguacagcaccggcagcaacguguuccagacccgggccggcugccugaucggcgccgagcacgugaacaacuccuacgagugcgacauccccaucggcgcuggcaucugcgccagcuaccagacccagaccaacagcccccggcgggcccggagcguggccagccagagcaucaucgccuacaccaugagcuuaggcgccgagaacagcguggccuacagcaacaacagcaucgcgaucccuaccaacuucaccaucagcgugaccaccgagauacugcccgugagcaugaccaagaccagcguggacuguaccauguacaucugcggcgacagcaccgagugcagcaaccugcugcugcaguacggcagcuucugcacccagcugaaccgggcccugaccggcaucgccguggagcaggacaagaacacccaagagguguucgcccaggugaagcagaucuacaagacucccccaaucaaggacuucggcggcuucaacuucagccagauccugcccgaccccagcaagcccagcaagcggagcuucaucgaggaccugcuguucaacaaggugacccuggccgacgccggcuucaucaagcaguacggcgacugccugggggauaucgccgcucgggaccugaucugcgcccagaaguucaacggccugaccgugcugcccccucugcugaccgacgagaugaucgcccaguacaccagcgcccugcuugccggcaccaucaccagcggcuggaccuucggcgccggcgcagcccugcagauccccuucgccaugcagauggccuaccgguucaacggcaucggcgugacccagaacgugcuguacgagaaccagaagcugaucgccaaccaguucaacagcgccaucggcaagauccaggacagccugagcagcaccgccagcgcccugggcaagcugcaggacguggugaaccagaacgcucaggcccugaacacccuggugaagcagcugagcagcaacuucggcgccaucagcucagugcugaacgacauccugagcaggcuggacaagguggaggccgaggugcagaucgaccggcugaucaccggccggcugcagagccugcagaccuacgugacccagcagcugauccgggccgccgagauccgggccagcgccaaucuggcagccaccaagaugagcgagugcgugcugggccagagcaagcggguggacuuuugcggcaagggcuaccaccugaugagcuucccccagagcgccccacacggcgugguguuccuccacgucacauacgugcccgcccaggagaagaacuucaccaccgcccccgccauuugccacgacggcaaggcucacuucccccgggagggaguguucgugagcaacggcacccacugguucgugacccagcggaacuucuacgagccccagaucaucaccaccgacaacaccuucgugagcggcaacugcgacguggugaucggcaucgugaacaacaccguguacgacccccugcagccugagcuggacagcuucaaggaggagcuggacaaguacuucaagaaccacaccagccccgacguggaucugggcgacaucagcggcaucaacgccagcguggugaacauccagaaggagaucgaccggcugaacgagguggccaagaaccugaacgagagccugaucgaccugcaggagcugggcaaguacgagcaguacaucaaguggcccugguacaucuggcugggcuucaucgccggccugaucgccaucgugauggugaccaucaugcugugcugcaugaccagcugcuguagcugccugaagggcugcugcagcugcggcagcugcugcaaguucgacgaggacgacagcgagccagugcugaagggcgugaagcugcacuacaccugaggacuaguuauaagacugacuagcccgaugggccucccaacgggcccuccuccccuccuugcaccgagagaucuaaaaaaaaaaaaaaaaaaaaaaaaaaaaaaaaaaaaaaaaaaaaaaaaaaaaaaaaaaaaaaaaaaaaaaaaaaaaaaaaaaaaaaaaaaaaaaaaaaaa

SEQ ID NO: 25887 - RNA, 4011 nt, Artificial Sequence
  SARS-CoV-2/Wuhan/WIV05/2019__EPI_ISL_402128 spike protein mRNA gc (1-1273)(S477N_D614G)
aggagaaagcuuaccauguucguguuccuggugcugcugccccuggugagcagccagugcgugaaccugaccacccggacccagcugcccccugccuacaccaacagcuucacccggggcguguacuaccccgacaagguguuccggagcagcgugcugcacagcacccaggaccuguuccugcccuucuucagcaacgugaccugguuccacgccauccacgugagcggcaccaacggcaccaagcgguucgacaacccagugcugcccuucaacgacggcguguacuucgccagcaccgagaagucaaacaucauccggggcuggaucuucggcaccacccuggacagcaagacacagagccugcugaucgugaacaacgccaccaacguggugaucaaggugugcgaguuucaguucugcaacgaccccuuccugggcguguacuaccacaagaacaacaagagcuggauggagagcgaguuccgggucuacagcagcgcuaacaauugcaccuucgaguacgugagccagcccuuccugauggaccucgagggcaagcagggcaacuucaagaaccugcgggaguucguguucaagaacaucgauggcuacuucaagaucuacagcaagcacacccccaucaaccuggugcgggaccugccccagggauucagcgcccuggagccucugguggaccugcccaucggcaucaacaucaccagguuccagacccugcuggcccugcaccggagcuaccugacccccggcgacagcagcagcggcuggaccgccggcgccgccgcauacuacgugggcuaccugcagccacggaccuuccugcugaaguacaacgagaacggcaccaucaccgacgccguggacugcgcccuggacccccugagcgagaccaagugcacccuaaagagcuucaccguggagaagggcaucuaccagaccagcaacuuccgggugcagcccacugagagcaucgugcgguuccccaacauuaccaaccugugucccuucggcgagguguucaacgccacccgguucgccagcguguacgccuggaaccggaagcggaucagcaacugcguggccgacuacagcgugcuguacaacagcgccagcuucagcaccuucaagugcuacggcgugagcccuaccaagcugaacgaccugugcuucaccaacguguacgcugacagcuucgugauccggggcgacgaggugcggcagaucgcccccggccagaccggcaagaucgccgacuacaacuacaagcugcccgacgacuucaccggcugcgugaucgccuggaacagcaacaaccuggacagcaaggugggcggcaacuacaacuaccuguaccggcuguuccguaagagcaaccugaagccauucgagcgggacaucagcaccgagaucuaccaggccggcaacacccccugcaacgguguggagggcuuuaacugcuacuucccccugcagagcuacggcuuccagcccaccaacggcgugggcuaccagcccuaccgggugguggugcugagcuucgagcugcugcacgcccccgccaccgugugcggcccuaaaaagagcaccaaccuggugaagaacaagugcgugaauuucaacuucaacggccugaccggcaccggcgugcugaccgagagcaacaagaaguuccugcccuuccagcaguucggccgggauaucgccgacaccaccgacgcagugcgggacccccagacccuggagauccuggacaucaccccaugcagcuucggcggcgugagcgucaucacccccggcacaaacaccagcaaccagguggccgugcuguaccagggagugaacugcaccgaggugcccguggccauccacgccgaccagcugacccccaccuggcggguguacagcaccggcagcaacguguuccagacccgggccggcugccugaucggcgccgagcacgugaacaacagcuacgagugcgacauccccaucggcgcuggcaucugcgccuccuaccagacccagaccaacagcccccggcgggcccggagcguggccagccagagcaucaucgccuacaccaugagcuuaggcgccgagaacagcguggccuacagcaacaacagcaucgcgaucccuaccaacuucaccaucagcgugaccaccgagauacugcccgugagcaugaccaagaccagcguggacuguaccauguacaucugcggcgacagcaccgagugcagcaaccugcugcugcaguacggcagcuucugcacccagcugaaccgggcccugaccggcaucgccguggagcaggacaagaacacccaagagguguucgcccaggugaagcagaucuacaagacucccccaaucaaggacuucggcggcuucaacuucagccagauccugcccgaccccagcaagcccagcaagcggagcuucaucgaggaccugcuguucaacaaggugacccuggccgacgccggcuucaucaagcaguacggcgacugccugggggauaucgccgcucgggaccugaucugcgcccagaaguucaacggccugaccgugcugcccccucugcugaccgacgagaugaucgcccaguacaccagcgcccugcuugccggcaccaucaccagcggcuggaccuucggcgccggcgcagcccugcagauccccuucgccaugcagauggccuaccgguucaacggcaucggcgugacccagaacgugcuguacgagaaccagaagcugaucgccaaccaguucaacagcgccaucggcaagauccaggacagccugagcagcaccgccagcgcccugggcaagcugcaggacguggugaaccagaacgcucaggcccugaacacccuggugaagcagcugagcagcaauuucggcgccaucagcagcgugcugaacgacauccugucaaggcuggacaagguggaggccgaggugcagaucgaccggcugaucaccggccggcugcagagccugcagaccuacgugacccagcagcugauccgggccgccgagauccgggccagcgccaaccuggcagccaccaagaugagcgagugcgugcugggccagagcaagcggguggacuuuugcggcaagggcuaccaccugaugagcuucccccagagcgccccacacggcgugguguuccuccacgucacauacgugcccgcccaggagaagaacuucaccaccgcccccgccauuugccacgacggcaaggcucacuucccccgggagggaguguucgugagcaacggcacccacugguucgugacccagcggaacuucuacgagccccagaucaucaccaccgacaacaccuucgugagcggcaacugcgacguggugaucggcaucgugaacaacaccguguacgacccccugcagccugagcuggacagcuucaaggaggagcuggacaaguacuucaagaaccacaccagccccgacguggaucugggcgacaucagcggcaucaacgccagcguggugaacauccagaaggagaucgaccggcugaacgagguggccaagaaccugaacgagagccugaucgaccugcaggagcugggcaaguacgagcaguacaucaaguggcccugguacaucuggcugggcuucaucgccggccugaucgccaucgugauggugaccaucaugcugugcugcaugaccagcugcuguagcugccugaagggcugcugcagcugcggcagcugcugcaaguucgacgaggacgacagcgagccagugcugaagggcgugaagcugcacuacaccugaggacuaguuauaagacugacuagcccgaugggccucccaacgggcccuccuccccuccuugcaccgagagaucuaaaaaaaaaaaaaaaaaaaaaaaaaaaaaaaaaaaaaaaaaaaaaaaaaaaaaaaaaaaaaaaaaaaaaaaaaaaaaaaaaaaaaaaaaaaaaaaaaaaa

SEQ ID NO: 25888 - RNA, 4011 nt, Artificial Sequence
  SARS-CoV-2/Wuhan/WIV05/2019__EPI_ISL_402128 spike protein mRNA gc (1-1273)(N501Y_D614G)
aggagaaagcuuaccauguucguguuccuggugcugcugccccuggugagcagccagugcgugaaccugaccacccggacccagcugcccccugccuacaccaacagcuucacccggggcguguacuaccccgacaagguguuccggagcagcgugcugcacagcacccaggaccuguuccugcccuucuucagcaacgugaccugguuccacgccauccacgugagcggcaccaacggcaccaagcgguucgacaacccagugcugcccuucaacgacggcguguacuucgccagcaccgagaagucaaacaucauccggggcuggaucuucggcaccacccuggacagcaagacacagagccugcugaucgugaacaacgccaccaacguggugaucaaggugugcgaguuucaguucugcaacgaccccuuccugggcguguacuaccacaagaacaacaagagcuggauggagagcgaguuccgggucuacagcagcgcuaacaauugcaccuucgaguacgugagccagcccuuccugauggaccucgagggcaagcagggcaacuucaagaaccugcgggaguucguguucaagaacaucgauggcuacuucaagaucuacagcaagcacacccccaucaaccuggugcgggaccugccccagggauucagcgcccuggagccucugguggaccugcccaucggcaucaacaucaccagguuccagacccugcuggcccugcaccggagcuaccugacccccggcgacagcagcagcggcuggaccgccggcgccgccgcauacuacgugggcuaccugcagccacggaccuuccugcugaaguacaacgagaacggcaccaucaccgacgccguggacugcgcccuggacccccugagcgagaccaagugcacccuaaagagcuucaccguggagaagggcaucuaccagaccagcaacuuccgggugcagcccacugagagcaucgugcgguuccccaacauuaccaaccugugucccuucggcgagguguucaacgccacccgguucgccagcguguacgccuggaaccggaagcggaucagcaacugcguggccgacuacagcgugcuguacaacagcgccagcuucagcaccuucaagugcuacggcgugagcccuaccaagcugaacgaccugugcuucaccaacguguacgcugacagcuucgugauccggggcgacgaggugcggcagaucgcccccggccagaccggcaagaucgccgacuacaacuacaagcugcccgacgacuucaccggcugcgugaucgccuggaacagcaacaaccuggacagcaaggugggcggcaacuacaacuaccuguaccggcuguuccguaagagcaaccugaagccauucgagcgggacaucagcaccgagaucuaccaggccggcagcacccccugcaacgguguggagggcuuuaacugcuacuucccccugcagagcuacggcuuccagcccaccuacggcgugggcuaccagcccuaccgggugguggugcugagcuucgagcugcugcacgcccccgccaccgugugcggcccuaaaaagagcaccaaccuggugaagaacaagugcgugaacuucaacuucaauggccugaccggcaccggcgugcugaccgagagcaacaagaaguuccugcccuuccagcaguucggccgggauaucgccgacaccaccgacgcagugcgggacccccagacccuggagauccuggacaucaccccaugcagcuucggcggcgugagcgucaucacccccggcacaaacaccagcaaccagguggccgugcuguaccagggagugaacugcaccgaggugcccguggccauccacgccgaccagcugacccccaccuggcggguguacagcaccggcagcaacguguuccagacccgggccggcugccugaucggcgccgagcacgugaacaacuccuacgagugcgacauccccaucggcgcuggcaucugcgccagcuaccagacccagaccaacagcccccggcgggcccggagcguggccagccagagcaucaucgccuacaccaugagcuuaggcgccgagaacagcguggccuacagcaacaacagcaucgcgaucccuaccaacuucaccaucagcgugaccaccgagauacugcccgugagcaugaccaagaccagcguggacuguaccauguacaucugcggcgacagcaccgagugcagcaaccugcugcugcaguacggcagcuucugcacccagcugaaccgggcccugaccggcaucgccguggagcaggacaagaacacccaagagguguucgcccaggugaagcagaucuacaagacucccccaaucaaggacuucggcggcuucaacuucagccagauccugcccgaccccagcaagcccagcaagcggagcuucaucgaggaccugcuguucaacaaggugacccuggccgacgccggcuucaucaagcaguacggcgacugccugggggauaucgccgcucgggaccugaucugcgcccagaaguucaacggccugaccgugcugcccccucugcugaccgacgagaugaucgcccaguacaccagcgcccugcuugccggcaccaucaccagcggcuggaccuucggcgccggcgcagcccugcagauccccuucgccaugcagauggccuaccgguucaacggcaucggcgugacccagaacgugcuguacgagaaccagaagcugaucgccaaccaguucaacagcgccaucggcaagauccaggacagccugagcagcaccgccagcgcccugggcaagcugcaggacguggugaaccagaacgcucaggcccugaacacccuggugaagcagcugagcagcaacuucggcgccaucagcucagugcugaacgacauccugagcaggcuggacaagguggaggccgaggugcagaucgaccggcugaucaccggccggcugcagagccugcagaccuacgugacccagcagcugauccgggccgccgagauccgggccagcgccaaucuggcagccaccaagaugagcgagugcgugcugggccagagcaagcggguggacuuuugcggcaagggcuaccaccugaugagcuucccccagagcgccccacacggcgugguguuccuccacgucacauacgugcccgcccaggagaagaacuucaccaccgcccccgccauuugccacgacggcaaggcucacuucccccgggagggaguguucgugagcaacggcacccacugguucgugacccagcggaacuucuacgagccccagaucaucaccaccgacaacaccuucgugagcggcaacugcgacguggugaucggcaucgugaacaacaccguguacgacccccugcagccugagcuggacagcuucaaggaggagcuggacaaguacuucaagaaccacaccagccccgacguggaucugggcgacaucagcggcaucaacgccagcguggugaacauccagaaggagaucgaccggcugaacgagguggccaagaaccugaacgagagccugaucgaccugcaggagcugggcaaguacgagcaguacaucaaguggcccugguacaucuggcugggcuucaucgccggccugaucgccaucgugauggugaccaucaugcugugcugcaugaccagcugcuguagcugccugaagggcugcugcagcugcggcagcugcugcaaguucgacgaggacgacagcgagccagugcugaagggcgugaagcugcacuacaccugaggacuaguuauaagacugacuagcccgaugggccucccaacgggcccuccuccccuccuugcaccgagagaucuaaaaaaaaaaaaaaaaaaaaaaaaaaaaaaaaaaaaaaaaaaaaaaaaaaaaaaaaaaaaaaaaaaaaaaaaaaaaaaaaaaaaaaaaaaaaaaaaaaaa

SEQ ID NO: 25889 - RNA, 4005 nt, Artificial Sequence
  SARS-CoV-2/Wuhan/WIV05/2019__EPI_ISL_402128 spike protein mRNA gc (1-1273)(H69del_V70del_D614G)
aggagaaagcuuaccauguucguguuccuggugcugcugccccuggugagcagccagugcgugaaccugaccacccggacccagcugcccccugccuacaccaacagcuucacccggggcguguacuaccccgacaagguguuccggagcagcgugcugcacagcacccaggaccuguuccugcccuucuucagcaacgugaccugguuccacgccaucagcggcaccaacggcaccaagcgguucgacaacccagugcugcccuucaacgacggcguguacuucgccagcaccgagaagucaaacaucauccggggcuggaucuucggcaccacccuggacagcaagacacagagccugcugaucgugaacaacgccaccaacguggugaucaaggugugcgaguuucaguucugcaacgaccccuuccugggcguguacuaccacaagaacaacaagagcuggauggagagcgaguuccggguguacagcagcgcuaacaauugcaccuucgaguacgucagccagcccuuccugauggaccucgagggcaagcagggcaacuucaagaaccugcgggaguucguguucaagaacaucgauggcuacuucaagaucuacagcaagcacacccccaucaaccuggugcgggaccugccccagggauucagcgcccuggagccucugguggaccugcccaucggcaucaacaucaccagguuccagacccugcuggcccugcaccggagcuaccugacccccggcgacagcagcagcggcuggaccgccggcgccgccgcauacuacgugggcuaccugcagccacggaccuuccugcugaaguacaacgagaacggcaccaucaccgacgccguggacugcgcccuggacccccugagcgagaccaagugcacccuaaagagcuucaccguggagaagggcaucuaccagaccagcaacuuccgggugcagcccacugagagcaucgugcgguuccccaacauuaccaaccugugucccuucggcgagguguucaacgccacccgguucgccagcguguacgccuggaaccggaagcggaucagcaacugcguggccgacuacagcgugcuguacaacagcgccagcuucagcaccuucaagugcuacggcgugagcccuaccaagcugaacgaccugugcuucaccaacguguacgcugacagcuucgugauccggggcgacgaggugcggcagaucgcccccggccagaccggcaagaucgccgacuacaacuacaagcugcccgacgacuucaccggcugcgugaucgccuggaacagcaacaaccuggacagcaaggugggcggcaacuacaacuaccuguaccggcuguuccguaagagcaaccugaagccauucgagcgggacaucagcaccgagaucuaccaggccggcagcacccccugcaacgguguggagggcuuuaacugcuacuucccccugcagagcuacggcuuccagcccaccaacggcgugggcuaccagcccuaccgggugguggugcugagcuucgagcugcugcacgcccccgccaccgugugcggcccuaaaaagagcaccaaccuggugaagaacaagugcgugaacuucaauuucaacggccugaccggcaccggcgugcugaccgagagcaacaagaaguuccugcccuuccagcaguucggccgggauaucgccgacaccaccgacgcagugcgggacccccagacccuggagauccuggacaucaccccaugcagcuucggcggcgugagcgugaucacccccggcacaaacaccagcaaccaggucgccgugcuguaccagggagugaacugcaccgaggugcccguggccauccacgccgaccagcugacccccaccuggcggguguacagcaccggcagcaacguguuccagacccgggccggcugccugaucggcgccgagcacgugaacaacuccuacgagugcgacauccccaucggcgcuggcaucugcgccagcuaccagacccagaccaacagcccccggcgggcccggagcguggccagccagagcaucaucgccuacaccaugagcuuaggcgccgagaacagcguggccuacagcaacaacagcaucgcgaucccuaccaacuucaccaucagcgugaccaccgagauacugcccgugagcaugaccaagaccagcguggacuguaccauguacaucugcggcgacagcaccgagugcagcaaccugcugcugcaguacggcagcuucugcacccagcugaaccgggcccugaccggcaucgccguggagcaggacaagaacacccaagagguguucgcccaggugaagcagaucuacaagacucccccaaucaaggacuucggcggcuucaacuucagccagauccugcccgaccccagcaagcccagcaagcggagcuucaucgaggaccugcuguucaacaaggugacccuggccgacgccggcuucaucaagcaguacggcgacugccugggggauaucgccgcucgggaccugaucugcgcccagaaguucaacggccugaccgugcugcccccucugcugaccgacgagaugaucgcccaguacaccagcgcccugcuugccggcaccaucaccagcggcuggaccuucggcgccggcgcagcccugcagauccccuucgccaugcagauggccuaccgguucaacggcaucggcgugacccagaacgugcuguacgagaaccagaagcugaucgccaaccaguucaacagcgccaucggcaagauccaggacagccugagcagcaccgccagcgcccugggcaagcugcaggacguggugaaccagaacgcucaggcccugaacacccuggugaagcagcugagcagcaacuucggcgccaucagcucagugcugaaugacauccugagcaggcuggacaagguggaggccgaggugcagaucgaccggcugaucaccggccggcugcagagccugcagaccuacgugacccagcagcugauccgggccgccgagauccgggccagcgccaaccuggcagccaccaagaugagcgagugcgugcugggccagagcaagcggguggacuuuugcggcaagggcuaccaccugaugagcuucccccagagcgccccacacggcgugguguuccuccacgugacauacguccccgcccaggagaagaacuucaccaccgcccccgccauuugccacgacggcaaggcucacuucccccgggagggaguguucgugagcaacggcacccacugguucgugacccagcggaacuucuacgagccccagaucaucaccaccgacaacaccuucgugagcggcaacugcgacguggugaucggcaucgugaacaacaccguguacgacccccugcagccugagcuggacagcuucaaggaggagcuggacaaguacuucaagaaccacaccagccccgacguggaucugggcgacaucagcggcaucaacgccagcguggugaacauccagaaggagaucgaccggcugaacgagguggccaagaaccugaacgagagccugaucgaccugcaggagcugggcaaguacgagcaguacaucaaguggcccugguacaucuggcugggcuucaucgccggccugaucgccaucgugauggugaccaucaugcugugcugcaugaccagcugcuguagcugccugaagggcugcugcagcugcggcagcugcugcaaguucgacgaggacgacagcgagccagugcugaagggcgugaagcugcacuacaccugaggacuaguuauaagacugacuagcccgaugggccucccaacgggcccuccuccccuccuugcaccgagagaucuaaaaaaaaaaaaaaaaaaaaaaaaaaaaaaaaaaaaaaaaaaaaaaaaaaaaaaaaaaaaaaaaaaaaaaaaaaaaaaaaaaaaaaaaaaaaaaaaaaaa

SEQ ID NO: 25890 - RNA, 4011 nt, Artificial Sequence
  SARS-CoV-2/Wuhan/WIV05/2019__EPI_ISL_402128 spike protein mRNA gc (1-1273)(Y453F_D614G)
aggagaaagcuuaccauguucguguuccuggugcugcugccccuggugagcagccagugcgugaaccugaccacccggacccagcugcccccugccuacaccaacagcuucacccggggcguguacuaccccgacaagguguuccggagcagcgugcugcacagcacccaggaccuguuccugcccuucuucagcaacgugaccugguuccacgccauccacgugagcggcaccaacggcaccaagcgguucgacaacccagugcugcccuucaacgacggcguguacuucgccagcaccgagaagucaaacaucauccggggcuggaucuucggcaccacccuggacagcaagacacagagccugcugaucgugaacaacgccaccaacguggugaucaaggugugcgaguuucaguucugcaacgaccccuuccugggcguguacuaccacaagaacaacaagagcuggauggagagcgaguuccgggucuacagcagcgcuaacaauugcaccuucgaguacgugagccagcccuuccugauggaccucgagggcaagcagggcaacuucaagaaccugcgggaguucguguucaagaacaucgauggcuacuucaagaucuacagcaagcacacccccaucaaccuggugcgggaccugccccagggauucagcgcccuggagccucugguggaccugcccaucggcaucaacaucaccagguuccagacccugcuggcccugcaccggagcuaccugacccccggcgacagcagcagcggcuggaccgccggcgccgccgcauacuacgugggcuaccugcagccacggaccuuccugcugaaguacaacgagaacggcaccaucaccgacgccguggacugcgcccuggacccccugagcgagaccaagugcacccuaaagagcuucaccguggagaagggcaucuaccagaccagcaacuuccgggugcagcccacugagagcaucgugcgguuccccaacauuaccaaccugugucccuucggcgagguguucaacgccacccgguucgccagcguguacgccuggaaccggaagcggaucagcaacugcguggccgacuacagcgugcuguacaacagcgccagcuucagcaccuucaagugcuacggcgugagcccuaccaagcugaacgaccugugcuucaccaacguguacgcugacagcuucgugauccggggcgacgaggugcggcagaucgcccccggccagaccggcaagaucgccgacuacaacuacaagcugcccgacgacuucaccggcugcgugaucgccuggaacagcaacaaccuggacagcaaggugggcggcaacuacaacuaccuguuccggcuguuccguaagagcaaccugaagccauuugagcgggacaucagcaccgagaucuaccaggccggcagcacccccugcaacgguguggagggcuucaacugcuacuucccccugcagagcuacggcuuccagcccaccaacggcgugggcuaccagcccuaccgggugguggugcugagcuucgagcugcugcacgcccccgccaccgugugcggcccuaaaaagagcaccaaccuggugaagaacaagugcgugaacuucaauuucaacggccugaccggcaccggcgugcugaccgagagcaacaagaaguuccugcccuuccagcaguucggccgggauaucgccgacaccaccgacgcagugcgggacccccagacccuggagauccuggacaucaccccaugcagcuucggcggcgugagcgucaucacccccggcacaaacaccagcaaccagguggccgugcuguaccagggagugaacugcaccgaggugcccguggccauccacgccgaccagcugacccccaccuggcggguguacagcaccggcagcaacguguuccagacccgggccggcugccugaucggcgccgagcacgugaacaacuccuacgagugcgacauccccaucggcgcuggcaucugcgccagcuaccagacccagaccaacagcccccggcgggcccggagcguggccagccagagcaucaucgccuacaccaugagcuuaggcgccgagaacagcguggccuacagcaacaacagcaucgcgaucccuaccaacuucaccaucagcgugaccaccgagauacugcccgugagcaugaccaagaccagcguggacuguaccauguacaucugcggcgacagcaccgagugcagcaaccugcugcugcaguacggcagcuucugcacccagcugaaccgggcccugaccggcaucgccguggagcaggacaagaacacccaagagguguucgcccaggugaagcagaucuacaagacucccccaaucaaggacuucggcggcuucaacuucagccagauccugcccgaccccagcaagcccagcaagcggagcuucaucgaggaccugcuguucaacaaggugacccuggccgacgccggcuucaucaagcaguacggcgacugccugggggauaucgccgcucgggaccugaucugcgcccagaaguucaacggccugaccgugcugcccccucugcugaccgacgagaugaucgcccaguacaccagcgcccugcuugccggcaccaucaccagcggcuggaccuucggcgccggcgcagcccugcagauccccuucgccaugcagauggccuaccgguucaacggcaucggcgugacccagaacgugcuguacgagaaccagaagcugaucgccaaccaguucaacagcgccaucggcaagauccaggacagccugagcagcaccgccagcgcccugggcaagcugcaggacguggugaaccagaacgcucaggcccugaacacccuggugaagcagcugagcagcaacuuuggcgccaucagcucagugcugaaugacauccugagcaggcuggacaagguggaggccgaggugcagaucgaccggcugaucaccggccggcugcagagccugcagaccuacgugacccagcagcugauccgggccgccgagauccgggccagcgccaaccuggcagccaccaagaugagcgagugcgugcugggccagagcaagcggguggacuucugcggcaagggcuaccaccugaugagcuucccccagagcgccccacacggcgugguguuccuccacgucacauacgugcccgcccaggagaagaacuucaccaccgcccccgccauuugccacgacggcaaggcucacuucccccgggagggaguguucgugagcaacggcacccacugguucgugacccagcggaacuucuacgagccccagaucaucaccaccgacaacaccuucgugagcggcaacugcgacguggugaucggcaucgugaacaacaccguguacgacccccugcagccugagcuggacagcuucaaggaggagcuggacaaguacuucaagaaccacaccagccccgacguggaucugggcgacaucagcggcaucaacgccagcguggugaacauccagaaggagaucgaccggcugaacgagguggccaagaaccugaacgagagccugaucgaccugcaggagcugggcaaguacgagcaguacaucaaguggcccugguacaucuggcugggcuucaucgccggccugaucgccaucgugauggugaccaucaugcugugcugcaugaccagcugcuguagcugccugaagggcugcugcagcugcggcagcugcugcaaguucgacgaggacgacagcgagccagugcugaagggcgugaagcugcacuacaccugaggacuaguuauaagacugacuagcccgaugggccucccaacgggcccuccuccccuccuugcaccgagagaucuaaaaaaaaaaaaaaaaaaaaaaaaaaaaaaaaaaaaaaaaaaaaaaaaaaaaaaaaaaaaaaaaaaaaaaaaaaaaaaaaaaaaaaaaaaaaaaaaaaaa

SEQ ID NO: 25891 - RNA, 4011 nt, Artificial Sequence
  SARS-CoV-2/Wuhan/WIV05/2019__EPI_ISL_402128 spike protein mRNA gc (1-1273)(D614G_I692V)
aggagaaagcuuaccauguucguguuccuggugcugcugccccuggugagcagccagugcgugaaccugaccacccggacccagcugcccccugccuacaccaacagcuucacccggggcguguacuaccccgacaagguguuccggagcagcgugcugcacagcacccaggaccuguuccugcccuucuucagcaacgugaccugguuccacgccauccacgugagcggcaccaacggcaccaagcgguucgacaacccagugcugcccuucaacgacggcguguacuucgccagcaccgagaagucaaacaucauccggggcuggaucuucggcaccacccuggacagcaagacacagagccugcugaucgugaacaacgccaccaacguggugaucaaggugugcgaguuucaguucugcaacgaccccuuccugggcguguacuaccacaagaacaacaagagcuggauggagagcgaguuccgggucuacagcagcgcuaacaauugcaccuucgaguacgugagccagcccuuccugauggaccucgagggcaagcagggcaacuucaagaaccugcgggaguucguguucaagaacaucgauggcuacuucaagaucuacagcaagcacacccccaucaaccuggugcgggaccugccccagggauucagcgcccuggagccucugguggaccugcccaucggcaucaacaucaccagguuccagacccugcuggcccugcaccggagcuaccugacccccggcgacagcagcagcggcuggaccgccggcgccgccgcauacuacgugggcuaccugcagccacggaccuuccugcugaaguacaacgagaacggcaccaucaccgacgccguggacugcgcccuggacccccugagcgagaccaagugcacccuaaagagcuucaccguggagaagggcaucuaccagaccagcaacuuccgggugcagcccacugagagcaucgugcgguuccccaacauuaccaaccugugucccuucggcgagguguucaacgccacccgguucgccagcguguacgccuggaaccggaagcggaucagcaacugcguggccgacuacagcgugcuguacaacagcgccagcuucagcaccuucaagugcuacggcgugagcccuaccaagcugaacgaccugugcuucaccaacguguacgcugacagcuucgugauccggggcgacgaggugcggcagaucgcccccggccagaccggcaagaucgccgacuacaacuacaagcugcccgacgacuucaccggcugcgugaucgccuggaacagcaacaaccuggacagcaaggugggcggcaacuacaacuaccuguaccggcuguuccguaagagcaaccugaagccauucgagcgggacaucagcaccgagaucuaccaggccggcagcacccccugcaacgguguggagggcuuuaacugcuacuucccccugcagagcuacggcuuccagcccaccaacggcgugggcuaccagcccuaccgggugguggugcugagcuucgagcugcugcacgcccccgccaccgugugcggcccuaaaaagagcaccaaccuggugaagaacaagugcgugaacuucaauuucaacggccugaccggcaccggcgugcugaccgagagcaacaagaaguuccugcccuuccagcaguucggccgggauaucgccgacaccaccgacgcagugcgggacccccagacccuggagauccuggacaucaccccaugcagcuucggcggcgugagcgucaucacccccggcacaaacaccagcaaccagguggccgugcuguaccagggagugaacugcaccgaggugcccguggccauccacgccgaccagcugacccccaccuggcggguguacagcaccggcagcaacguguuccagacccgggccggcugccugaucggcgccgagcacgugaacaacuccuacgagugcgacauccccaucggcgcuggcaucugcgccagcuaccagacccagaccaacagcccccggcgggcccggagcguggccagccagagcgugaucgccuacaccaugagcuuaggcgccgagaacagcguggccuacagcaacaacagcaucgcgaucccuaccaacuucaccaucagcgugaccaccgagauccugcccgugagcaugaccaagaccagcguggacuguaccauguacauaugcggcgacagcaccgagugcagcaaccugcugcugcaguacggcagcuucugcacccagcugaaccgggcccugaccggcaucgccguggagcaggacaagaacacccaagagguguucgcccaggugaagcagaucuacaagacucccccaaucaaggacuucggcggcuucaacuucagccagauccugcccgaccccagcaagcccagcaagcggagcuucaucgaggaccugcuguucaacaaggugacccuggccgacgccggcuucaucaagcaguacggcgacugccugggggauaucgccgcucgggaccugaucugcgcccagaaguucaacggccugaccgugcugcccccucugcugaccgacgagaugaucgcccaguacaccagcgcccugcuugccggcaccaucaccagcggcuggaccuucggcgccggcgcagcccugcagauccccuucgccaugcagauggccuaccgguucaacggcaucggcgugacccagaacgugcuguacgagaaccagaagcugaucgccaaccaguucaacagcgccaucggcaagauccaggacagccugagcagcaccgccagcgcccugggcaagcugcaggacguggugaaccagaacgcucaggcccugaacacccuggugaagcagcugagcagcaacuucggcgccaucagcucagugcugaaugacauccugagcaggcuggacaagguggaggccgaggugcagaucgaccggcugaucaccggccggcugcagagccugcagaccuacgugacccagcagcugauccgggccgccgagauccgggccagcgccaaccuggcagccaccaagaugagcgagugcgugcugggccagagcaagcggguggacuuuugcggcaagggcuaccaccugaugagcuucccccagagcgccccacacggcguggucuuccuccacgugacauacgugcccgcccaggagaagaacuucaccaccgcccccgccaucugccacgacggcaaggcucacuucccccgggagggaguguucgugagcaacggcacccacugguucgugacccagcggaacuucuacgagccccagauuaucaccaccgacaacaccuucgugagcggcaacugcgacguggugaucggcaucgugaacaacaccguguacgacccccugcagccugagcuggacagcuucaaggaggagcuggacaaguacuucaagaaccacaccagccccgacguggaucugggcgacaucagcggcaucaacgccagcguggugaacauccagaaggagaucgaccggcugaacgagguggccaagaaccugaacgagagccugaucgaccugcaggagcugggcaaguacgagcaguacaucaaguggcccugguacaucuggcugggcuucaucgccggccugaucgccaucgugauggugaccaucaugcugugcugcaugaccagcugcuguagcugccugaagggcugcugcagcugcggcagcugcugcaaguucgacgaggacgacagcgagccagugcugaagggcgugaagcugcacuacaccugaggacuaguuauaagacugacuagcccgaugggccucccaacgggcccuccuccccuccuugcaccgagagaucuaaaaaaaaaaaaaaaaaaaaaaaaaaaaaaaaaaaaaaaaaaaaaaaaaaaaaaaaaaaaaaaaaaaaaaaaaaaaaaaaaaaaaaaaaaaaaaaaaaaa

SEQ ID NO: 25892 - RNA, 4011 nt, Artificial Sequence
  SARS-CoV-2/Wuhan/WIV05/2019__EPI_ISL_402128 spike protein mRNA gc (1-1273)(D614G_M1229I)
aggagaaagcuuaccauguucguguuccuggugcugcugccccuggugagcagccagugcgugaaccugaccacccggacccagcugcccccugccuacaccaacagcuucacccggggcguguacuaccccgacaagguguuccggagcagcgugcugcacagcacccaggaccuguuccugcccuucuucagcaacgugaccugguuccacgccauccacgugagcggcaccaacggcaccaagcgguucgacaacccagugcugcccuucaacgacggcguguacuucgccagcaccgagaagucaaacaucauccggggcuggaucuucggcaccacccuggacagcaagacacagagccugcugaucgugaacaacgccaccaacguggugaucaaggugugcgaguuucaguucugcaacgaccccuuccugggcguguacuaccacaagaacaacaagagcuggauggagagcgaguuccgggucuacagcagcgcuaacaauugcaccuucgaguacgugagccagcccuuccugauggaccucgagggcaagcagggcaacuucaagaaccugcgggaguucguguucaagaacaucgauggcuacuucaagaucuacagcaagcacacccccaucaaccuggugcgggaccugccccagggauucagcgcccuggagccucugguggaccugcccaucggcaucaacaucaccagguuccagacccugcuggcccugcaccggagcuaccugacccccggcgacagcagcagcggcuggaccgccggcgccgccgcauacuacgugggcuaccugcagccacggaccuuccugcugaaguacaacgagaacggcaccaucaccgacgccguggacugcgcccuggacccccugagcgagaccaagugcacccuaaagagcuucaccguggagaagggcaucuaccagaccagcaacuuccgggugcagcccacugagagcaucgugcgguuccccaacauuaccaaccugugucccuucggcgagguguucaacgccacccgguucgccagcguguacgccuggaaccggaagcggaucagcaacugcguggccgacuacagcgugcuguacaacagcgccagcuucagcaccuucaagugcuacggcgugagcccuaccaagcugaacgaccugugcuucaccaacguguacgcugacagcuucgugauccggggcgacgaggugcggcagaucgcccccggccagaccggcaagaucgccgacuacaacuacaagcugcccgacgacuucaccggcugcgugaucgccuggaacagcaacaaccuggacagcaaggugggcggcaacuacaacuaccuguaccggcuguuccguaagagcaaccugaagccauucgagcgggacaucagcaccgagaucuaccaggccggcagcacccccugcaacgguguggagggcuuuaacugcuacuucccccugcagagcuacggcuuccagcccaccaacggcgugggcuaccagcccuaccgggugguggugcugagcuucgagcugcugcacgcccccgccaccgugugcggcccuaaaaagagcaccaaccuggugaagaacaagugcgugaacuucaauuucaacggccugaccggcaccggcgugcugaccgagagcaacaagaaguuccugcccuuccagcaguucggccgggauaucgccgacaccaccgacgcagugcgggacccccagacccuggagauccuggacaucaccccaugcagcuucggcggcgugagcgucaucacccccggcacaaacaccagcaaccagguggccgugcuguaccagggagugaacugcaccgaggugcccguggccauccacgccgaccagcugacccccaccuggcggguguacagcaccggcagcaacguguuccagacccgggccggcugccugaucggcgccgagcacgugaacaacuccuacgagugcgacauccccaucggcgcuggcaucugcgccagcuaccagacccagaccaacagcccccggcgggcccggagcguggccagccagagcaucaucgccuacaccaugagcuuaggcgccgagaacagcguggccuacagcaacaacagcaucgcgaucccuaccaacuucaccaucagcgugaccaccgagauacugcccgugagcaugaccaagaccagcguggacuguaccauguacaucugcggcgacagcaccgagugcagcaaccugcugcugcaguacggcagcuucugcacccagcugaaccgggcccugaccggcaucgccguggagcaggacaagaacacccaagagguguucgcccaggugaagcagaucuacaagacucccccaaucaaggacuucggcggcuucaacuucagccagauccugcccgaccccagcaagcccagcaagcggagcuucaucgaggaccugcuguucaacaaggugacccuggccgacgccggcuucaucaagcaguacggcgacugccugggggauaucgccgcucgggaccugaucugcgcccagaaguucaacggccugaccgugcugcccccucugcugaccgacgagaugaucgcccaguacaccagcgcccugcuugccggcaccaucaccagcggcuggaccuucggcgccggcgcagcccugcagauccccuucgccaugcagauggccuaccgguucaacggcaucggcgugacccagaacgugcuguacgagaaccagaagcugaucgccaaccaguucaacagcgccaucggcaagauccaggacagccugagcagcaccgccagcgcccugggcaagcugcaggacguggugaaccagaacgcucaggcccugaacacccuggugaagcagcugagcagcaacuucggcgccaucagcucagugcugaaugacauccugagcaggcuggacaagguggaggccgaggugcagaucgaccggcugaucaccggccggcugcagagccugcagaccuacgugacccagcagcugauccgggccgccgagauccgggccagcgccaaccuggcagccaccaagaugagcgagugcgugcugggccagagcaagcggguggacuuuugcggcaagggcuaccaccugaugagcuucccccagagcgccccacacggcgugguguuccuccacgucacauacgugcccgcccaggagaagaacuucaccaccgcccccgccauuugccacgacggcaaggcucacuucccccgggagggaguguucgugagcaacggcacccacugguucgugacccagcggaacuucuacgagccccagaucaucaccaccgacaacaccuucgugagcggcaacugcgacguggugaucggcaucgugaacaacaccguguacgacccccugcagccugagcuggacagcuucaaggaggagcuggacaaguacuucaagaaccacaccagccccgacguggaucugggcgacaucagcggcaucaacgccagcguggugaacauccagaaggagaucgaccggcugaacgagguggccaagaaccugaacgagagccugaucgaccugcaggagcugggcaaguacgagcaguacaucaaguggcccugguacaucuggcugggcuucaucgccggccugaucgccaucgugaucgugaccaucaugcugugcugcaugaccagcugcuguagcugccugaagggcugcugcagcugcggcagcugcugcaaguucgacgaggacgacagcgagccagugcugaagggcgugaagcugcacuacaccugaggacuaguuauaagacugacuagcccgaugggccucccaacgggcccuccuccccuccuugcaccgagagaucuaaaaaaaaaaaaaaaaaaaaaaaaaaaaaaaaaaaaaaaaaaaaaaaaaaaaaaaaaaaaaaaaaaaaaaaaaaaaaaaaaaaaaaaaaaaaaaaaaaaa

SEQ ID NO: 25893 - RNA, 4005 nt, Artificial Sequence
  SARS-CoV-2/Wuhan/WIV05/2019__EPI_ISL_402128 spike protein mRNA gc (1-1273)(H69del_V70del_A222V_Y453F_S477N_D614G_I692V)
aggagaaagcuuaccauguucguguuccuggugcugcugccccuggugagcagccagugcgugaaccugaccacccggacccagcugcccccugccuacaccaacagcuucacccggggcguguacuaccccgacaagguguuccggagcagcgugcugcacagcacccaggaccuguuccugcccuucuucagcaacgugaccugguuccacgccaucagcggcaccaacggcaccaagcgguucgacaacccagugcugcccuucaacgacggcguguacuucgccagcaccgagaagucaaacaucauccggggcuggaucuucggcaccacccuggacagcaagacacagagccugcugaucgugaacaacgccaccaacguggugaucaaggugugcgaguuucaguucugcaacgaccccuuccugggcguguacuaccacaagaacaacaagagcuggauggagagcgaguuccggguguacagcagcgcuaacaauugcaccuucgaguacgucagccagcccuuccugauggaccucgagggcaagcagggcaacuucaagaaccugcgggaguucguguucaagaacaucgauggcuacuucaagaucuacagcaagcacacccccaucaaccuggugcgggaccugccccagggauucagcgugcuggagccucugguggaccugcccaucggcaucaacaucaccagguuccagacccugcuggcccugcaccggagcuaccugacccccggcgacagcagcagcggcuggaccgccggcgccgccgccuacuacgugggcuaccugcagccacggaccuuccugcugaaguacaacgagaacggcaccaucaccgacgcaguggacugcgcccuggacccccugagcgagaccaagugcacccuaaagagcuucaccguggagaagggcaucuaccagaccagcaacuuccgggugcagcccacugagagcaucgugcgguuccccaacauuaccaaccugugucccuucggcgagguguucaacgccacccgguucgccagcguguacgccuggaaccggaagcggaucagcaacugcguggccgacuacagcgugcuguacaacagcgccagcuucagcaccuucaagugcuacggcgugagcccuaccaagcugaacgaccugugcuucaccaacguguacgccgacagcuucgugauccggggcgacgaggugcggcagaucgcucccggccagaccggcaagaucgccgacuacaacuacaagcugcccgacgacuucaccggcugcgugaucgccuggaacagcaacaaccuggacagcaaggugggcggcaacuacaacuaccuguuccggcuguuccguaagagcaaccugaagccauuugagcgggacaucagcaccgagaucuaccaggccggcaacacccccugcaacgguguggagggcuucaacugcuacuucccccugcagagcuacggcuuccagcccaccaacggcgugggcuaccagcccuaccgggugguggugcugagcuucgagcugcugcacgcccccgccaccgugugcggcccuaaaaagagcaccaaccuggugaagaacaagugcgugaauuucaacuucaacggccugaccggcaccggcgugcugaccgagagcaacaagaaguuccugcccuuccagcaguucggccgggauaucgccgacaccaccgacgccgugcgggacccccagacccuggagauccuggacaucaccccaugcagcuucggcggcgugagcgucaucacccccggcacaaacaccagcaaccagguggcagugcuguaccagggagugaacugcaccgaggugcccguggccauccacgccgaccagcugacccccaccuggcggguguacagcaccggcagcaacguguuccagacccgggccggcugccugaucggcgccgagcacgugaacaacagcuacgagugcgacauccccaucggcgccggcaucugcgcuuccuaccagacccagaccaacagcccccggcgggcccggagcguggccagccagagcgugaucgccuacaccaugagcuuaggcgccgagaacagcguggccuacagcaacaacagcaucgccaucccuaccaacuucaccaucagcgugaccaccgagauccugcccgugagcaugaccaagaccagcguggacuguaccauguacauaugcggcgacagcaccgagugcagcaaccugcugcugcaguacggcagcuucugcacccagcugaaccgggcgcugaccggcaucgccguggagcaggacaagaacacccaagagguguucgcccaggugaagcagaucuacaagacucccccaaucaaggacuucggcggcuucaacuucagccagauccugcccgaccccagcaagcccagcaagcggagcuucaucgaggaccugcuguucaacaaggugacccuggccgacgccggcuucaucaagcaguacggcgacugccugggggauaucgccgcccgggaccugaucugcgcucagaaguucaacggccugaccgugcugcccccucugcugaccgacgagaugaucgcccaguacaccagcgcccugcuugccggcaccaucaccagcggcuggaccuucggcgccggcgccgcacugcagauccccuucgccaugcagauggccuaccgguucaacggcaucggcgugacccagaacgugcuguacgagaaccagaagcugaucgccaaccaguucaacagcgccaucggcaagauccaggacagccugagcagcaccgccagcgcccugggcaagcugcaggacguggugaaccagaacgcccaggcucugaacacccuggugaagcagcugagcagcaauuuuggcgccaucagcagcgugcugaacgacauccugucaaggcuggacaagguggaggccgaggugcagaucgaccggcugaucaccggccggcugcagagccugcagaccuacgugacccagcagcugauccgggccgccgagauccgggccagcgccaaccuggccgcaaccaagaugagcgagugcgugcugggccagagcaagcggguggacuucugcggcaagggcuaccaccugaugagcuucccccagagcgccccacacggcguggucuuccuccacgugacauacgugcccgcccaggagaagaacuucaccaccgcccccgccaucugccacgacggcaaggcccacuucccccgggagggaguguucgugagcaacggcacccacugguucgugacccagcggaacuucuacgagccccagauuaucaccaccgacaacaccuucgugagcggcaacugcgacguggugaucggcaucgugaacaacaccguguacgacccccugcagccugagcuggacagcuucaaggaggagcuggacaaguacuucaagaaccacaccagccccgacguggaucugggcgacaucagcggcaucaacgcuagcguggugaacauccagaaggagaucgaccggcugaacgagguggccaagaaccugaacgagagccugaucgaccugcaggagcugggcaaguacgagcaguacaucaaguggcccugguacaucuggcugggcuucaucgccggccugaucgccaucgugauggugaccaucaugcugugcugcaugaccagcugcuguagcugccugaagggcugcugcagcugcggcagcugcugcaaguucgacgaggacgacagcgagccagugcugaagggcgugaagcugcacuacaccugaggacuaguuauaagacugacuagcccgaugggccucccaacgggcccuccuccccuccuugcaccgagagaucuaaaaaaaaaaaaaaaaaaaaaaaaaaaaaaaaaaaaaaaaaaaaaaaaaaaaaaaaaaaaaaaaaaaaaaaaaaaaaaaaaaaaaaaaaaaaaaaaaaaa

SEQ ID NO: 25894 - RNA, 4005 nt, Artificial Sequence
  SARS-CoV-2/Wuhan/WIV05/2019__EPI_ISL_402128 spike protein mRNA gc (1-1273)(H69del_V70del_Y453F_D614G_I692V_M1229I)
aggagaaagcuuaccauguucguguuccuggugcugcugccccuggugagcagccagugcgugaaccugaccacccggacccagcugcccccugccuacaccaacagcuucacccggggcguguacuaccccgacaagguguuccggagcagcgugcugcacagcacccaggaccuguuccugcccuucuucagcaacgugaccugguuccacgccaucagcggcaccaacggcaccaagcgguucgacaacccagugcugcccuucaacgacggcguguacuucgccagcaccgagaagucaaacaucauccggggcuggaucuucggcaccacccuggacagcaagacacagagccugcugaucgugaacaacgccaccaacguggugaucaaggugugcgaguuucaguucugcaacgaccccuuccugggcguguacuaccacaagaacaacaagagcuggauggagagcgaguuccggguguacagcagcgcuaacaauugcaccuucgaguacgucagccagcccuuccugauggaccucgagggcaagcagggcaacuucaagaaccugcgggaguucguguucaagaacaucgauggcuacuucaagaucuacagcaagcacacccccaucaaccuggugcgggaccugccccagggauucagcgcccuggagccucugguggaccugcccaucggcaucaacaucaccagguuccagacccugcuggcccugcaccggagcuaccugacccccggcgacagcagcagcggcuggaccgccggcgccgccgcauacuacgugggcuaccugcagccacggaccuuccugcugaaguacaacgagaacggcaccaucaccgacgccguggacugcgcccuggacccccugagcgagaccaagugcacccuaaagagcuucaccguggagaagggcaucuaccagaccagcaacuuccgggugcagcccacugagagcaucgugcgguuccccaacauuaccaaccugugucccuucggcgagguguucaacgccacccgguucgccagcguguacgccuggaaccggaagcggaucagcaacugcguggccgacuacagcgugcuguacaacagcgccagcuucagcaccuucaagugcuacggcgugagcccuaccaagcugaacgaccugugcuucaccaacguguacgcugacagcuucgugauccggggcgacgaggugcggcagaucgcccccggccagaccggcaagaucgccgacuacaacuacaagcugcccgacgacuucaccggcugcgugaucgccuggaacagcaacaaccuggacagcaaggugggcggcaacuacaacuaccuguuccggcuguuccguaagagcaaccugaagccauuugagcgggacaucagcaccgagaucuaccaggccggcagcacccccugcaacgguguggagggcuucaacugcuacuucccccugcagagcuacggcuuccagcccaccaacggcgugggcuaccagcccuaccgggugguggugcugagcuucgagcugcugcacgcccccgccaccgugugcggcccuaaaaagagcaccaaccuggugaagaacaagugcgugaacuucaauuucaacggccugaccggcaccggcgugcugaccgagagcaacaagaaguuccugcccuuccagcaguucggccgggauaucgccgacaccaccgacgcagugcgggacccccagacccuggagauccuggacaucaccccaugcagcuucggcggcgugagcgugaucacccccggcacaaacaccagcaaccaggucgccgugcuguaccagggagugaacugcaccgaggugcccguggccauccacgccgaccagcugacccccaccuggcggguguacagcaccggcagcaacguguuccagacccgggccggcugccugaucggcgccgagcacgugaacaacuccuacgagugcgacauccccaucggcgcuggcaucugcgccagcuaccagacccagaccaacagcccccggcgggcccggagcguggccagccagagcgugaucgccuacaccaugagcuuaggcgccgagaacagcguggccuacagcaacaacagcaucgcgaucccuaccaacuucaccaucagcgugaccaccgagauccugcccgugagcaugaccaagaccagcguggacuguaccauguacauaugcggcgacagcaccgagugcagcaaccugcugcugcaguacggcagcuucugcacccagcugaaccgggcccugaccggcaucgccguggagcaggacaagaacacccaagagguguucgcccaggugaagcagaucuacaagacucccccaaucaaggacuucggcggcuucaacuucagccagauccugcccgaccccagcaagcccagcaagcggagcuucaucgaggaccugcuguucaacaaggugacccuggccgacgccggcuucaucaagcaguacggcgacugccugggggauaucgccgcucgggaccugaucugcgcccagaaguucaacggccugaccgugcugcccccucugcugaccgacgagaugaucgcccaguacaccagcgcccugcuugccggcaccaucaccagcggcuggaccuucggcgccggcgcagcccugcagauccccuucgccaugcagauggccuaccgguucaacggcaucggcgugacccagaacgugcuguacgagaaccagaagcugaucgccaaccaguucaacagcgccaucggcaagauccaggacagccugagcagcaccgccagcgcccugggcaagcugcaggacguggugaaccagaacgcucaggcccugaacacccuggugaagcagcugagcagcaacuuuggcgccaucagcucagugcugaaugacauccugagcaggcuggacaagguggaggccgaggugcagaucgaccggcugaucaccggccggcugcagagccugcagaccuacgugacccagcagcugauccgggccgccgagauccgggccagcgccaaccuggcagccaccaagaugagcgagugcgugcugggccagagcaagcggguggacuucugcggcaagggcuaccaccugaugagcuucccccagagcgccccacacggcgugguguuccuccacgucacauacgugcccgcccaggagaagaacuucaccaccgcccccgccaucugccacgacggcaaggcucacuucccccgggagggaguguucgugagcaacggcacccacugguucgugacccagcggaacuucuacgagccccagauuaucaccaccgacaacaccuucgugagcggcaacugcgacguggugaucggcaucgugaacaacaccguguacgacccccugcagccugagcuggacagcuucaaggaggagcuggacaaguacuucaagaaccacaccagccccgacguggaucugggcgacaucagcggcaucaacgccagcguggugaacauccagaaggagaucgaccggcugaacgagguggccaagaaccugaacgagagccugaucgaccugcaggagcugggcaaguacgagcaguacaucaaguggcccugguacaucuggcugggcuucaucgccggccugaucgccaucgugaucgugaccaucaugcugugcugcaugaccagcugcuguagcugccugaagggcugcugcagcugcggcagcugcugcaaguucgacgaggacgacagcgagccagugcugaagggcgugaagcugcacuacaccugaggacuaguuauaagacugacuagcccgaugggccucccaacgggcccuccuccccuccuugcaccgagagaucuaaaaaaaaaaaaaaaaaaaaaaaaaaaaaaaaaaaaaaaaaaaaaaaaaaaaaaaaaaaaaaaaaaaaaaaaaaaaaaaaaaaaaaaaaaaaaaaaaaaa

SEQ ID NO: 25895 - RNA, 4002 nt, Artificial Sequence
  SARS-CoV-2/Wuhan/WIV05/2019__EPI_ISL_402128 spike protein mRNA gc (1-1273)(H69del_V70del_Y144del_N501Y_A570D_D614G_P681H_T716I_S982 A_D1118H)
aggagaaagcuuaccauguucguguuccuggugcugcugccccuggugagcagccagugcgugaaccugaccacccggacccagcugcccccugccuacaccaacagcuucacccggggcguguacuaccccgacaagguguuccggagcagcgugcugcacagcacccaggaccuguuccugcccuucuucagcaacgugaccugguuccacgccaucagcggcaccaacggcaccaagcgguucgacaacccagugcugcccuucaacgacggcguguacuucgccagcaccgagaagucaaacaucauccggggcuggaucuucggcaccacccuggacagcaagacacagagccugcugaucgugaacaacgccaccaacguggugaucaaggugugcgaguuucaguucugcaacgaccccuuccugggcguguaccacaagaacaacaagagcuggauggagagcgaguuccggguguacagcagcgcuaacaauugcaccuucgaguacgucagccagcccuuccugauggaccucgagggcaagcagggcaacuucaagaaccugcgggaguucguguucaagaacaucgauggcuacuucaagaucuacagcaagcacacccccaucaaccuggugcgggaccugccccagggauucagcgcccuggagccucugguggaccugcccaucggcaucaacaucaccagguuccagacccugcuggcccugcaccggagcuaccugacccccggcgacagcagcagcggcuggaccgccggcgccgccgcauacuacgugggcuaccugcagccacggaccuuccugcugaaguacaacgagaacggcaccaucaccgacgccguggacugcgcccuggacccccugagcgagaccaagugcacccuaaagagcuucaccguggagaagggcaucuaccagaccagcaacuuccgggugcagcccacugagagcaucgugcgguuccccaacauuaccaaccugugucccuucggcgagguguucaacgccacccgguucgccagcguguacgccuggaaccggaagcggaucagcaacugcguggccgacuacagcgugcuguacaacagcgccagcuucagcaccuucaagugcuacggcgugagcccuaccaagcugaacgaccugugcuucaccaacguguacgcugacagcuucgugauccggggcgacgaggugcggcagaucgcccccggccagaccggcaagaucgccgacuacaacuacaagcugcccgacgacuucaccggcugcgugaucgccuggaacagcaacaaccuggacagcaaggugggcggcaacuacaacuaccuguaccggcuguuccguaagagcaaccugaagccauucgagcgggacaucagcaccgagaucuaccaggccggcagcacccccugcaacgguguggagggcuuuaacugcuacuucccccugcagagcuacggcuuccagcccaccuacggcgugggcuaccagcccuaccgggugguggugcugagcuucgagcugcugcacgcccccgccaccgugugcggcccuaaaaagagcaccaaccuggugaagaacaagugcgugaacuucaacuucaauggccugaccggcaccggcgugcugaccgagagcaacaagaaguuccugcccuuccagcaguucggccgggauaucgacgacaccaccgacgccgugcgggacccccagacccuggagauccuggacaucaccccaugcagcuucggcggcgugagcgugaucacccccggcacaaacaccagcaaccaggucgcagugcuguaccagggagugaacugcaccgaggugcccguggccauccacgccgaccagcugacccccaccuggcggguguacagcaccggcagcaacguguuccagacccgggccggcugccugaucggcgccgagcacgugaacaacuccuacgagugcgacauccccaucggcgccggcaucugcgcuagcuaccagacccagaccaacagccaccggcgggcccggagcguggccagccagagcaucaucgccuacaccaugagcuuaggcgccgagaacagcguggccuacagcaacaacagcaucgccauccccaucaacuucaccauaagcgugaccaccgagauccugccugugagcaugaccaagaccagcguggacuguaccauguacaucugcggcgacagcaccgagugcagcaaccugcugcugcaguacggcagcuucugcacccagcugaaccgggcgcugaccggcaucgccguggagcaggacaagaacacccaagagguguucgcccaggugaagcagaucuacaagaccccacccaucaaggacuucggcggcuucaacuucagccagauccugcccgaccccagcaagcccagcaagcggagcuucaucgaggaccugcuguucaacaaggugacucuggccgacgccggcuucaucaagcaguacggcgauugccugggggacaucgccgcccgggaccugaucugcgcucagaaguucaacggccugaccgugcugccuccccugcugaccgacgagaugaucgcccaguacaccagcgcccugcuugccggcaccaucaccagcggcuggaccuucggcgccggcgccgcacugcagauccccuucgccaugcagauggccuaccgguucaacggcaucggcgugacccagaacgugcuguacgagaaccagaagcugaucgccaaccaguucaacagcgccaucggcaagauccaggacagccugagcagcaccgccagcgcccugggcaagcugcaggacguggugaaccagaacgcccaggcucugaacacccuggugaagcagcugagcagcaacuucggcgccaucagcucagugcugaacgacauccuggccaggcuggacaagguggaggccgaggugcagaucgaccggcugaucaccggccggcugcagagccugcagaccuacgugacccagcagcugauccgggccgccgagauucgggccagcgccaaucuggcagccaccaagaugagcgagugcgugcugggccagagcaagcggguggacuuuugcggcaagggcuaccaccugaugagcuucccccagagcgcuccccacggcgugguguuccuccacgugaccuacgucccagcccaggagaagaacuucacaaccgcccccgccaucugccacgacggcaaggcccacuucccccgggagggaguguucgugagcaacggcacccacugguucgugacccagcggaacuucuacgagccccagaucaucaccacccacaacaccuucgugagcggcaacugcgacguggugaucggcaucgugaacaacaccguguacgacccccugcagcccgagcuggacagcuucaaggaggagcuggacaaguacuucaagaaccacaccagcccugacguggaucugggcgacaucagcggcaucaacgccagcguggugaacauccagaaggagaucgaccggcugaacgagguggccaagaaccugaacgagagccugaucgaccugcaggagcugggcaaguacgagcaguacaucaaguggcccugguacaucuggcugggcuucaucgccggccugaucgccaucgugauggugaccaucaugcugugcugcaugaccagcugcuguagcugccugaagggcugcugcagcugcggcagcugcugcaaguucgacgaggacgacagcgagcccgugcugaagggcgugaagcugcacuacaccugaggacuaguuauaagacugacuagcccgaugggccucccaacgggcccuccuccccuccuugcaccgagagaucuaaaaaaaaaaaaaaaaaaaaaaaaaaaaaaaaaaaaaaaaaaaaaaaaaaaaaaaaaaaaaaaaaaaaaaaaaaaaaaaaaaaaaaaaaaaaaaaaaaaa

SEQ ID NO: 25896 - RNA, 4011 nt, Artificial Sequence
  SARS-CoV-2/Wuhan/WIV05/2019__EPI_ISL_402128 spike protein mRNA gc (1-1273)(K417N_E484K_N501Y_D614G)
aggagaaagcuuaccauguucguguuccuggugcugcugccccuggugagcagccagugcgugaaccugaccacccggacccagcugcccccugccuacaccaacagcuucacccggggcguguacuaccccgacaagguguuccggagcagcgugcugcacagcacccaggaccuguuccugcccuucuucagcaacgugaccugguuccacgccauccacgugagcggcaccaacggcaccaagcgguucgacaacccagugcugcccuucaacgacggcguguacuucgccagcaccgagaagucaaacaucauccggggcuggaucuucggcaccacccuggacagcaagacacagagccugcugaucgugaacaacgccaccaacguggugaucaaggugugcgaguuucaguucugcaacgaccccuuccugggcguguacuaccacaagaacaacaagagcuggauggagagcgaguuccgggucuacagcagcgcuaacaauugcaccuucgaguacgugagccagcccuuccugauggaccucgagggcaagcagggcaacuucaagaaccugcgggaguucguguucaagaacaucgauggcuacuucaagaucuacagcaagcacacccccaucaaccuggugcgggaccugccccagggauucagcgcccuggagccucugguggaccugcccaucggcaucaacaucaccagguuccagacccugcuggcccugcaccggagcuaccugacccccggcgacagcagcagcggcuggaccgccggcgccgccgcauacuacgugggcuaccugcagccacggaccuuccugcugaaguacaacgagaacggcaccaucaccgacgccguggacugcgcccuggacccccugagcgagaccaagugcacccuaaagagcuucaccguggagaagggcaucuaccagaccagcaacuuccgggugcagcccacugagagcaucgugcgguuccccaacauuaccaaccugugucccuucggcgagguguucaacgccacccgguucgccagcguguacgccuggaaccggaagcggaucagcaacugcguggccgacuacagcgugcuguacaacagcgccagcuucagcaccuucaagugcuacggcgugagcccuaccaagcugaacgaccugugcuucaccaacguguacgcugacagcuucgugauccggggcgacgaggugcggcagaucgcccccggccagaccggcaacaucgccgacuacaacuacaagcugcccgacgacuucaccggcugcgugaucgccuggaacagcaacaaccuggacagcaaggugggcggcaacuacaacuaccuguaccggcuguuccguaagagcaaccugaagccauucgagcgggacaucagcaccgagaucuaccaggccggcagcacccccugcaacggugugaagggcuuuaacugcuacuucccccugcagagcuacggcuuccagcccaccuacggcgugggcuaccagcccuaccgggugguggugcugagcuucgagcugcugcacgcccccgccaccgugugcggcccuaaaaagagcaccaaccuggugaagaacaagugcgugaacuucaauuucaacggccugaccggcaccggcgugcugaccgagagcaacaagaaguuccugcccuuccagcaguucggccgggauaucgccgacaccaccgacgcagugcgggacccccagacccuggagauccuggacaucaccccaugcagcuucggcggcgugagcgucaucacccccggcacaaacaccagcaaccagguggccgugcuguaccagggagugaacugcaccgaggugcccguggccauccacgccgaccagcugacccccaccuggcggguguacagcaccggcagcaacguguuccagacccgggccggcugccugaucggcgccgagcacgugaacaacuccuacgagugcgacauccccaucggcgcuggcaucugcgccagcuaccagacccagaccaacagcccccggcgggcccggagcguggccagccagagcaucaucgccuacaccaugagcuuaggcgccgagaacagcguggccuacagcaacaacagcaucgcgaucccuaccaacuucaccaucagcgugaccaccgagauacugcccgugagcaugaccaagaccagcguggacuguaccauguacaucugcggcgacagcaccgagugcagcaaccugcugcugcaguacggcagcuucugcacccagcugaaccgggcccugaccggcaucgccguggagcaggacaagaacacccaagagguguucgcccaggugaagcagaucuacaagacucccccaaucaaggacuucggcggcuucaacuucagccagauccugcccgaccccagcaagcccagcaagcggagcuucaucgaggaccugcuguucaacaaggugacccuggccgacgccggcuucaucaagcaguacggcgacugccugggggauaucgccgcucgggaccugaucugcgcccagaaguucaacggccugaccgugcugcccccucugcugaccgacgagaugaucgcccaguacaccagcgcccugcuugccggcaccaucaccagcggcuggaccuucggcgccggcgcagcccugcagauccccuucgccaugcagauggccuaccgguucaacggcaucggcgugacccagaacgugcuguacgagaaccagaagcugaucgccaaccaguucaacagcgccaucggcaagauccaggacagccugagcagcaccgccagcgcccugggcaagcugcaggacguggugaaccagaacgcucaggcccugaacacccuggugaagcagcugagcagcaacuucggcgccaucagcucagugcugaaugacauccugagcaggcuggacaagguggaggccgaggugcagaucgaccggcugaucaccggccggcugcagagccugcagaccuacgugacccagcagcugauccgggccgccgagauccgggccagcgccaaccuggcagccaccaagaugagcgagugcgugcugggccagagcaagcggguggacuuuugcggcaagggcuaccaccugaugagcuucccccagagcgccccacacggcgugguguuccuccacgucacauacgugcccgcccaggagaagaacuucaccaccgcccccgccauuugccacgacggcaaggcucacuucccccgggagggaguguucgugagcaacggcacccacugguucgugacccagcggaacuucuacgagccccagaucaucaccaccgacaacaccuucgugagcggcaacugcgacguggugaucggcaucgugaacaacaccguguacgacccccugcagccugagcuggacagcuucaaggaggagcuggacaaguacuucaagaaccacaccagccccgacguggaucugggcgacaucagcggcaucaacgccagcguggugaacauccagaaggagaucgaccggcugaacgagguggccaagaaccugaacgagagccugaucgaccugcaggagcugggcaaguacgagcaguacaucaaguggcccugguacaucuggcugggcuucaucgccggccugaucgccaucgugauggugaccaucaugcugugcugcaugaccagcugcuguagcugccugaagggcugcugcagcugcggcagcugcugcaaguucgacgaggacgacagcgagccagugcugaagggcgugaagcugcacuacaccugaggacuaguuauaagacugacuagcccgaugggccucccaacgggcccuccuccccuccuugcaccgagagaucuaaaaaaaaaaaaaaaaaaaaaaaaaaaaaaaaaaaaaaaaaaaaaaaaaaaaaaaaaaaaaaaaaaaaaaaaaaaaaaaaaaaaaaaaaaaaaaaaaaaa

SEQ ID NO: 25897 - RNA, 4002 nt, Artificial Sequence
  SARS-CoV-2/Wuhan/WIV05/2019__EPI_ISL_402128 spike protein mRNA gc (1-1273)(L18F_D80A_D215G_L242del_A243del_L244del_R246I_K417N_E484 K_N501Y_D614G_A701V)
aggagaaagcuuaccauguucguguuccuggugcugcugccccuggugagcagccagugcgugaacuucaccacccggacccagcugcccccugccuacaccaacagcuucacccggggcguguacuaccccgacaagguguuccggagcagcgugcugcacagcacccaggaccuguuccugcccuucuucagcaacgugaccugguuccacgccauccacgugagcggcaccaacggcaccaagcgguucgccaacccagugcugcccuucaacgacggcguguacuucgccagcaccgagaagucaaacaucauccggggcuggaucuuuggcaccacccuggacagcaagacacagagccugcugaucgugaacaacgcuaccaacguggugaucaaggugugcgaguuccaguucugcaacgaccccuuccugggcguguacuaccacaagaacaacaagagcuggauggagagcgaguuccgggucuacagcagcgccaacaauugcaccuucgaguacgugagccagcccuuccugauggaccuggagggcaagcagggcaacuucaagaaccuccgggaguucguguucaagaacaucgacggcuacuucaagaucuacagcaagcacacccccaucaaccuggugcggggacugccccagggcuucagcgcccuggagccucugguggaucugcccaucggcaucaacaucaccagguuccagacccugcacaucagcuaccugacccccggcgacagcagcagcggcuggaccgccggcgccgccgcauacuacgugggcuaccugcagccacggaccuuccugcugaaguacaacgagaacggcaccaucaccgacgccguggacugcgcccuggacccccugagcgagaccaagugcacccuuaagagcuucaccguggagaagggcaucuaccagaccagcaacuuccgggugcagcccacugagagcauugugcgguuccccaacaucaccaaccugugucccuucggcgagguguucaacgccacccgguucgccagcguguacgccuggaaccggaagcggaucagcaacugcguggccgacuacagcgugcuguacaacagcgccagcuucagcaccuucaagugcuacggcgugagcccuaccaagcugaacgaccugugcuucaccaacguguacgcugacagcuucgugauccggggcgacgaggugcggcagaucgcccccggccagaccggcaacaucgccgacuacaacuacaagcugcccgacgacuucaccggcugcgugaucgccuggaacagcaacaaccuggacagcaaggugggcggcaacuacaacuaccuguaccggcuauuccguaagagcaaccugaagccauuugagcgggacaucagcaccgagaucuaccaggccgguagcacccccugcaacggcgugaagggcuucaacugcuacuucccccugcagagcuacggcuuccagcccaccuacggcgugggcuaccagcccuaccgggugguggugcugagcuucgagcugcugcacgcccccgccaccgugugcggcccuaaaaagagcaccaaccuggugaagaacaagugcgugaacuucaauuucaacggccugaccggcaccggcgugcugaccgagagcaacaagaaguuccugcccuuccagcaguucggccgggacaucgccgacaccaccgaugcagugcgggacccccagacccuggagauccuggacaucaccccaugcagcuucggcggcgugagcgucaucacccccggaacaaacaccagcaaccagguggccgugcuguaccagggcgugaacugcaccgaggugcccguggccauccacgccgaccagcugacccccaccuggcggguguacagcaccggcagcaacguguuccagacccgggccggcugccugaucggcgccgagcacgugaacaacuccuacgagugcgacauccccaucggcgcuggcaucugcgccagcuaccagacccagaccaacagcccccggcgggcccggagcguggccagccagagcaucaucgccuacaccaugagccugggcguggagaacagcguggccuacagcaacaacagcaucgccaucccuaccaacuucaccauaagcgugaccaccgagauccugcccgugagcaugaccaagaccagcguggacuguaccauguacaucugcggcgacagcaccgagugcagcaaccuguuacugcaguacggcagcuucugcacccagcugaaccgggcgcugaccggcaucgccguggagcaggacaagaacacccaagagguguucgcccaggugaagcagaucuacaagacucccccaaucaaggacuucggcggcuucaacuucagccagauccugcccgaccccagcaagcccagcaagcggagcuucaucgaggaccugcuguucaacaaggugacccuggccgacgccggcuucaucaagcaguacggggacugccugggcgacaucgccgcccgggaccugaucugcgcucagaaguucaacggccugaccgugcugcccccucugcugaccgaugagaugaucgcccaguacaccagcgcccugcuggccggcaccaucaccagcggcuggaccuucggcgccggcgccgcacugcagauccccuucgccaugcagauggccuaccgguucaacggcaucggcgugacccagaacgugcuguacgagaaccagaagcugaucgccaaccaguucaacagcgccaucggcaagauccaggacagccugagcagcaccgccagcgcccugggcaagcugcaggacguggugaaccagaacgcccaggcucugaacacccuggugaagcagcugagcagcaacuuuggcgccaucagcucagugcugaaugacauccugagccggcuggacaagguggaggccgaggugcagaucgacaggcugaucaccggccggcugcagagccugcagaccuacgugacccagcagcugauccgggccgccgagauucgggccagcgccaaccuggccgcaaccaagaugagcgagugcgugcugggccagagcaagcggguggacuucugcggcaagggcuaccaccugaugagcuucccccagagcgccccacacggcguggucuuccugcacgugacauacgugcccgcccaggagaagaacuucaccaccgcccccgccaucugccacgacggaaaggcccacuucccccgggagggcguguucgugagcaacggcacccacugguucgugacccagcggaacuucuacgagccccagaucaucaccaccgacaacaccuucgugagcggcaacugcgacguggugaucggcaucgugaacaacaccguguacgacccccugcagccugagcuggacagcuucaaggaggagcucgacaaguacuucaagaaccacaccagccccgacguggaccugggcgacaucagcggcaucaacgcuagcguggugaacauccagaaggagaucgaucggcugaacgagguggccaagaaccugaacgagagccugaucgaccugcaggagcugggcaaguacgagcaguacaucaaguggcccugguacaucuggcugggcuucaucgccggccugaucgccaucgugauggugaccaucaugcugugcugcaugaccagcugcuguagcugccugaagggcugcugcagcugcggcagcugcugcaaguucgacgaggacgacagcgagccagugcugaagggcgugaagcugcacuacaccugaggacuaguuauaagacugacuagcccgaugggccucccaacgggcccuccuccccuccuugcaccgagagaucuaaaaaaaaaaaaaaaaaaaaaaaaaaaaaaaaaaaaaaaaaaaaaaaaaaaaaaaaaaaaaaaaaaaaaaaaaaaaaaaaaaaaaaaaaaaaaaaaaaaa

SEQ ID NO: 25898 - RNA, 4011 nt, Artificial Sequence
  SARS-CoV-2/Wuhan/WIV05/2019__EPI_ISL_402128 spike protein mRNA gc (1-1273)(E484K_D614G)
aggagaaagcuuaccauguucguguuccuggugcugcugccccuggugagcagccagugcgugaaccugaccacccggacccagcugcccccugccuacaccaacagcuucacccggggcguguacuaccccgacaagguguuccggagcagcgugcugcacagcacccaggaccuguuccugcccuucuucagcaacgugaccugguuccacgccauccacgugagcggcaccaacggcaccaagcgguucgacaacccagugcugcccuucaacgacggcguguacuucgccagcaccgagaagucaaacaucauccggggcuggaucuucggcaccacccuggacagcaagacacagagccugcugaucgugaacaacgccaccaacguggugaucaaggugugcgaguuucaguucugcaacgaccccuuccugggcguguacuaccacaagaacaacaagagcuggauggagagcgaguuccgggucuacagcagcgcuaacaauugcaccuucgaguacgugagccagcccuuccugauggaccucgagggcaagcagggcaacuucaagaaccugcgggaguucguguucaagaacaucgauggcuacuucaagaucuacagcaagcacacccccaucaaccuggugcgggaccugccccagggauucagcgcccuggagccucugguggaccugcccaucggcaucaacaucaccagguuccagacccugcuggcccugcaccggagcuaccugacccccggcgacagcagcagcggcuggaccgccggcgccgccgcauacuacgugggcuaccugcagccacggaccuuccugcugaaguacaacgagaacggcaccaucaccgacgccguggacugcgcccuggacccccugagcgagaccaagugcacccuaaagagcuucaccguggagaagggcaucuaccagaccagcaacuuccgggugcagcccacugagagcaucgugcgguuccccaacauuaccaaccugugucccuucggcgagguguucaacgccacccgguucgccagcguguacgccuggaaccggaagcggaucagcaacugcguggccgacuacagcgugcuguacaacagcgccagcuucagcaccuucaagugcuacggcgugagcccuaccaagcugaacgaccugugcuucaccaacguguacgcugacagcuucgugauccggggcgacgaggugcggcagaucgcccccggccagaccggcaagaucgccgacuacaacuacaagcugcccgacgacuucaccggcugcgugaucgccuggaacagcaacaaccuggacagcaaggugggcggcaacuacaacuaccuguaccggcuguuccguaagagcaaccugaagccauucgagcgggacaucagcaccgagaucuaccaggccggcagcacccccugcaacggugugaagggcuuuaacugcuacuucccccugcagagcuacggcuuccagcccaccaacggcgugggcuaccagcccuaccgggugguggugcugagcuucgagcugcugcacgcccccgccaccgugugcggcccuaaaaagagcaccaaccuggugaagaacaagugcgugaacuucaauuucaacggccugaccggcaccggcgugcugaccgagagcaacaagaaguuccugcccuuccagcaguucggccgggauaucgccgacaccaccgacgcagugcgggacccccagacccuggagauccuggacaucaccccaugcagcuucggcggcgugagcgucaucacccccggcacaaacaccagcaaccagguggccgugcuguaccagggagugaacugcaccgaggugcccguggccauccacgccgaccagcugacccccaccuggcggguguacagcaccggcagcaacguguuccagacccgggccggcugccugaucggcgccgagcacgugaacaacuccuacgagugcgacauccccaucggcgcuggcaucugcgccagcuaccagacccagaccaacagcccccggcgggcccggagcguggccagccagagcaucaucgccuacaccaugagcuuaggcgccgagaacagcguggccuacagcaacaacagcaucgcgaucccuaccaacuucaccaucagcgugaccaccgagauacugcccgugagcaugaccaagaccagcguggacuguaccauguacaucugcggcgacagcaccgagugcagcaaccugcugcugcaguacggcagcuucugcacccagcugaaccgggcccugaccggcaucgccguggagcaggacaagaacacccaagagguguucgcccaggugaagcagaucuacaagacucccccaaucaaggacuucggcggcuucaacuucagccagauccugcccgaccccagcaagcccagcaagcggagcuucaucgaggaccugcuguucaacaaggugacccuggccgacgccggcuucaucaagcaguacggcgacugccugggggauaucgccgcucgggaccugaucugcgcccagaaguucaacggccugaccgugcugcccccucugcugaccgacgagaugaucgcccaguacaccagcgcccugcuugccggcaccaucaccagcggcuggaccuucggcgccggcgcagcccugcagauccccuucgccaugcagauggccuaccgguucaacggcaucggcgugacccagaacgugcuguacgagaaccagaagcugaucgccaaccaguucaacagcgccaucggcaagauccaggacagccugagcagcaccgccagcgcccugggcaagcugcaggacguggugaaccagaacgcucaggcccugaacacccuggugaagcagcugagcagcaacuucggcgccaucagcucagugcugaaugacauccugagcaggcuggacaagguggaggccgaggugcagaucgaccggcugaucaccggccggcugcagagccugcagaccuacgugacccagcagcugauccgggccgccgagauccgggccagcgccaaccuggcagccaccaagaugagcgagugcgugcugggccagagcaagcggguggacuuuugcggcaagggcuaccaccugaugagcuucccccagagcgccccacacggcgugguguuccuccacgucacauacgugcccgcccaggagaagaacuucaccaccgcccccgccauuugccacgacggcaaggcucacuucccccgggagggaguguucgugagcaacggcacccacugguucgugacccagcggaacuucuacgagccccagaucaucaccaccgacaacaccuucgugagcggcaacugcgacguggugaucggcaucgugaacaacaccguguacgacccccugcagccugagcuggacagcuucaaggaggagcuggacaaguacuucaagaaccacaccagccccgacguggaucugggcgacaucagcggcaucaacgccagcguggugaacauccagaaggagaucgaccggcugaacgagguggccaagaaccugaacgagagccugaucgaccugcaggagcugggcaaguacgagcaguacaucaaguggcccugguacaucuggcugggcuucaucgccggccugaucgccaucgugauggugaccaucaugcugugcugcaugaccagcugcuguagcugccugaagggcugcugcagcugcggcagcugcugcaaguucgacgaggacgacagcgagccagugcugaagggcgugaagcugcacuacaccugaggacuaguuauaagacugacuagcccgaugggccucccaacgggcccuccuccccuccuugcaccgagagaucuaaaaaaaaaaaaaaaaaaaaaaaaaaaaaaaaaaaaaaaaaaaaaaaaaaaaaaaaaaaaaaaaaaaaaaaaaaaaaaaaaaaaaaaaaaaaaaaaaaaa

SEQ ID NO: 25899 - RNA, 4011 nt, Artificial Sequence
  SARS-CoV-2/Wuhan/WIV05/2019__EPI_ISL_402128 spike protein mRNA gc (1-1273)(L18F_T20N_P26S_D138Y_R190S_K417T_E484K_N501Y_D614G_H655Y _T1027I)
aggagaaagcuuaccauguucguguuccuggugcugcugccccuggugagcagccagugcgugaacuucaccaaccggacccagcugcccagcgccuacaccaacagcuucacccggggcguguacuacccugacaagguguuccggagcagcgugcugcacagcacccaggaccuguuccugcccuucuucagcaacgugaccugguuccacgccauccacgugagcggcaccaacggcaccaagcgguucgacaaccccgugcugccauucaacgacggcguguacuucgccagcaccgagaagucaaacaucauccggggcuggaucuuuggcaccacccuggacagcaagacccagagccugcugaucgugaacaacgccacaaacguggugaucaaggugugcgaguuccaguucugcaacuaccccuuccugggcguguacuaccacaagaacaacaagagcuggauggagagcgaguuccgggucuacagcagcgcuaauaacugcaccuucgaguacgugagccagcccuuccugauggaccuggagggcaagcagggcaacuucaagaaccucagcgaguucguguucaagaacaucgacggcuacuucaagaucuacagcaagcacacccccaucaaccuggugcgggaucugccccagggauucagcgcccuggagccccugguggaccugccuaucggcaucaacaucacccgguuccagacccugcuggcccugcacaggagcuaccugacccccggcgacagcagcagcggcuggaccgccggcgccgccgcauacuacgugggcuaccugcagccccggaccuuccugcugaaguacaacgagaacggcaccaucaccgacgccguggacugcgcccuggacccacugagcgagaccaagugcacccuaaagagcuucaccguggagaagggcaucuaccagaccagcaacuuccgggugcagcccaccgagagcaucgugcgguuccccaacauuacuaaccugugucccuucggcgagguguucaacgccacccgguucgccagcguguacgccuggaaccggaagcggaucagcaacugcguggccgacuacagcgugcuguacaacagcgccagcuucagcaccuucaagugcuacggcgugagccccaccaagcugaacgaccugugcuucaccaacguguacgcugacagcuucgugauccggggcgacgaggugcggcagaucgccccuggccagaccggcaccaucgccgacuacaacuacaagcugcccgacgacuucaccggcugcgugaucgccuggaacagcaacaaccuggacagcaaggugggcggcaacuacaacuaccuguaccggcuguuccguaagagcaaccugaagcccuuugagcgggacaucagcaccgagaucuaccaggccggcagcaccccaugcaacggugugaagggcuucaacugcuacuucccccugcagagcuacggcuuccagcccaccuacggcgugggcuaccagcccuaccgggugguggugcugagcuucgagcugcugcacgcccccgccaccgugugcggccccaaaaagagcaccaaccuggugaagaacaagugcgugaacuucaauuucaacggccugaccggcaccggcgugcugaccgagagcaacaagaaguuccugccuuuccagcaguucggccgggacaucgccgauaccaccgacgcagugcgggacccccagacccuggagauccuggacaucacccccugcagcuucggcggcgugagcgucaucaccccaggcacaaacaccagcaaccagguggccgugcuguaccagggagugaacugcaccgaggugcccguggccauccacgccgaccagcugacccccaccuggcggguguacuccaccggcagcaacguguuccagacccgggccggcugccugaucggcgccgaguacgugaacaacagcuacgagugcgacauccccaucggcgcuggcaucugcgccagcuaccagacccagaccaacagcccccggcgggcccggagcguggccagccagagcaucaucgccuacaccaugagccugggcgccgagaacagcguggccuacagcaacaacagcaucgcgauccccaccaacuucaccaucagcgugaccaccgagauauuaccugugagcaugaccaagaccagcguggacuguaccauguacaucugcggcgacagcaccgagugcagcaaccugcugcugcaguacggcagcuucugcacccagcugaaccgggcccugaccggcaucgccguggagcaggacaagaacacccaagagguguucgcccaggugaagcagaucuacaagacuccacccaucaaggacuucggcggcuucaacuucagccagauccugcccgaccccagcaagcccagcaagcggagcuucaucgaggaccugcuguucaacaaggugacccuggccgacgccggcuucaucaagcaguacggcgacugccugggggacaucgccgcucgggaucugaucugcgcccagaaguucaacggccugaccgugcugccuccccugcugaccgacgagaugaucgcccaguacaccagcgcccugcuggccggcaccaucaccagcggcuggaccuucggcgccggcgcagcccuucagauccccuucgccaugcagauggccuaccgguucaacggcaucggcgugacccagaacgugcuguacgagaaccagaagcugaucgccaaccaguucaacagcgccaucggcaagauccaggacagccugagcagcaccgccagcgcccugggcaagcugcaggacguggugaaccagaacgcucaggcccugaacacccuggugaagcagcugagcucaaacuuuggcgccaucagcagcgugcugaaugacauccugagccggcuggacaagguggaggccgaggugcagaucgacaggcugaucaccggccggcugcagagccugcagaccuacgugacccagcagcugauccgggccgccgagauccgggccagcgccaaccuggcagccauuaagaugagcgagugcgugcugggccagagcaagcggguggacuucugcggcaagggcuaccaccugaugagcuucccccagagcgcuccccacggcgugguguuccugcacgucaccuacgugccagcccaggagaagaacuucacaaccgcccccgccaucugccacgacggcaaggcccacuucccccgggagggaguguucgugagcaacggcacccacugguucgugacccagcggaacuucuacgagccccagaucaucaccaccgacaacaccuucgugagcggcaacugcgacguggugaucggcaucgugaacaacaccguguacgacccccuccagcccgagcuggacagcuucaaggaggagcuggacaaguacuucaagaaccacaccagcccugacguggaccugggcgauaucagcggcaucaacgccagcguggugaacauccagaaggagaucgaccggcugaacgagguggccaagaaccugaacgagagccugaucgaccugcaggagcugggcaaguacgagcaguacaucaaguggcccugguacaucuggcugggcuucaucgccggccugaucgccaucgugauggugaccaucaugcugugcugcaugaccagcugcuguagcugccugaagggcugcugcagcugcggcagcugcugcaaguucgacgaggacgacagcgagcccgugcugaagggcgugaagcugcacuacaccugaggacuaguuauaagacugacuagcccgaugggccucccaacgggcccuccuccccuccuugcaccgagagaucuaaaaaaaaaaaaaaaaaaaaaaaaaaaaaaaaaaaaaaaaaaaaaaaaaaaaaaaaaaaaaaaaaaaaaaaaaaaaaaaaaaaaaaaaaaaaaaaaaaaa

SEQ ID NO: 25900 - RNA, 4011 nt, Artificial Sequence
  SARS-CoV-2/Wuhan/WIV05/2019__EPI_ISL_402128 spike protein mRNA gc (1-1273)(S13I_W152C_L452R_D614G)
aggagaaagcuuaccauguucguguuccuggugcugcugccccuggugagcauccagugcgugaaccugaccacccggacccagcugcccccugccuacaccaacagcuucacccggggcguguacuaccccgacaagguguuccggagcagcgugcugcacagcacccaggaccuguuccugcccuucuucagcaacgugaccugguuccacgccauccacgugagcggcaccaacggcaccaagcgguucgacaacccagugcugcccuucaacgacggcguguacuucgccagcaccgagaagucaaacaucauccggggcuggaucuucggcaccacccuggacagcaagacacagagccugcugaucgugaacaacgccaccaacguggugaucaaggugugcgaguuucaguucugcaacgaccccuuccugggcguguacuaccacaagaacaacaagagcugcauggagagcgaguuccgggucuacagcagcgcuaacaauugcaccuucgaguacgugagccagcccuuccugauggaccucgagggcaagcagggcaacuucaagaaccugcgggaguucguguucaagaacaucgauggcuacuucaagaucuacagcaagcacacccccaucaaccuggugcgggaccugccccagggauucagcgcccuggagccucugguggaccugcccaucggcaucaacaucaccagguuccagacccugcuggcccugcaccggagcuaccugacccccggcgacagcagcagcggcuggaccgccggcgccgccgcauacuacgugggcuaccugcagccacggaccuuccugcugaaguacaacgagaacggcaccaucaccgacgccguggacugcgcccuggacccccugagcgagaccaaguguacccuaaagagcuucaccguggagaagggcaucuaccagaccagcaacuuccgggugcagcccacugagagcauugugcgguuccccaacaucaccaaccugugccccuucggcgagguguucaacgccacccgguucgccagcguguacgccuggaaccggaagcggaucagcaacugcguggccgacuacagcgugcuguacaacagcgccagcuucagcaccuucaagugcuacggcgugagcccuaccaagcugaacgaccugugcuucaccaacguguacgcugacagcuucgugauccggggcgacgaggugcggcagaucgcccccggccagaccggcaagaucgccgacuacaacuacaagcugcccgacgacuucaccggcugcgugaucgccuggaacagcaacaaccuggacagcaaggugggcggcaacuacaacuaccgguaccggcuguuccguaagagcaaccugaagccauucgagcgggacaucagcaccgagaucuaccaggccggcagcacccccugcaacgguguggagggcuuuaacugcuacuucccccugcagagcuacggcuuccagcccaccaacggcgugggcuaccagcccuaccgggugguggugcugagcuucgagcugcugcacgcccccgccaccgugugcggcccuaaaaagagcaccaaccuggugaagaacaagugcgugaacuucaauuucaacggccugaccggcaccggcgugcugaccgagagcaacaagaaguuccugcccuuccagcaguucggccgggauaucgccgacaccaccgacgcagugcgggacccccagacccuggagauccuggacaucaccccaugcagcuucggcggcgugagcgucaucacccccggcacaaacaccagcaaccagguggccgugcuguaccagggagugaacugcaccgaggugcccguggccauccacgccgaccagcugacccccaccuggcggguguacagcaccggcagcaacguguuccagacccgggccggcugccugaucggcgccgagcacgugaacaacagcuacgagugcgacauccccaucggcgcuggcaucugugccuccuaccagacccagaccaacagcccccggcgggcccggagcguggccagccagagcaucaucgccuacaccaugagccugggcgccgagaacagcguggccuacagcaacaacagcaucgcgaucccuaccaacuucaccauaagcgugaccaccgagaucuuacccgugagcaugaccaagaccagcguggacugcaccauguacaucugcggcgacagcaccgagugcagcaaccugcugcugcaguacggcagcuucugcacccagcugaaccgggcccugaccggcaucgccguggagcaggacaagaacacccaagagguguucgcccaggugaagcagaucuacaagacucccccaaucaaggacuucggcggcuucaacuucagccagauccugcccgaccccagcaagcccagcaagcggagcuucaucgaggaccugcuguucaacaaggugacccuggccgacgccggcuucaucaagcaguacggcgacugccugggggauaucgccgcucgggaccugaucugcgcccagaaguucaacggccugaccgugcugcccccucugcugaccgacgagaugaucgcccaguacaccagcgcccugcuggccggcaccaucaccagcggcuggaccuucggcgccggcgcagcccuucagauccccuucgccaugcagauggccuacagguucaacggcaucggcgugacccagaacgugcuguacgagaaccagaagcugaucgccaaccaguucaacagcgccaucggcaagauccaggacagccugagcagcaccgccagcgcccugggcaagcugcaggacguggugaaccagaacgcucaggcccugaacacccuggugaagcagcugagcagcaacuucggcgccaucagcagcgugcugaaugacauccugucacggcuggacaagguggaggccgaggugcagaucgaccggcugaucaccggccggcugcagagccugcagaccuacgugacccagcagcugauccgggccgccgagauucgggccagcgccaaccuggcagccaccaagaugagcgagugcgugcugggccagagcaagcggguggacuuuugcggcaagggcuaccaccugaugagcuucccccagagcgccccacacggcgugguguuccugcacgucacauacgugcccgcccaggagaagaacuucaccaccgcccccgccaucugccacgacggcaaggcucacuucccccgggagggaguguucgugagcaacggcacccacugguucgugacccagcggaacuucuacgagccccagaucaucaccaccgacaacaccuucgugagcggcaacugcgacguggugaucggcaucgugaacaacaccguguacgacccccuccagccugagcuggacagcuucaaggaggagcuggacaaguacuucaagaaccacaccagccccgacguggaucugggcgacaucagcggcaucaacgccagcguggugaacauccagaaggagaucgaccggcugaacgagguggccaagaaccugaacgagagccugaucgaccugcaggagcugggcaaguacgagcaguacaucaaguggcccugguacaucuggcugggcuucaucgccggccugaucgccaucgugauggugaccaucaugcugugcugcaugaccagcuguugcagcugccugaagggcugcugcagcugcggcagcugcugcaaguucgacgaggacgacagcgagccagugcugaagggcgugaagcugcacuacaccugaggacuaguuauaagacugacuagcccgaugggccucccaacgggcccuccuccccuccuugcaccgagagaucuaaaaaaaaaaaaaaaaaaaaaaaaaaaaaaaaaaaaaaaaaaaaaaaaaaaaaaaaaaaaaaaaaaaaaaaaaaaaaaaaaaaaaaaaaaaaaaaaaaaa

SEQ ID NO: 25901 - RNA, 4011 nt, Artificial Sequence
  SARS-CoV-2/Wuhan/WIV05/2019__EPI_ISL_402128 spike protein mRNA gc mod (1-1273)
aggagaaagcuuaccauguucguguuucuggugcugcugccccugguguccagccagugugugaaccugaccaccagaacacagcugccuccagccuacaccaacagcuucaccagaggcguguacuaccccgacaagguguucagauccagcgugcugcacucuacccaggaccuguuccugccuuucuucagcaacgugaccugguuccacgccauccacguguccggcaccaauggcaccaagagauucgacaaccccgugcugcccuucaacgacgggguguacuuugccagcaccgagaaguccaacaucaucagaggcuggaucuucggcaccacacuggacagcaagacccagagccugcugaucgugaacaacgccaccaacguggucaucaaagugugcgaguuccaguucugcaacgaccccuuccugggcgucuacuaccacaagaacaacaagagcuggauggaaagcgaguuccggguguacagcagcgccaacaacugcaccuucgaguacgugucccagccuuuccugauggaccuggaaggcaagcagggcaacuucaagaaccugcgcgaguucguguucaagaacaucgacggcuacuucaaaaucuacagcaagcacaccccuaucaaccucgugcgggaucugccucagggcuucucugcucuggaaccccugguggaucugcccaucggcaucaacaucacccgguuucagacacugcuggcccugcacagaagcuaccugacaccuggcgauagcagcagcggauggacagcuggugccgccgcuuacuaugugggcuaccugcagccuagaaccuuccugcugaaguacaacgagaacggcaccaucaccgacgccguggauugugcucuggauccucugagcgagacaaagugcacccugaaguccuucaccguggaaaagggcaucuaccagaccagcaacuuccgggugcagcccaccgaauccaucgugcgguuccccaauaucaccaaucugugccccuucggcgagguguucaaugccaccagauucgccucuguguacgccuggaaccggaagcggaucagcaauugcguggccgacuacuccgugcuguacaacuccgccagcuucagcaccuucaagugcuacggcguguccccuaccaagcugaacgaccugugcuucacaaacguguacgccgacagcuucgugauccggggagaugaagugcggcagauugccccuggacagacaggcaagaucgccgacuacaacuacaagcugcccgacgacuucaccggcugugugauugccuggaacagcaacaaccuggacuccaaagucggcggcaacuacaauuaccuguaccggcuguuccggaaguccaaucugaagcccuucgagcgggacaucagcaccgaaaucuaucaggccggcagcaccccuugcaacggcguggaaggcuucaacugcuacuucccacugcaguccuacggcuuucagcccacaaauggcgugggcuaucagcccuacagagugguggugcugagcuucgaacugcugcaugcuccugccacagugugcggcccuaagaaaagcaccaaucucgugaagaacaaaugcgugaacuucaacuucaacggccugaccggcaccggcgugcugacagagagcaacaagaaguuccugccauuccagcaguuuggccgggauaucgccgauaccacagacgccguuagagauccccagacacuggaaauccuggacaucaccccaugcagcuucggcggagugucugugaucaccccuggcaccaacaccagcaaucagguggcagugcuguaccaggacgugaacuguaccgaagugcccguggccauucacgccgaucagcugacaccuacauggcggguguacuccaccggcagcaauguguuucagaccagagccggcugucugaucggagccgagcacgugaacaauagcuacgagugcgacauccccaucggcgcuggcaucugugccagcuaccagacacagacaaacagccccagacgggcuagaagcguggccagccagagcaucauugccuacacaaugucucugggcgccgagaacagcguggccuacuccaacaacucuaucgcuauccccaccaacuucaccaucagcgugaccaccgagauccugccuguguccaugaccaagaccagcguggacugcaccauguacaucugcggcgauuccaccgagugcuccaaccugcugcugcaguacggcagcuucugcacccagcugaauagagcccugacagggaucgccguggaacaggacaagaacacccaagagguguucgcccaagugaagcaaaucuacaagaccccuccuaucaaggacuucggcggcuucaauuucagccagauucugcccgauccuagcaagcccagcaagcggagcuucaucgaggaccugcuguucaacaaagugacacuggccgacgccggcuucaucaagcaguauggcgauugucugggcgacauugccgccagggaucugauuugcgcccagaaguuuaacggacugacagugcugccuccucugcugaccgaugagaugaucgcccaguacacaucugcccugcuggccggcacaaucacaagcggcuggacauuuggagcuggcgccgcucugcagauccccuuugcuaugcagauggccuaccgguucaacggcaucggagugacccagaaugugcuguacgagaaccagaagcugaucgccaaccaguucaacagcgccaucggcaagauccaggacagccugagcagcacagcaagcgcccugggaaagcugcaggacguggucaaccagaaugcccaggcacugaacacccuggucaagcagcuguccuccaacuucggcgccaucagcucugugcugaacgauauccugagcagacuggacaaggucgaggccgaggugcagaucgacagacugaucacaggcagacugcagagccuccagacauacgugacccagcagcugaucagagccgccgagauuagagccucugccaaucuggccgccaccaagaugucugagugugugcugggccagagcaagagaguggacuuuugcggcaagggcuaccaccugaugagcuucccucagucugccccucacggcgugguguuucugcacgugacauaugugcccgcucaagagaagaauuucaccaccgcuccagccaucugccacgacggcaaagcccacuuuccuagagaaggcguguucguguccaacggcacccauugguucgugacacagcggaacuucuacgagccccagaucaucaccaccgacaacaccuucgugucuggcaacugcgacguugugaucggcauugugaacaauaccguguacgacccucugcagcccgagcuggacagcuucaaagaggaacuggacaaguacuuuaagaaccacacaagccccgacguggaccugggcgauaucagcggaaucaaugccagcgucgugaacauccagaaagagaucgaccggcugaacgagguggccaagaaucugaacgagagccugaucgaccugcaagaacuggggaaguacgagcaguacaucaaguggcccugguacaucuggcugggcuuuaucgccggacugauugccaucgugauggucacaaucaugcuguguugcaugaccagcugcuguagcugccugaagggcuguuguagcuguggcagcugcugcaaguucgacgaggacgauucugagcccgugcugaagggcgugaaacugcacuacaccugaggacuaguuauaagacugacuagcccgaugggccucccaacgggcccuccuccccuccuugcaccgagagaucuaaaaaaaaaaaaaaaaaaaaaaaaaaaaaaaaaaaaaaaaaaaaaaaaaaaaaaaaaaaaaaaaaaaaaaaaaaaaaaaaaaaaaaaaaaaaaaaaaaaa

SEQ ID NO: 25902 - RNA, 4011 nt, Artificial Sequence
  SARS-CoV-2/Wuhan/WIV05/2019__EPI_ISL_402128 spike protein mRNA gc mod (1-1273)(D614G)
aggagaaagcuuaccauguucguguuucuggugcugcugccccugguguccagccagugugugaaccugaccaccagaacacagcugccuccagccuacaccaacagcuucaccagaggcguguacuaccccgacaagguguucagauccagcgugcugcacucuacccaggaccuguuccugccuuucuucagcaacgugaccugguuccacgccauccacguguccggcaccaauggcaccaagagauucgacaaccccgugcugcccuucaacgacgggguguacuuugccagcaccgagaaguccaacaucaucagaggcuggaucuucggcaccacacuggacagcaagacccagagccugcugaucgugaacaacgccaccaacguggucaucaaagugugcgaguuccaguucugcaacgaccccuuccugggcgucuacuaccacaagaacaacaagagcuggauggaaagcgaguuccggguguacagcagcgccaacaacugcaccuucgaguacgugucccagccuuuccugauggaccuggaaggcaagcagggcaacuucaagaaccugcgcgaguucguguucaagaacaucgacggcuacuucaaaaucuacagcaagcacaccccuaucaaccucgugcgggaucugccucagggcuucucugcucuggaaccccugguggaucugcccaucggcaucaacaucacccgguuucagacacugcuggcccugcacagaagcuaccugacaccuggcgauagcagcagcggauggacagcuggugccgccgcuuacuaugugggcuaccugcagccuagaaccuuccugcugaaguacaacgagaacggcaccaucaccgacgccguggauugugcucuggauccucugagcgagacaaagugcacccugaaguccuucaccguggaaaagggcaucuaccagaccagcaacuuccgggugcagcccaccgaauccaucgugcgguuccccaauaucaccaaucugugccccuucggcgagguguucaaugccaccagauucgccucuguguacgccuggaaccggaagcggaucagcaauugcguggccgacuacuccgugcuguacaacuccgccagcuucagcaccuucaagugcuacggcguguccccuaccaagcugaacgaccugugcuucacaaacguguacgccgacagcuucgugauccggggagaugaagugcggcagauugccccuggacagacaggcaagaucgccgacuacaacuacaagcugcccgacgacuucaccggcugugugauugccuggaacagcaacaaccuggacuccaaagucggcggcaacuacaauuaccuguaccggcuguuccggaaguccaaucugaagcccuucgagcgggacaucagcaccgaaaucuaucaggccggcagcaccccuugcaacggcguggaaggcuucaacugcuacuucccacugcaguccuacggcuuucagcccacaaauggcgugggcuaucagcccuacagagugguggugcugagcuucgaacugcugcaugcuccugccacagugugcggcccuaagaaaagcaccaaucucgugaagaacaaaugcgugaacuucaacuucaacggccugaccggcaccggcgugcugacagagagcaacaagaaguuccugccauuccagcaguuuggccgggauaucgccgauaccacagacgccguuagagauccccagacacuggaaauccuggacaucaccccaugcagcuucggcggagugucugugaucaccccuggcaccaacaccagcaaucagguggcagugcuguaccagggcgugaacuguaccgaagugcccguggccauucacgccgaucagcugacaccuacauggcggguguacuccaccggcagcaauguguuucagaccagagccggcugucugaucggagccgagcacgugaacaauagcuacgagugcgacauccccaucggcgcuggcaucugugccagcuaccagacacagacaaacagccccagacgggcuagaagcguggccagccagagcaucauugccuacacaaugucucugggcgccgagaacagcguggccuacuccaacaacucuaucgcuauccccaccaacuucaccaucagcgugaccaccgagauccugccuguguccaugaccaagaccagcguggacugcaccauguacaucugcggcgauuccaccgagugcuccaaccugcugcugcaguacggcagcuucugcacccagcugaauagagcccugacagggaucgccguggaacaggacaagaacacccaagagguguucgcccaagugaagcaaaucuacaagaccccuccuaucaaggacuucggcggcuucaauuucagccagauucugcccgauccuagcaagcccagcaagcggagcuucaucgaggaccugcuguucaacaaagugacacuggccgacgccggcuucaucaagcaguauggcgauugucugggcgacauugccgccagggaucugauuugcgcccagaaguuuaacggacugacagugcugccuccucugcugaccgaugagaugaucgcccaguacacaucugcccugcuggccggcacaaucacaagcggcuggacauuuggagcuggcgccgcucugcagauccccuuugcuaugcagauggccuaccgguucaacggcaucggagugacccagaaugugcuguacgagaaccagaagcugaucgccaaccaguucaacagcgccaucggcaagauccaggacagccugagcagcacagcaagcgcccugggaaagcugcaggacguggucaaccagaaugcccaggcacugaacacccuggucaagcagcuguccuccaacuucggcgccaucagcucugugcugaacgauauccugagcagacuggacaaggucgaggccgaggugcagaucgacagacugaucacaggcagacugcagagccuccagacauacgugacccagcagcugaucagagccgccgagauuagagccucugccaaucuggccgccaccaagaugucugagugugugcugggccagagcaagagaguggacuuuugcggcaagggcuaccaccugaugagcuucccucagucugccccucacggcgugguguuucugcacgugacauaugugcccgcucaagagaagaauuucaccaccgcuccagccaucugccacgacggcaaagcccacuuuccuagagaaggcguguucguguccaacggcacccauugguucgugacacagcggaacuucuacgagccccagaucaucaccaccgacaacaccuucgugucuggcaacugcgacguugugaucggcauugugaacaauaccguguacgacccucugcagcccgagcuggacagcuucaaagaggaacuggacaaguacuuuaagaaccacacaagccccgacguggaccugggcgauaucagcggaaucaaugccagcgucgugaacauccagaaagagaucgaccggcugaacgagguggccaagaaucugaacgagagccugaucgaccugcaagaacuggggaaguacgagcaguacaucaaguggcccugguacaucuggcugggcuuuaucgccggacugauugccaucgugauggucacaaucaugcuguguugcaugaccagcugcuguagcugccugaagggcuguuguagcuguggcagcugcugcaaguucgacgaggacgauucugagcccgugcugaagggcgugaaacugcacuacaccugaggacuaguuauaagacugacuagcccgaugggccucccaacgggcccuccuccccuccuugcaccgagagaucuaaaaaaaaaaaaaaaaaaaaaaaaaaaaaaaaaaaaaaaaaaaaaaaaaaaaaaaaaaaaaaaaaaaaaaaaaaaaaaaaaaaaaaaaaaaaaaaaaaaa

SEQ ID NO: 25903 - RNA, 4011 nt, Artificial Sequence
  SARS-CoV-2/Wuhan/WIV05/2019__EPI_ISL_402128 spike protein mRNA gc mod (1-1273)(A222V_D614G)
aggagaaagcuuaccauguucguguuucuggugcugcugccccugguguccagccagugugugaaccugaccaccagaacacagcugccuccagccuacaccaacagcuucaccagaggcguguacuaccccgacaagguguucagauccagcgugcugcacucuacccaggaccuguuccugccuuucuucagcaacgugaccugguuccacgccauccacguguccggcaccaauggcaccaagagauucgacaaccccgugcugcccuucaacgacgggguguacuuugccagcaccgagaaguccaacaucaucagaggcuggaucuucggcaccacacuggacagcaagacccagagccugcugaucgugaacaacgccaccaacguggucaucaaagugugcgaguuccaguucugcaacgaccccuuccugggcgucuacuaccacaagaacaacaagagcuggauggaaagcgaguuccggguguacagcagcgccaacaacugcaccuucgaguacgugucccagccuuuccugauggaccuggaaggcaagcagggcaacuucaagaaccugcgcgaguucguguucaagaacaucgacggcuacuucaaaaucuacagcaagcacaccccuaucaaccucgugcgggaucugccucagggcuucucugugcuggaaccccugguggaucugcccaucggcaucaacaucacccgguuucagacacugcuggcccugcacagaagcuaccugacaccuggcgauagcagcagcggauggacagcuggugccgccgcuuacuaugugggcuaccugcagccuagaaccuuccugcugaaguacaacgagaacggcaccaucaccgacgccguggauugugcucuggauccucugagcgagacaaagugcacccugaaguccuucaccguggaaaagggcaucuaccagaccagcaacuuccgggugcagcccaccgaauccaucgugcgguuccccaauaucaccaaucugugccccuucggcgagguguucaaugccaccagauucgccucuguguacgccuggaaccggaagcggaucagcaauugcguggccgacuacuccgugcuguacaacuccgccagcuucagcaccuucaagugcuacggcguguccccuaccaagcugaacgaccugugcuucacaaacguguacgccgacagcuucgugauccggggagaugaagugcggcagauugccccuggacagacaggcaagaucgccgacuacaacuacaagcugcccgacgacuucaccggcugugugauugccuggaacagcaacaaccuggacuccaaagucggcggcaacuacaauuaccuguaccggcuguuccggaaguccaaucugaagcccuucgagcgggacaucagcaccgaaaucuaucaggccggcagcaccccuugcaacggcguggaaggcuucaacugcuacuucccacugcaguccuacggcuuucagcccacaaauggcgugggcuaucagcccuacagagugguggugcugagcuucgaacugcugcaugcuccugccacagugugcggcccuaagaaaagcaccaaucucgugaagaacaaaugcgugaacuucaacuucaacggccugaccggcaccggcgugcugacagagagcaacaagaaguuccugccauuccagcaguuuggccgggauaucgccgauaccacagacgccguuagagauccccagacacuggaaauccuggacaucaccccaugcagcuucggcggagugucugugaucaccccuggcaccaacaccagcaaucagguggcagugcuguaccagggcgugaacuguaccgaagugcccguggccauucacgccgaucagcugacaccuacauggcggguguacuccaccggcagcaauguguuucagaccagagccggcugucugaucggagccgagcacgugaacaauagcuacgagugcgacauccccaucggcgcuggcaucugugccagcuaccagacacagacaaacagccccagacgggcuagaagcguggccagccagagcaucauugccuacacaaugucucugggcgccgagaacagcguggccuacuccaacaacucuaucgcuauccccaccaacuucaccaucagcgugaccaccgagauccugccuguguccaugaccaagaccagcguggacugcaccauguacaucugcggcgauuccaccgagugcuccaaccugcugcugcaguacggcagcuucugcacccagcugaauagagcccugacagggaucgccguggaacaggacaagaacacccaagagguguucgcccaagugaagcaaaucuacaagaccccuccuaucaaggacuucggcggcuucaauuucagccagauucugcccgauccuagcaagcccagcaagcggagcuucaucgaggaccugcuguucaacaaagugacacuggccgacgccggcuucaucaagcaguauggcgauugucugggcgacauugccgccagggaucugauuugcgcccagaaguuuaacggacugacagugcugccuccucugcugaccgaugagaugaucgcccaguacacaucugcccugcuggccggcacaaucacaagcggcuggacauuuggagcuggcgccgcucugcagauccccuuugcuaugcagauggccuaccgguucaacggcaucggagugacccagaaugugcuguacgagaaccagaagcugaucgccaaccaguucaacagcgccaucggcaagauccaggacagccugagcagcacagcaagcgcccugggaaagcugcaggacguggucaaccagaaugcccaggcacugaacacccuggucaagcagcuguccuccaacuucggcgccaucagcucugugcugaacgauauccugagcagacuggacaaggucgaggccgaggugcagaucgacagacugaucacaggcagacugcagagccuccagacauacgugacccagcagcugaucagagccgccgagauuagagccucugccaaucuggccgccaccaagaugucugagugugugcugggccagagcaagagaguggacuuuugcggcaagggcuaccaccugaugagcuucccucagucugccccucacggcgugguguuucugcacgugacauaugugcccgcucaagagaagaauuucaccaccgcuccagccaucugccacgacggcaaagcccacuuuccuagagaaggcguguucguguccaacggcacccauugguucgugacacagcggaacuucuacgagccccagaucaucaccaccgacaacaccuucgugucuggcaacugcgacguugugaucggcauugugaacaauaccguguacgacccucugcagcccgagcuggacagcuucaaagaggaacuggacaaguacuuuaagaaccacacaagccccgacguggaccugggcgauaucagcggaaucaaugccagcgucgugaacauccagaaagagaucgaccggcugaacgagguggccaagaaucugaacgagagccugaucgaccugcaagaacuggggaaguacgagcaguacaucaaguggcccugguacaucuggcugggcuuuaucgccggacugauugccaucgugauggucacaaucaugcuguguugcaugaccagcugcuguagcugccugaagggcuguuguagcuguggcagcugcugcaaguucgacgaggacgauucugagcccgugcugaagggcgugaaacugcacuacaccugaggacuaguuauaagacugacuagcccgaugggccucccaacgggcccuccuccccuccuugcaccgagagaucuaaaaaaaaaaaaaaaaaaaaaaaaaaaaaaaaaaaaaaaaaaaaaaaaaaaaaaaaaaaaaaaaaaaaaaaaaaaaaaaaaaaaaaaaaaaaaaaaaaaa

SEQ ID NO: 25904 - RNA, 4011 nt, Artificial Sequence
  SARS-CoV-2/Wuhan/WIV05/2019__EPI_ISL_402128 spike protein mRNA gc mod (1-1273)(N439K_D614G)
aggagaaagcuuaccauguucguguuucuggugcugcugccccugguguccagccagugugugaaccugaccaccagaacacagcugccuccagccuacaccaacagcuucaccagaggcguguacuaccccgacaagguguucagauccagcgugcugcacucuacccaggaccuguuccugccuuucuucagcaacgugaccugguuccacgccauccacguguccggcaccaauggcaccaagagauucgacaaccccgugcugcccuucaacgacgggguguacuuugccagcaccgagaaguccaacaucaucagaggcuggaucuucggcaccacacuggacagcaagacccagagccugcugaucgugaacaacgccaccaacguggucaucaaagugugcgaguuccaguucugcaacgaccccuuccugggcgucuacuaccacaagaacaacaagagcuggauggaaagcgaguuccggguguacagcagcgccaacaacugcaccuucgaguacgugucccagccuuuccugauggaccuggaaggcaagcagggcaacuucaagaaccugcgcgaguucguguucaagaacaucgacggcuacuucaaaaucuacagcaagcacaccccuaucaaccucgugcgggaucugccucagggcuucucugcucuggaaccccugguggaucugcccaucggcaucaacaucacccgguuucagacacugcuggcccugcacagaagcuaccugacaccuggcgauagcagcagcggauggacagcuggugccgccgcuuacuaugugggcuaccugcagccuagaaccuuccugcugaaguacaacgagaacggcaccaucaccgacgccguggauugugcucuggauccucugagcgagacaaagugcacccugaaguccuucaccguggaaaagggcaucuaccagaccagcaacuuccgggugcagcccaccgaauccaucgugcgguuccccaauaucaccaaucugugccccuucggcgagguguucaaugccaccagauucgccucuguguacgccuggaaccggaagcggaucagcaauugcguggccgacuacuccgugcuguacaacuccgccagcuucagcaccuucaagugcuacggcguguccccuaccaagcugaacgaccugugcuucacaaacguguacgccgacagcuucgugauccggggagaugaagugcggcagauugccccuggacagacaggcaagaucgccgacuacaacuacaagcugcccgacgacuucaccggcugugugauugccuggaacagcaagaaccuggacuccaaagucggcggcaacuacaauuaccuguaccggcuguuccggaaguccaaucugaagcccuucgagcgggacaucagcaccgaaaucuaucaggccggcagcaccccuugcaacggcguggaaggcuucaacugcuacuucccacugcaguccuacggcuuucagcccacaaauggcgugggcuaucagcccuacagagugguggugcugagcuucgaacugcugcaugcuccugccacagugugcggcccuaagaaaagcaccaaucucgugaagaacaaaugcgugaacuucaacuucaacggccugaccggcaccggcgugcugacagagagcaacaagaaguuccugccauuccagcaguuuggccgggauaucgccgauaccacagacgccguuagagauccccagacacuggaaauccuggacaucaccccaugcagcuucggcggagugucugugaucaccccuggcaccaacaccagcaaucagguggcagugcuguaccagggcgugaacuguaccgaagugcccguggccauucacgccgaucagcugacaccuacauggcggguguacuccaccggcagcaauguguuucagaccagagccggcugucugaucggagccgagcacgugaacaauagcuacgagugcgacauccccaucggcgcuggcaucugugccagcuaccagacacagacaaacagccccagacgggcuagaagcguggccagccagagcaucauugccuacacaaugucucugggcgccgagaacagcguggccuacuccaacaacucuaucgcuauccccaccaacuucaccaucagcgugaccaccgagauccugccuguguccaugaccaagaccagcguggacugcaccauguacaucugcggcgauuccaccgagugcuccaaccugcugcugcaguacggcagcuucugcacccagcugaauagagcccugacagggaucgccguggaacaggacaagaacacccaagagguguucgcccaagugaagcaaaucuacaagaccccuccuaucaaggacuucggcggcuucaauuucagccagauucugcccgauccuagcaagcccagcaagcggagcuucaucgaggaccugcuguucaacaaagugacacuggccgacgccggcuucaucaagcaguauggcgauugucugggcgacauugccgccagggaucugauuugcgcccagaaguuuaacggacugacagugcugccuccucugcugaccgaugagaugaucgcccaguacacaucugcccugcuggccggcacaaucacaagcggcuggacauuuggagcuggcgccgcucugcagauccccuuugcuaugcagauggccuaccgguucaacggcaucggagugacccagaaugugcuguacgagaaccagaagcugaucgccaaccaguucaacagcgccaucggcaagauccaggacagccugagcagcacagcaagcgcccugggaaagcugcaggacguggucaaccagaaugcccaggcacugaacacccuggucaagcagcuguccuccaacuucggcgccaucagcucugugcugaacgauauccugagcagacuggacaaggucgaggccgaggugcagaucgacagacugaucacaggcagacugcagagccuccagacauacgugacccagcagcugaucagagccgccgagauuagagccucugccaaucuggccgccaccaagaugucugagugugugcugggccagagcaagagaguggacuuuugcggcaagggcuaccaccugaugagcuucccucagucugccccucacggcgugguguuucugcacgugacauaugugcccgcucaagagaagaauuucaccaccgcuccagccaucugccacgacggcaaagcccacuuuccuagagaaggcguguucguguccaacggcacccauugguucgugacacagcggaacuucuacgagccccagaucaucaccaccgacaacaccuucgugucuggcaacugcgacguugugaucggcauugugaacaauaccguguacgacccucugcagcccgagcuggacagcuucaaagaggaacuggacaaguacuuuaagaaccacacaagccccgacguggaccugggcgauaucagcggaaucaaugccagcgucgugaacauccagaaagagaucgaccggcugaacgagguggccaagaaucugaacgagagccugaucgaccugcaagaacuggggaaguacgagcaguacaucaaguggcccugguacaucuggcugggcuuuaucgccggacugauugccaucgugauggucacaaucaugcuguguugcaugaccagcugcuguagcugccugaagggcuguuguagcuguggcagcugcugcaaguucgacgaggacgauucugagcccgugcugaagggcgugaaacugcacuacaccugaggacuaguuauaagacugacuagcccgaugggccucccaacgggcccuccuccccuccuugcaccgagagaucuaaaaaaaaaaaaaaaaaaaaaaaaaaaaaaaaaaaaaaaaaaaaaaaaaaaaaaaaaaaaaaaaaaaaaaaaaaaaaaaaaaaaaaaaaaaaaaaaaaaa

SEQ ID NO: 25905 - RNA, 4011 nt, Artificial Sequence
  SARS-CoV-2/Wuhan/WIV05/2019__EPI_ISL_402128 spike protein mRNA gc mod (1-1273)(S477N_D614G)
aggagaaagcuuaccauguucguguuucuggugcugcugccccugguguccagccagugugugaaccugaccaccagaacacagcugccuccagccuacaccaacagcuucaccagaggcguguacuaccccgacaagguguucagauccagcgugcugcacucuacccaggaccuguuccugccuuucuucagcaacgugaccugguuccacgccauccacguguccggcaccaauggcaccaagagauucgacaaccccgugcugcccuucaacgacgggguguacuuugccagcaccgagaaguccaacaucaucagaggcuggaucuucggcaccacacuggacagcaagacccagagccugcugaucgugaacaacgccaccaacguggucaucaaagugugcgaguuccaguucugcaacgaccccuuccugggcgucuacuaccacaagaacaacaagagcuggauggaaagcgaguuccggguguacagcagcgccaacaacugcaccuucgaguacgugucccagccuuuccugauggaccuggaaggcaagcagggcaacuucaagaaccugcgcgaguucguguucaagaacaucgacggcuacuucaaaaucuacagcaagcacaccccuaucaaccucgugcgggaucugccucagggcuucucugcucuggaaccccugguggaucugcccaucggcaucaacaucacccgguuucagacacugcuggcccugcacagaagcuaccugacaccuggcgauagcagcagcggauggacagcuggugccgccgcuuacuaugugggcuaccugcagccuagaaccuuccugcugaaguacaacgagaacggcaccaucaccgacgccguggauugugcucuggauccucugagcgagacaaagugcacccugaaguccuucaccguggaaaagggcaucuaccagaccagcaacuuccgggugcagcccaccgaauccaucgugcgguuccccaauaucaccaaucugugccccuucggcgagguguucaaugccaccagauucgccucuguguacgccuggaaccggaagcggaucagcaauugcguggccgacuacuccgugcuguacaacuccgccagcuucagcaccuucaagugcuacggcguguccccuaccaagcugaacgaccugugcuucacaaacguguacgccgacagcuucgugauccggggagaugaagugcggcagauugccccuggacagacaggcaagaucgccgacuacaacuacaagcugcccgacgacuucaccggcugugugauugccuggaacagcaacaaccuggacuccaaagucggcggcaacuacaauuaccuguaccggcuguuccggaaguccaaucugaagcccuucgagcgggacaucagcaccgaaaucuaucaggccggcaacaccccuugcaacggcguggaaggcuucaacugcuacuucccacugcaguccuacggcuuucagcccacaaauggcgugggcuaucagcccuacagagugguggugcugagcuucgaacugcugcaugcuccugccacagugugcggcccuaagaaaagcaccaaucucgugaagaacaaaugcgugaacuucaacuucaacggccugaccggcaccggcgugcugacagagagcaacaagaaguuccugccauuccagcaguuuggccgggauaucgccgauaccacagacgccguuagagauccccagacacuggaaauccuggacaucaccccaugcagcuucggcggagugucugugaucaccccuggcaccaacaccagcaaucagguggcagugcuguaccagggcgugaacuguaccgaagugcccguggccauucacgccgaucagcugacaccuacauggcggguguacuccaccggcagcaauguguuucagaccagagccggcugucugaucggagccgagcacgugaacaauagcuacgagugcgacauccccaucggcgcuggcaucugugccagcuaccagacacagacaaacagccccagacgggcuagaagcguggccagccagagcaucauugccuacacaaugucucugggcgccgagaacagcguggccuacuccaacaacucuaucgcuauccccaccaacuucaccaucagcgugaccaccgagauccugccuguguccaugaccaagaccagcguggacugcaccauguacaucugcggcgauuccaccgagugcuccaaccugcugcugcaguacggcagcuucugcacccagcugaauagagcccugacagggaucgccguggaacaggacaagaacacccaagagguguucgcccaagugaagcaaaucuacaagaccccuccuaucaaggacuucggcggcuucaauuucagccagauucugcccgauccuagcaagcccagcaagcggagcuucaucgaggaccugcuguucaacaaagugacacuggccgacgccggcuucaucaagcaguauggcgauugucugggcgacauugccgccagggaucugauuugcgcccagaaguuuaacggacugacagugcugccuccucugcugaccgaugagaugaucgcccaguacacaucugcccugcuggccggcacaaucacaagcggcuggacauuuggagcuggcgccgcucugcagauccccuuugcuaugcagauggccuaccgguucaacggcaucggagugacccagaaugugcuguacgagaaccagaagcugaucgccaaccaguucaacagcgccaucggcaagauccaggacagccugagcagcacagcaagcgcccugggaaagcugcaggacguggucaaccagaaugcccaggcacugaacacccuggucaagcagcuguccuccaacuucggcgccaucagcucugugcugaacgauauccugagcagacuggacaaggucgaggccgaggugcagaucgacagacugaucacaggcagacugcagagccuccagacauacgugacccagcagcugaucagagccgccgagauuagagccucugccaaucuggccgccaccaagaugucugagugugugcugggccagagcaagagaguggacuuuugcggcaagggcuaccaccugaugagcuucccucagucugccccucacggcgugguguuucugcacgugacauaugugcccgcucaagagaagaauuucaccaccgcuccagccaucugccacgacggcaaagcccacuuuccuagagaaggcguguucguguccaacggcacccauugguucgugacacagcggaacuucuacgagccccagaucaucaccaccgacaacaccuucgugucuggcaacugcgacguugugaucggcauugugaacaauaccguguacgacccucugcagcccgagcuggacagcuucaaagaggaacuggacaaguacuuuaagaaccacacaagccccgacguggaccugggcgauaucagcggaaucaaugccagcgucgugaacauccagaaagagaucgaccggcugaacgagguggccaagaaucugaacgagagccugaucgaccugcaagaacuggggaaguacgagcaguacaucaaguggcccugguacaucuggcugggcuuuaucgccggacugauugccaucgugauggucacaaucaugcuguguugcaugaccagcugcuguagcugccugaagggcuguuguagcuguggcagcugcugcaaguucgacgaggacgauucugagcccgugcugaagggcgugaaacugcacuacaccugaggacuaguuauaagacugacuagcccgaugggccucccaacgggcccuccuccccuccuugcaccgagagaucuaaaaaaaaaaaaaaaaaaaaaaaaaaaaaaaaaaaaaaaaaaaaaaaaaaaaaaaaaaaaaaaaaaaaaaaaaaaaaaaaaaaaaaaaaaaaaaaaaaaa

SEQ ID NO: 25906 - RNA, 4011 nt, Artificial Sequence
  SARS-CoV-2/Wuhan/WIV05/2019__EPI_ISL_402128 spike protein mRNA gc mod (1-1273)(N501Y_D614G)
aggagaaagcuuaccauguucguguuucuggugcugcugccccugguguccagccagugugugaaccugaccaccagaacacagcugccuccagccuacaccaacagcuucaccagaggcguguacuaccccgacaagguguucagauccagcgugcugcacucuacccaggaccuguuccugccuuucuucagcaacgugaccugguuccacgccauccacguguccggcaccaauggcaccaagagauucgacaaccccgugcugcccuucaacgacgggguguacuuugccagcaccgagaaguccaacaucaucagaggcuggaucuucggcaccacacuggacagcaagacccagagccugcugaucgugaacaacgccaccaacguggucaucaaagugugcgaguuccaguucugcaacgaccccuuccugggcgucuacuaccacaagaacaacaagagcuggauggaaagcgaguuccggguguacagcagcgccaacaacugcaccuucgaguacgugucccagccuuuccugauggaccuggaaggcaagcagggcaacuucaagaaccugcgcgaguucguguucaagaacaucgacggcuacuucaaaaucuacagcaagcacaccccuaucaaccucgugcgggaucugccucagggcuucucugcucuggaaccccugguggaucugcccaucggcaucaacaucacccgguuucagacacugcuggcccugcacagaagcuaccugacaccuggcgauagcagcagcggauggacagcuggugccgccgcuuacuaugugggcuaccugcagccuagaaccuuccugcugaaguacaacgagaacggcaccaucaccgacgccguggauugugcucuggauccucugagcgagacaaagugcacccugaaguccuucaccguggaaaagggcaucuaccagaccagcaacuuccgggugcagcccaccgaauccaucgugcgguuccccaauaucaccaaucugugccccuucggcgagguguucaaugccaccagauucgccucuguguacgccuggaaccggaagcggaucagcaauugcguggccgacuacuccgugcuguacaacuccgccagcuucagcaccuucaagugcuacggcguguccccuaccaagcugaacgaccugugcuucacaaacguguacgccgacagcuucgugauccggggagaugaagugcggcagauugccccuggacagacaggcaagaucgccgacuacaacuacaagcugcccgacgacuucaccggcugugugauugccuggaacagcaacaaccuggacuccaaagucggcggcaacuacaauuaccuguaccggcuguuccggaaguccaaucugaagcccuucgagcgggacaucagcaccgaaaucuaucaggccggcagcaccccuugcaacggcguggaaggcuucaacugcuacuucccacugcaguccuacggcuuucagcccacauacggcgugggcuaucagcccuacagagugguggugcugagcuucgaacugcugcaugcuccugccacagugugcggcccuaagaaaagcaccaaucucgugaagaacaaaugcgugaacuucaacuucaacggccugaccggcaccggcgugcugacagagagcaacaagaaguuccugccauuccagcaguuuggccgggauaucgccgauaccacagacgccguuagagauccccagacacuggaaauccuggacaucaccccaugcagcuucggcggagugucugugaucaccccuggcaccaacaccagcaaucagguggcagugcuguaccagggcgugaacuguaccgaagugcccguggccauucacgccgaucagcugacaccuacauggcggguguacuccaccggcagcaauguguuucagaccagagccggcugucugaucggagccgagcacgugaacaauagcuacgagugcgacauccccaucggcgcuggcaucugugccagcuaccagacacagacaaacagccccagacgggcuagaagcguggccagccagagcaucauugccuacacaaugucucugggcgccgagaacagcguggccuacuccaacaacucuaucgcuauccccaccaacuucaccaucagcgugaccaccgagauccugccuguguccaugaccaagaccagcguggacugcaccauguacaucugcggcgauuccaccgagugcuccaaccugcugcugcaguacggcagcuucugcacccagcugaauagagcccugacagggaucgccguggaacaggacaagaacacccaagagguguucgcccaagugaagcaaaucuacaagaccccuccuaucaaggacuucggcggcuucaauuucagccagauucugcccgauccuagcaagcccagcaagcggagcuucaucgaggaccugcuguucaacaaagugacacuggccgacgccggcuucaucaagcaguauggcgauugucugggcgacauugccgccagggaucugauuugcgcccagaaguuuaacggacugacagugcugccuccucugcugaccgaugagaugaucgcccaguacacaucugcccugcuggccggcacaaucacaagcggcuggacauuuggagcuggcgccgcucugcagauccccuuugcuaugcagauggccuaccgguucaacggcaucggagugacccagaaugugcuguacgagaaccagaagcugaucgccaaccaguucaacagcgccaucggcaagauccaggacagccugagcagcacagcaagcgcccugggaaagcugcaggacguggucaaccagaaugcccaggcacugaacacccuggucaagcagcuguccuccaacuucggcgccaucagcucugugcugaacgauauccugagcagacuggacaaggucgaggccgaggugcagaucgacagacugaucacaggcagacugcagagccuccagacauacgugacccagcagcugaucagagccgccgagauuagagccucugccaaucuggccgccaccaagaugucugagugugugcugggccagagcaagagaguggacuuuugcggcaagggcuaccaccugaugagcuucccucagucugccccucacggcgugguguuucugcacgugacauaugugcccgcucaagagaagaauuucaccaccgcuccagccaucugccacgacggcaaagcccacuuuccuagagaaggcguguucguguccaacggcacccauugguucgugacacagcggaacuucuacgagccccagaucaucaccaccgacaacaccuucgugucuggcaacugcgacguugugaucggcauugugaacaauaccguguacgacccucugcagcccgagcuggacagcuucaaagaggaacuggacaaguacuuuaagaaccacacaagccccgacguggaccugggcgauaucagcggaaucaaugccagcgucgugaacauccagaaagagaucgaccggcugaacgagguggccaagaaucugaacgagagccugaucgaccugcaagaacuggggaaguacgagcaguacaucaaguggcccugguacaucuggcugggcuuuaucgccggacugauugccaucgugauggucacaaucaugcuguguugcaugaccagcugcuguagcugccugaagggcuguuguagcuguggcagcugcugcaaguucgacgaggacgauucugagcccgugcugaagggcgugaaacugcacuacaccugaggacuaguuauaagacugacuagcccgaugggccucccaacgggcccuccuccccuccuugcaccgagagaucuaaaaaaaaaaaaaaaaaaaaaaaaaaaaaaaaaaaaaaaaaaaaaaaaaaaaaaaaaaaaaaaaaaaaaaaaaaaaaaaaaaaaaaaaaaaaaaaaaaaa

SEQ ID NO: 25907 - RNA, 4005 nt, Artificial Sequence
  SARS-CoV-2/Wuhan/WIV05/2019__EPI_ISL_402128 spike protein mRNA gc mod (1-1273)(H69del_V70del_D614G)
aggagaaagcuuaccauguucguguuucuggugcugcugccccugguguccagccagugugugaaccugaccaccagaacacagcugccuccagccuacaccaacagcuucaccagaggcguguacuaccccgacaagguguucagauccagcgugcugcacucuacccaggaccuguuccugccuuucuucagcaacgugaccugguuccacgccaucuccggcaccaauggcaccaagagauucgacaaccccgugcugcccuucaacgacgggguguacuuugccagcaccgagaaguccaacaucaucagaggcuggaucuucggcaccacacuggacagcaagacccagagccugcugaucgugaacaacgccaccaacguggucaucaaagugugcgaguuccaguucugcaacgaccccuuccugggcgucuacuaccacaagaacaacaagagcuggauggaaagcgaguuccggguguacagcagcgccaacaacugcaccuucgaguacgugucccagccuuuccugauggaccuggaaggcaagcagggcaacuucaagaaccugcgcgaguucguguucaagaacaucgacggcuacuucaaaaucuacagcaagcacaccccuaucaaccucgugcgggaucugccucagggcuucucugcucuggaaccccugguggaucugcccaucggcaucaacaucacccgguuucagacacugcuggcccugcacagaagcuaccugacaccuggcgauagcagcagcggauggacagcuggugccgccgcuuacuaugugggcuaccugcagccuagaaccuuccugcugaaguacaacgagaacggcaccaucaccgacgccguggauugugcucuggauccucugagcgagacaaagugcacccugaaguccuucaccguggaaaagggcaucuaccagaccagcaacuuccgggugcagcccaccgaauccaucgugcgguuccccaauaucaccaaucugugccccuucggcgagguguucaaugccaccagauucgccucuguguacgccuggaaccggaagcggaucagcaauugcguggccgacuacuccgugcuguacaacuccgccagcuucagcaccuucaagugcuacggcguguccccuaccaagcugaacgaccugugcuucacaaacguguacgccgacagcuucgugauccggggagaugaagugcggcagauugccccuggacagacaggcaagaucgccgacuacaacuacaagcugcccgacgacuucaccggcugugugauugccuggaacagcaacaaccuggacuccaaagucggcggcaacuacaauuaccuguaccggcuguuccggaaguccaaucugaagcccuucgagcgggacaucagcaccgaaaucuaucaggccggcagcaccccuugcaacggcguggaaggcuucaacugcuacuucccacugcaguccuacggcuuucagcccacaaauggcgugggcuaucagcccuacagagugguggugcugagcuucgaacugcugcaugcuccugccacagugugcggcccuaagaaaagcaccaaucucgugaagaacaaaugcgugaacuucaacuucaacggccugaccggcaccggcgugcugacagagagcaacaagaaguuccugccauuccagcaguuuggccgggauaucgccgauaccacagacgccguuagagauccccagacacuggaaauccuggacaucaccccaugcagcuucggcggagugucugugaucaccccuggcaccaacaccagcaaucagguggcagugcuguaccagggcgugaacuguaccgaagugcccguggccauucacgccgaucagcugacaccuacauggcggguguacuccaccggcagcaauguguuucagaccagagccggcugucugaucggagccgagcacgugaacaauagcuacgagugcgacauccccaucggcgcuggcaucugugccagcuaccagacacagacaaacagccccagacgggcuagaagcguggccagccagagcaucauugccuacacaaugucucugggcgccgagaacagcguggccuacuccaacaacucuaucgcuauccccaccaacuucaccaucagcgugaccaccgagauccugccuguguccaugaccaagaccagcguggacugcaccauguacaucugcggcgauuccaccgagugcuccaaccugcugcugcaguacggcagcuucugcacccagcugaauagagcccugacagggaucgccguggaacaggacaagaacacccaagagguguucgcccaagugaagcaaaucuacaagaccccuccuaucaaggacuucggcggcuucaauuucagccagauucugcccgauccuagcaagcccagcaagcggagcuucaucgaggaccugcuguucaacaaagugacacuggccgacgccggcuucaucaagcaguauggcgauugucugggcgacauugccgccagggaucugauuugcgcccagaaguuuaacggacugacagugcugccuccucugcugaccgaugagaugaucgcccaguacacaucugcccugcuggccggcacaaucacaagcggcuggacauuuggagcuggcgccgcucugcagauccccuuugcuaugcagauggccuaccgguucaacggcaucggagugacccagaaugugcuguacgagaaccagaagcugaucgccaaccaguucaacagcgccaucggcaagauccaggacagccugagcagcacagcaagcgcccugggaaagcugcaggacguggucaaccagaaugcccaggcacugaacacccuggucaagcagcuguccuccaacuucggcgccaucagcucugugcugaacgauauccugagcagacuggacaaggucgaggccgaggugcagaucgacagacugaucacaggcagacugcagagccuccagacauacgugacccagcagcugaucagagccgccgagauuagagccucugccaaucuggccgccaccaagaugucugagugugugcugggccagagcaagagaguggacuuuugcggcaagggcuaccaccugaugagcuucccucagucugccccucacggcgugguguuucugcacgugacauaugugcccgcucaagagaagaauuucaccaccgcuccagccaucugccacgacggcaaagcccacuuuccuagagaaggcguguucguguccaacggcacccauugguucgugacacagcggaacuucuacgagccccagaucaucaccaccgacaacaccuucgugucuggcaacugcgacguugugaucggcauugugaacaauaccguguacgacccucugcagcccgagcuggacagcuucaaagaggaacuggacaaguacuuuaagaaccacacaagccccgacguggaccugggcgauaucagcggaaucaaugccagcgucgugaacauccagaaagagaucgaccggcugaacgagguggccaagaaucugaacgagagccugaucgaccugcaagaacuggggaaguacgagcaguacaucaaguggcccugguacaucuggcugggcuuuaucgccggacugauugccaucgugauggucacaaucaugcuguguugcaugaccagcugcuguagcugccugaagggcuguuguagcuguggcagcugcugcaaguucgacgaggacgauucugagcccgugcugaagggcgugaaacugcacuacaccugaggacuaguuauaagacugacuagcccgaugggccucccaacgggcccuccuccccuccuugcaccgagagaucuaaaaaaaaaaaaaaaaaaaaaaaaaaaaaaaaaaaaaaaaaaaaaaaaaaaaaaaaaaaaaaaaaaaaaaaaaaaaaaaaaaaaaaaaaaaaaaaaaaaa

SEQ ID NO: 25908 - RNA, 4011 nt, Artificial Sequence
  SARS-CoV-2/Wuhan/WIV05/2019__EPI_ISL_402128 spike protein mRNA gc mod (1-1273)(Y453F_D614G)
aggagaaagcuuaccauguucguguuucuggugcugcugccccugguguccagccagugugugaaccugaccaccagaacacagcugccuccagccuacaccaacagcuucaccagaggcguguacuaccccgacaagguguucagauccagcgugcugcacucuacccaggaccuguuccugccuuucuucagcaacgugaccugguuccacgccauccacguguccggcaccaauggcaccaagagauucgacaaccccgugcugcccuucaacgacgggguguacuuugccagcaccgagaaguccaacaucaucagaggcuggaucuucggcaccacacuggacagcaagacccagagccugcugaucgugaacaacgccaccaacguggucaucaaagugugcgaguuccaguucugcaacgaccccuuccugggcgucuacuaccacaagaacaacaagagcuggauggaaagcgaguuccggguguacagcagcgccaacaacugcaccuucgaguacgugucccagccuuuccugauggaccuggaaggcaagcagggcaacuucaagaaccugcgcgaguucguguucaagaacaucgacggcuacuucaaaaucuacagcaagcacaccccuaucaaccucgugcgggaucugccucagggcuucucugcucuggaaccccugguggaucugcccaucggcaucaacaucacccgguuucagacacugcuggcccugcacagaagcuaccugacaccuggcgauagcagcagcggauggacagcuggugccgccgcuuacuaugugggcuaccugcagccuagaaccuuccugcugaaguacaacgagaacggcaccaucaccgacgccguggauugugcucuggauccucugagcgagacaaagugcacccugaaguccuucaccguggaaaagggcaucuaccagaccagcaacuuccgggugcagcccaccgaauccaucgugcgguuccccaauaucaccaaucugugccccuucggcgagguguucaaugccaccagauucgccucuguguacgccuggaaccggaagcggaucagcaauugcguggccgacuacuccgugcuguacaacuccgccagcuucagcaccuucaagugcuacggcguguccccuaccaagcugaacgaccugugcuucacaaacguguacgccgacagcuucgugauccggggagaugaagugcggcagauugccccuggacagacaggcaagaucgccgacuacaacuacaagcugcccgacgacuucaccggcugugugauugccuggaacagcaacaaccuggacuccaaagucggcggcaacuacaauuaccuguuccggcuguuccggaaguccaaucugaagcccuucgagcgggacaucagcaccgaaaucuaucaggccggcagcaccccuugcaacggcguggaaggcuucaacugcuacuucccacugcaguccuacggcuuucagcccacaaauggcgugggcuaucagcccuacagagugguggugcugagcuucgaacugcugcaugcuccugccacagugugcggcccuaagaaaagcaccaaucucgugaagaacaaaugcgugaacuucaacuucaacggccugaccggcaccggcgugcugacagagagcaacaagaaguuccugccauuccagcaguuuggccgggauaucgccgauaccacagacgccguuagagauccccagacacuggaaauccuggacaucaccccaugcagcuucggcggagugucugugaucaccccuggcaccaacaccagcaaucagguggcagugcuguaccagggcgugaacuguaccgaagugcccguggccauucacgccgaucagcugacaccuacauggcggguguacuccaccggcagcaauguguuucagaccagagccggcugucugaucggagccgagcacgugaacaauagcuacgagugcgacauccccaucggcgcuggcaucugugccagcuaccagacacagacaaacagccccagacgggcuagaagcguggccagccagagcaucauugccuacacaaugucucugggcgccgagaacagcguggccuacuccaacaacucuaucgcuauccccaccaacuucaccaucagcgugaccaccgagauccugccuguguccaugaccaagaccagcguggacugcaccauguacaucugcggcgauuccaccgagugcuccaaccugcugcugcaguacggcagcuucugcacccagcugaauagagcccugacagggaucgccguggaacaggacaagaacacccaagagguguucgcccaagugaagcaaaucuacaagaccccuccuaucaaggacuucggcggcuucaauuucagccagauucugcccgauccuagcaagcccagcaagcggagcuucaucgaggaccugcuguucaacaaagugacacuggccgacgccggcuucaucaagcaguauggcgauugucugggcgacauugccgccagggaucugauuugcgcccagaaguuuaacggacugacagugcugccuccucugcugaccgaugagaugaucgcccaguacacaucugcccugcuggccggcacaaucacaagcggcuggacauuuggagcuggcgccgcucugcagauccccuuugcuaugcagauggccuaccgguucaacggcaucggagugacccagaaugugcuguacgagaaccagaagcugaucgccaaccaguucaacagcgccaucggcaagauccaggacagccugagcagcacagcaagcgcccugggaaagcugcaggacguggucaaccagaaugcccaggcacugaacacccuggucaagcagcuguccuccaacuucggcgccaucagcucugugcugaacgauauccugagcagacuggacaaggucgaggccgaggugcagaucgacagacugaucacaggcagacugcagagccuccagacauacgugacccagcagcugaucagagccgccgagauuagagccucugccaaucuggccgccaccaagaugucugagugugugcugggccagagcaagagaguggacuuuugcggcaagggcuaccaccugaugagcuucccucagucugccccucacggcgugguguuucugcacgugacauaugugcccgcucaagagaagaauuucaccaccgcuccagccaucugccacgacggcaaagcccacuuuccuagagaaggcguguucguguccaacggcacccauugguucgugacacagcggaacuucuacgagccccagaucaucaccaccgacaacaccuucgugucuggcaacugcgacguugugaucggcauugugaacaauaccguguacgacccucugcagcccgagcuggacagcuucaaagaggaacuggacaaguacuuuaagaaccacacaagccccgacguggaccugggcgauaucagcggaaucaaugccagcgucgugaacauccagaaagagaucgaccggcugaacgagguggccaagaaucugaacgagagccugaucgaccugcaagaacuggggaaguacgagcaguacaucaaguggcccugguacaucuggcugggcuuuaucgccggacugauugccaucgugauggucacaaucaugcuguguugcaugaccagcugcuguagcugccugaagggcuguuguagcuguggcagcugcugcaaguucgacgaggacgauucugagcccgugcugaagggcgugaaacugcacuacaccugaggacuaguuauaagacugacuagcccgaugggccucccaacgggcccuccuccccuccuugcaccgagagaucuaaaaaaaaaaaaaaaaaaaaaaaaaaaaaaaaaaaaaaaaaaaaaaaaaaaaaaaaaaaaaaaaaaaaaaaaaaaaaaaaaaaaaaaaaaaaaaaaaaaa

SEQ ID NO: 25909 - RNA, 4011 nt, Artificial Sequence
  SARS-CoV-2/Wuhan/WIV05/2019__EPI_ISL_402128 spike protein mRNA gc mod (1-1273)(D614G_I692V)
aggagaaagcuuaccauguucguguuucuggugcugcugccccugguguccagccagugugugaaccugaccaccagaacacagcugccuccagccuacaccaacagcuucaccagaggcguguacuaccccgacaagguguucagauccagcgugcugcacucuacccaggaccuguuccugccuuucuucagcaacgugaccugguuccacgccauccacguguccggcaccaauggcaccaagagauucgacaaccccgugcugcccuucaacgacgggguguacuuugccagcaccgagaaguccaacaucaucagaggcuggaucuucggcaccacacuggacagcaagacccagagccugcugaucgugaacaacgccaccaacguggucaucaaagugugcgaguuccaguucugcaacgaccccuuccugggcgucuacuaccacaagaacaacaagagcuggauggaaagcgaguuccggguguacagcagcgccaacaacugcaccuucgaguacgugucccagccuuuccugauggaccuggaaggcaagcagggcaacuucaagaaccugcgcgaguucguguucaagaacaucgacggcuacuucaaaaucuacagcaagcacaccccuaucaaccucgugcgggaucugccucagggcuucucugcucuggaaccccugguggaucugcccaucggcaucaacaucacccgguuucagacacugcuggcccugcacagaagcuaccugacaccuggcgauagcagcagcggauggacagcuggugccgccgcuuacuaugugggcuaccugcagccuagaaccuuccugcugaaguacaacgagaacggcaccaucaccgacgccguggauugugcucuggauccucugagcgagacaaagugcacccugaaguccuucaccguggaaaagggcaucuaccagaccagcaacuuccgggugcagcccaccgaauccaucgugcgguuccccaauaucaccaaucugugccccuucggcgagguguucaaugccaccagauucgccucuguguacgccuggaaccggaagcggaucagcaauugcguggccgacuacuccgugcuguacaacuccgccagcuucagcaccuucaagugcuacggcguguccccuaccaagcugaacgaccugugcuucacaaacguguacgccgacagcuucgugauccggggagaugaagugcggcagauugccccuggacagacaggcaagaucgccgacuacaacuacaagcugcccgacgacuucaccggcugugugauugccuggaacagcaacaaccuggacuccaaagucggcggcaacuacaauuaccuguaccggcuguuccggaaguccaaucugaagcccuucgagcgggacaucagcaccgaaaucuaucaggccggcagcaccccuugcaacggcguggaaggcuucaacugcuacuucccacugcaguccuacggcuuucagcccacaaauggcgugggcuaucagcccuacagagugguggugcugagcuucgaacugcugcaugcuccugccacagugugcggcccuaagaaaagcaccaaucucgugaagaacaaaugcgugaacuucaacuucaacggccugaccggcaccggcgugcugacagagagcaacaagaaguuccugccauuccagcaguuuggccgggauaucgccgauaccacagacgccguuagagauccccagacacuggaaauccuggacaucaccccaugcagcuucggcggagugucugugaucaccccuggcaccaacaccagcaaucagguggcagugcuguaccagggcgugaacuguaccgaagugcccguggccauucacgccgaucagcugacaccuacauggcggguguacuccaccggcagcaauguguuucagaccagagccggcugucugaucggagccgagcacgugaacaauagcuacgagugcgacauccccaucggcgcuggcaucugugccagcuaccagacacagacaaacagccccagacgggcuagaagcguggccagccagagcgugauugccuacacaaugucucugggcgccgagaacagcguggccuacuccaacaacucuaucgcuauccccaccaacuucaccaucagcgugaccaccgagauccugccuguguccaugaccaagaccagcguggacugcaccauguacaucugcggcgauuccaccgagugcuccaaccugcugcugcaguacggcagcuucugcacccagcugaauagagcccugacagggaucgccguggaacaggacaagaacacccaagagguguucgcccaagugaagcaaaucuacaagaccccuccuaucaaggacuucggcggcuucaauuucagccagauucugcccgauccuagcaagcccagcaagcggagcuucaucgaggaccugcuguucaacaaagugacacuggccgacgccggcuucaucaagcaguauggcgauugucugggcgacauugccgccagggaucugauuugcgcccagaaguuuaacggacugacagugcugccuccucugcugaccgaugagaugaucgcccaguacacaucugcccugcuggccggcacaaucacaagcggcuggacauuuggagcuggcgccgcucugcagauccccuuugcuaugcagauggccuaccgguucaacggcaucggagugacccagaaugugcuguacgagaaccagaagcugaucgccaaccaguucaacagcgccaucggcaagauccaggacagccugagcagcacagcaagcgcccugggaaagcugcaggacguggucaaccagaaugcccaggcacugaacacccuggucaagcagcuguccuccaacuucggcgccaucagcucugugcugaacgauauccugagcagacuggacaaggucgaggccgaggugcagaucgacagacugaucacaggcagacugcagagccuccagacauacgugacccagcagcugaucagagccgccgagauuagagccucugccaaucuggccgccaccaagaugucugagugugugcugggccagagcaagagaguggacuuuugcggcaagggcuaccaccugaugagcuucccucagucugccccucacggcgugguguuucugcacgugacauaugugcccgcucaagagaagaauuucaccaccgcuccagccaucugccacgacggcaaagcccacuuuccuagagaaggcguguucguguccaacggcacccauugguucgugacacagcggaacuucuacgagccccagaucaucaccaccgacaacaccuucgugucuggcaacugcgacguugugaucggcauugugaacaauaccguguacgacccucugcagcccgagcuggacagcuucaaagaggaacuggacaaguacuuuaagaaccacacaagccccgacguggaccugggcgauaucagcggaaucaaugccagcgucgugaacauccagaaagagaucgaccggcugaacgagguggccaagaaucugaacgagagccugaucgaccugcaagaacuggggaaguacgagcaguacaucaaguggcccugguacaucuggcugggcuuuaucgccggacugauugccaucgugauggucacaaucaugcuguguugcaugaccagcugcuguagcugccugaagggcuguuguagcuguggcagcugcugcaaguucgacgaggacgauucugagcccgugcugaagggcgugaaacugcacuacaccugaggacuaguuauaagacugacuagcccgaugggccucccaacgggcccuccuccccuccuugcaccgagagaucuaaaaaaaaaaaaaaaaaaaaaaaaaaaaaaaaaaaaaaaaaaaaaaaaaaaaaaaaaaaaaaaaaaaaaaaaaaaaaaaaaaaaaaaaaaaaaaaaaaaa

SEQ ID NO: 25910 - RNA, 4011 nt, Artificial Sequence
  SARS-CoV-2/Wuhan/WIV05/2019__EPI_ISL_402128 spike protein mRNA gc mod (1-1273)(D614G_M1229I)
aggagaaagcuuaccauguucguguuucuggugcugcugccccugguguccagccagugugugaaccugaccaccagaacacagcugccuccagccuacaccaacagcuucaccagaggcguguacuaccccgacaagguguucagauccagcgugcugcacucuacccaggaccuguuccugccuuucuucagcaacgugaccugguuccacgccauccacguguccggcaccaauggcaccaagagauucgacaaccccgugcugcccuucaacgacgggguguacuuugccagcaccgagaaguccaacaucaucagaggcuggaucuucggcaccacacuggacagcaagacccagagccugcugaucgugaacaacgccaccaacguggucaucaaagugugcgaguuccaguucugcaacgaccccuuccugggcgucuacuaccacaagaacaacaagagcuggauggaaagcgaguuccggguguacagcagcgccaacaacugcaccuucgaguacgugucccagccuuuccugauggaccuggaaggcaagcagggcaacuucaagaaccugcgcgaguucguguucaagaacaucgacggcuacuucaaaaucuacagcaagcacaccccuaucaaccucgugcgggaucugccucagggcuucucugcucuggaaccccugguggaucugcccaucggcaucaacaucacccgguuucagacacugcuggcccugcacagaagcuaccugacaccuggcgauagcagcagcggauggacagcuggugccgccgcuuacuaugugggcuaccugcagccuagaaccuuccugcugaaguacaacgagaacggcaccaucaccgacgccguggauugugcucuggauccucugagcgagacaaagugcacccugaaguccuucaccguggaaaagggcaucuaccagaccagcaacuuccgggugcagcccaccgaauccaucgugcgguuccccaauaucaccaaucugugccccuucggcgagguguucaaugccaccagauucgccucuguguacgccuggaaccggaagcggaucagcaauugcguggccgacuacuccgugcuguacaacuccgccagcuucagcaccuucaagugcuacggcguguccccuaccaagcugaacgaccugugcuucacaaacguguacgccgacagcuucgugauccggggagaugaagugcggcagauugccccuggacagacaggcaagaucgccgacuacaacuacaagcugcccgacgacuucaccggcugugugauugccuggaacagcaacaaccuggacuccaaagucggcggcaacuacaauuaccuguaccggcuguuccggaaguccaaucugaagcccuucgagcgggacaucagcaccgaaaucuaucaggccggcagcaccccuugcaacggcguggaaggcuucaacugcuacuucccacugcaguccuacggcuuucagcccacaaauggcgugggcuaucagcccuacagagugguggugcugagcuucgaacugcugcaugcuccugccacagugugcggcccuaagaaaagcaccaaucucgugaagaacaaaugcgugaacuucaacuucaacggccugaccggcaccggcgugcugacagagagcaacaagaaguuccugccauuccagcaguuuggccgggauaucgccgauaccacagacgccguuagagauccccagacacuggaaauccuggacaucaccccaugcagcuucggcggagugucugugaucaccccuggcaccaacaccagcaaucagguggcagugcuguaccagggcgugaacuguaccgaagugcccguggccauucacgccgaucagcugacaccuacauggcggguguacuccaccggcagcaauguguuucagaccagagccggcugucugaucggagccgagcacgugaacaauagcuacgagugcgacauccccaucggcgcuggcaucugugccagcuaccagacacagacaaacagccccagacgggcuagaagcguggccagccagagcaucauugccuacacaaugucucugggcgccgagaacagcguggccuacuccaacaacucuaucgcuauccccaccaacuucaccaucagcgugaccaccgagauccugccuguguccaugaccaagaccagcguggacugcaccauguacaucugcggcgauuccaccgagugcuccaaccugcugcugcaguacggcagcuucugcacccagcugaauagagcccugacagggaucgccguggaacaggacaagaacacccaagagguguucgcccaagugaagcaaaucuacaagaccccuccuaucaaggacuucggcggcuucaauuucagccagauucugcccgauccuagcaagcccagcaagcggagcuucaucgaggaccugcuguucaacaaagugacacuggccgacgccggcuucaucaagcaguauggcgauugucugggcgacauugccgccagggaucugauuugcgcccagaaguuuaacggacugacagugcugccuccucugcugaccgaugagaugaucgcccaguacacaucugcccugcuggccggcacaaucacaagcggcuggacauuuggagcuggcgccgcucugcagauccccuuugcuaugcagauggccuaccgguucaacggcaucggagugacccagaaugugcuguacgagaaccagaagcugaucgccaaccaguucaacagcgccaucggcaagauccaggacagccugagcagcacagcaagcgcccugggaaagcugcaggacguggucaaccagaaugcccaggcacugaacacccuggucaagcagcuguccuccaacuucggcgccaucagcucugugcugaacgauauccugagcagacuggacaaggucgaggccgaggugcagaucgacagacugaucacaggcagacugcagagccuccagacauacgugacccagcagcugaucagagccgccgagauuagagccucugccaaucuggccgccaccaagaugucugagugugugcugggccagagcaagagaguggacuuuugcggcaagggcuaccaccugaugagcuucccucagucugccccucacggcgugguguuucugcacgugacauaugugcccgcucaagagaagaauuucaccaccgcuccagccaucugccacgacggcaaagcccacuuuccuagagaaggcguguucguguccaacggcacccauugguucgugacacagcggaacuucuacgagccccagaucaucaccaccgacaacaccuucgugucuggcaacugcgacguugugaucggcauugugaacaauaccguguacgacccucugcagcccgagcuggacagcuucaaagaggaacuggacaaguacuuuaagaaccacacaagccccgacguggaccugggcgauaucagcggaaucaaugccagcgucgugaacauccagaaagagaucgaccggcugaacgagguggccaagaaucugaacgagagccugaucgaccugcaagaacuggggaaguacgagcaguacaucaaguggcccugguacaucuggcugggcuuuaucgccggacugauugccaucgugaucgucacaaucaugcuguguugcaugaccagcugcuguagcugccugaagggcuguuguagcuguggcagcugcugcaaguucgacgaggacgauucugagcccgugcugaagggcgugaaacugcacuacaccugaggacuaguuauaagacugacuagcccgaugggccucccaacgggcccuccuccccuccuugcaccgagagaucuaaaaaaaaaaaaaaaaaaaaaaaaaaaaaaaaaaaaaaaaaaaaaaaaaaaaaaaaaaaaaaaaaaaaaaaaaaaaaaaaaaaaaaaaaaaaaaaaaaaa

SEQ ID NO: 25911 - RNA, 4005 nt, Artificial Sequence
  SARS-CoV-2/Wuhan/WIV05/2019__EPI_ISL_402128 spike protein mRNA gc mod (1-1273)(H69del_V70del_A222V_Y453F_S477N_D614G_I692V)
aggagaaagcuuaccauguucguguuucuggugcugcugccccugguguccagccagugugugaaccugaccaccagaacacagcugccuccagccuacaccaacagcuucaccagaggcguguacuaccccgacaagguguucagauccagcgugcugcacucuacccaggaccuguuccugccuuucuucagcaacgugaccugguuccacgccaucuccggcaccaauggcaccaagagauucgacaaccccgugcugcccuucaacgacgggguguacuuugccagcaccgagaaguccaacaucaucagaggcuggaucuucggcaccacacuggacagcaagacccagagccugcugaucgugaacaacgccaccaacguggucaucaaagugugcgaguuccaguucugcaacgaccccuuccugggcgucuacuaccacaagaacaacaagagcuggauggaaagcgaguuccggguguacagcagcgccaacaacugcaccuucgaguacgugucccagccuuuccugauggaccuggaaggcaagcagggcaacuucaagaaccugcgcgaguucguguucaagaacaucgacggcuacuucaaaaucuacagcaagcacaccccuaucaaccucgugcgggaucugccucagggcuucucugugcuggaaccccugguggaucugcccaucggcaucaacaucacccgguuucagacacugcuggcccugcacagaagcuaccugacaccuggcgauagcagcagcggauggacagcuggugccgccgcuuacuaugugggcuaccugcagccuagaaccuuccugcugaaguacaacgagaacggcaccaucaccgacgccguggauugugcucuggauccucugagcgagacaaagugcacccugaaguccuucaccguggaaaagggcaucuaccagaccagcaacuuccgggugcagcccaccgaauccaucgugcgguuccccaauaucaccaaucugugccccuucggcgagguguucaaugccaccagauucgccucuguguacgccuggaaccggaagcggaucagcaauugcguggccgacuacuccgugcuguacaacuccgccagcuucagcaccuucaagugcuacggcguguccccuaccaagcugaacgaccugugcuucacaaacguguacgccgacagcuucgugauccggggagaugaagugcggcagauugccccuggacagacaggcaagaucgccgacuacaacuacaagcugcccgacgacuucaccggcugugugauugccuggaacagcaacaaccuggacuccaaagucggcggcaacuacaauuaccuguuccggcuguuccggaaguccaaucugaagcccuucgagcgggacaucagcaccgaaaucuaucaggccggcaacaccccuugcaacggcguggaaggcuucaacugcuacuucccacugcaguccuacggcuuucagcccacaaauggcgugggcuaucagcccuacagagugguggugcugagcuucgaacugcugcaugcuccugccacagugugcggcccuaagaaaagcaccaaucucgugaagaacaaaugcgugaacuucaacuucaacggccugaccggcaccggcgugcugacagagagcaacaagaaguuccugccauuccagcaguuuggccgggauaucgccgauaccacagacgccguuagagauccccagacacuggaaauccuggacaucaccccaugcagcuucggcggagugucugugaucaccccuggcaccaacaccagcaaucagguggcagugcuguaccagggcgugaacuguaccgaagugcccguggccauucacgccgaucagcugacaccuacauggcggguguacuccaccggcagcaauguguuucagaccagagccggcugucugaucggagccgagcacgugaacaauagcuacgagugcgacauccccaucggcgcuggcaucugugccagcuaccagacacagacaaacagccccagacgggcuagaagcguggccagccagagcgugauugccuacacaaugucucugggcgccgagaacagcguggccuacuccaacaacucuaucgcuauccccaccaacuucaccaucagcgugaccaccgagauccugccuguguccaugaccaagaccagcguggacugcaccauguacaucugcggcgauuccaccgagugcuccaaccugcugcugcaguacggcagcuucugcacccagcugaauagagcccugacagggaucgccguggaacaggacaagaacacccaagagguguucgcccaagugaagcaaaucuacaagaccccuccuaucaaggacuucggcggcuucaauuucagccagauucugcccgauccuagcaagcccagcaagcggagcuucaucgaggaccugcuguucaacaaagugacacuggccgacgccggcuucaucaagcaguauggcgauugucugggcgacauugccgccagggaucugauuugcgcccagaaguuuaacggacugacagugcugccuccucugcugaccgaugagaugaucgcccaguacacaucugcccugcuggccggcacaaucacaagcggcuggacauuuggagcuggcgccgcucugcagauccccuuugcuaugcagauggccuaccgguucaacggcaucggagugacccagaaugugcuguacgagaaccagaagcugaucgccaaccaguucaacagcgccaucggcaagauccaggacagccugagcagcacagcaagcgcccugggaaagcugcaggacguggucaaccagaaugcccaggcacugaacacccuggucaagcagcuguccuccaacuucggcgccaucagcucugugcugaacgauauccugagcagacuggacaaggucgaggccgaggugcagaucgacagacugaucacaggcagacugcagagccuccagacauacgugacccagcagcugaucagagccgccgagauuagagccucugccaaucuggccgccaccaagaugucugagugugugcugggccagagcaagagaguggacuuuugcggcaagggcuaccaccugaugagcuucccucagucugccccucacggcgugguguuucugcacgugacauaugugcccgcucaagagaagaauuucaccaccgcuccagccaucugccacgacggcaaagcccacuuuccuagagaaggcguguucguguccaacggcacccauugguucgugacacagcggaacuucuacgagccccagaucaucaccaccgacaacaccuucgugucuggcaacugcgacguugugaucggcauugugaacaauaccguguacgacccucugcagcccgagcuggacagcuucaaagaggaacuggacaaguacuuuaagaaccacacaagccccgacguggaccugggcgauaucagcggaaucaaugccagcgucgugaacauccagaaagagaucgaccggcugaacgagguggccaagaaucugaacgagagccugaucgaccugcaagaacuggggaaguacgagcaguacaucaaguggcccugguacaucuggcugggcuuuaucgccggacugauugccaucgugauggucacaaucaugcuguguugcaugaccagcugcuguagcugccugaagggcuguuguagcuguggcagcugcugcaaguucgacgaggacgauucugagcccgugcugaagggcgugaaacugcacuacaccugaggacuaguuauaagacugacuagcccgaugggccucccaacgggcccuccuccccuccuugcaccgagagaucuaaaaaaaaaaaaaaaaaaaaaaaaaaaaaaaaaaaaaaaaaaaaaaaaaaaaaaaaaaaaaaaaaaaaaaaaaaaaaaaaaaaaaaaaaaaaaaaaaaaa

SEQ ID NO: 25912 - RNA, 4005 nt, Artificial Sequence
  SARS-CoV-2/Wuhan/WIV05/2019__EPI_ISL_402128 spike protein mRNA gc mod (1-1273)(H69del_V70del_Y453F_D614G_I692V_M1229I)
aggagaaagcuuaccauguucguguuucuggugcugcugccccugguguccagccagugugugaaccugaccaccagaacacagcugccuccagccuacaccaacagcuucaccagaggcguguacuaccccgacaagguguucagauccagcgugcugcacucuacccaggaccuguuccugccuuucuucagcaacgugaccugguuccacgccaucuccggcaccaauggcaccaagagauucgacaaccccgugcugcccuucaacgacgggguguacuuugccagcaccgagaaguccaacaucaucagaggcuggaucuucggcaccacacuggacagcaagacccagagccugcugaucgugaacaacgccaccaacguggucaucaaagugugcgaguuccaguucugcaacgaccccuuccugggcgucuacuaccacaagaacaacaagagcuggauggaaagcgaguuccggguguacagcagcgccaacaacugcaccuucgaguacgugucccagccuuuccugauggaccuggaaggcaagcagggcaacuucaagaaccugcgcgaguucguguucaagaacaucgacggcuacuucaaaaucuacagcaagcacaccccuaucaaccucgugcgggaucugccucagggcuucucugcucuggaaccccugguggaucugcccaucggcaucaacaucacccgguuucagacacugcuggcccugcacagaagcuaccugacaccuggcgauagcagcagcggauggacagcuggugccgccgcuuacuaugugggcuaccugcagccuagaaccuuccugcugaaguacaacgagaacggcaccaucaccgacgccguggauugugcucuggauccucugagcgagacaaagugcacccugaaguccuucaccguggaaaagggcaucuaccagaccagcaacuuccgggugcagcccaccgaauccaucgugcgguuccccaauaucaccaaucugugccccuucggcgagguguucaaugccaccagauucgccucuguguacgccuggaaccggaagcggaucagcaauugcguggccgacuacuccgugcuguacaacuccgccagcuucagcaccuucaagugcuacggcguguccccuaccaagcugaacgaccugugcuucacaaacguguacgccgacagcuucgugauccggggagaugaagugcggcagauugccccuggacagacaggcaagaucgccgacuacaacuacaagcugcccgacgacuucaccggcugugugauugccuggaacagcaacaaccuggacuccaaagucggcggcaacuacaauuaccuguuccggcuguuccggaaguccaaucugaagcccuucgagcgggacaucagcaccgaaaucuaucaggccggcagcaccccuugcaacggcguggaaggcuucaacugcuacuucccacugcaguccuacggcuuucagcccacaaauggcgugggcuaucagcccuacagagugguggugcugagcuucgaacugcugcaugcuccugccacagugugcggcccuaagaaaagcaccaaucucgugaagaacaaaugcgugaacuucaacuucaacggccugaccggcaccggcgugcugacagagagcaacaagaaguuccugccauuccagcaguuuggccgggauaucgccgauaccacagacgccguuagagauccccagacacuggaaauccuggacaucaccccaugcagcuucggcggagugucugugaucaccccuggcaccaacaccagcaaucagguggcagugcuguaccagggcgugaacuguaccgaagugcccguggccauucacgccgaucagcugacaccuacauggcggguguacuccaccggcagcaauguguuucagaccagagccggcugucugaucggagccgagcacgugaacaauagcuacgagugcgacauccccaucggcgcuggcaucugugccagcuaccagacacagacaaacagccccagacgggcuagaagcguggccagccagagcgugauugccuacacaaugucucugggcgccgagaacagcguggccuacuccaacaacucuaucgcuauccccaccaacuucaccaucagcgugaccaccgagauccugccuguguccaugaccaagaccagcguggacugcaccauguacaucugcggcgauuccaccgagugcuccaaccugcugcugcaguacggcagcuucugcacccagcugaauagagcccugacagggaucgccguggaacaggacaagaacacccaagagguguucgcccaagugaagcaaaucuacaagaccccuccuaucaaggacuucggcggcuucaauuucagccagauucugcccgauccuagcaagcccagcaagcggagcuucaucgaggaccugcuguucaacaaagugacacuggccgacgccggcuucaucaagcaguauggcgauugucugggcgacauugccgccagggaucugauuugcgcccagaaguuuaacggacugacagugcugccuccucugcugaccgaugagaugaucgcccaguacacaucugcccugcuggccggcacaaucacaagcggcuggacauuuggagcuggcgccgcucugcagauccccuuugcuaugcagauggccuaccgguucaacggcaucggagugacccagaaugugcuguacgagaaccagaagcugaucgccaaccaguucaacagcgccaucggcaagauccaggacagccugagcagcacagcaagcgcccugggaaagcugcaggacguggucaaccagaaugcccaggcacugaacacccuggucaagcagcuguccuccaacuucggcgccaucagcucugugcugaacgauauccugagcagacuggacaaggucgaggccgaggugcagaucgacagacugaucacaggcagacugcagagccuccagacauacgugacccagcagcugaucagagccgccgagauuagagccucugccaaucuggccgccaccaagaugucugagugugugcugggccagagcaagagaguggacuuuugcggcaagggcuaccaccugaugagcuucccucagucugccccucacggcgugguguuucugcacgugacauaugugcccgcucaagagaagaauuucaccaccgcuccagccaucugccacgacggcaaagcccacuuuccuagagaaggcguguucguguccaacggcacccauugguucgugacacagcggaacuucuacgagccccagaucaucaccaccgacaacaccuucgugucuggcaacugcgacguugugaucggcauugugaacaauaccguguacgacccucugcagcccgagcuggacagcuucaaagaggaacuggacaaguacuuuaagaaccacacaagccccgacguggaccugggcgauaucagcggaaucaaugccagcgucgugaacauccagaaagagaucgaccggcugaacgagguggccaagaaucugaacgagagccugaucgaccugcaagaacuggggaaguacgagcaguacaucaaguggcccugguacaucuggcugggcuuuaucgccggacugauugccaucgugaucgucacaaucaugcuguguugcaugaccagcugcuguagcugccugaagggcuguuguagcuguggcagcugcugcaaguucgacgaggacgauucugagcccgugcugaagggcgugaaacugcacuacaccugaggacuaguuauaagacugacuagcccgaugggccucccaacgggcccuccuccccuccuugcaccgagagaucuaaaaaaaaaaaaaaaaaaaaaaaaaaaaaaaaaaaaaaaaaaaaaaaaaaaaaaaaaaaaaaaaaaaaaaaaaaaaaaaaaaaaaaaaaaaaaaaaaaaa

SEQ ID NO: 25913 - RNA, 4002 nt, Artificial Sequence
  SARS-CoV-2/Wuhan/WIV05/2019__EPI_ISL_402128 spike protein mRNA gc mod (1-1273)(H69del_V70del_Y144del_N501Y_A570D_D614G_P681H_T716I_S982 A_D1118H)
aggagaaagcuuaccauguucguguuucuggugcugcugccccugguguccagccagugugugaaccugaccaccagaacacagcugccuccagccuacaccaacagcuucaccagaggcguguacuaccccgacaagguguucagauccagcgugcugcacucuacccaggaccuguuccugccuuucuucagcaacgugaccugguuccacgccaucuccggcaccaauggcaccaagagauucgacaaccccgugcugcccuucaacgacgggguguacuuugccagcaccgagaaguccaacaucaucagaggcuggaucuucggcaccacacuggacagcaagacccagagccugcugaucgugaacaacgccaccaacguggucaucaaagugugcgaguuccaguucugcaacgaccccuuccugggcgucuaccacaagaacaacaagagcuggauggaaagcgaguuccggguguacagcagcgccaacaacugcaccuucgaguacgugucccagccuuuccugauggaccuggaaggcaagcagggcaacuucaagaaccugcgcgaguucguguucaagaacaucgacggcuacuucaaaaucuacagcaagcacaccccuaucaaccucgugcgggaucugccucagggcuucucugcucuggaaccccugguggaucugcccaucggcaucaacaucacccgguuucagacacugcuggcccugcacagaagcuaccugacaccuggcgauagcagcagcggauggacagcuggugccgccgcuuacuaugugggcuaccugcagccuagaaccuuccugcugaaguacaacgagaacggcaccaucaccgacgccguggauugugcucuggauccucugagcgagacaaagugcacccugaaguccuucaccguggaaaagggcaucuaccagaccagcaacuuccgggugcagcccaccgaauccaucgugcgguuccccaauaucaccaaucugugccccuucggcgagguguucaaugccaccagauucgccucuguguacgccuggaaccggaagcggaucagcaauugcguggccgacuacuccgugcuguacaacuccgccagcuucagcaccuucaagugcuacggcguguccccuaccaagcugaacgaccugugcuucacaaacguguacgccgacagcuucgugauccggggagaugaagugcggcagauugccccuggacagacaggcaagaucgccgacuacaacuacaagcugcccgacgacuucaccggcugugugauugccuggaacagcaacaaccuggacuccaaagucggcggcaacuacaauuaccuguaccggcuguuccggaaguccaaucugaagcccuucgagcgggacaucagcaccgaaaucuaucaggccggcagcaccccuugcaacggcguggaaggcuucaacugcuacuucccacugcaguccuacggcuuucagcccacauacggcgugggcuaucagcccuacagagugguggugcugagcuucgaacugcugcaugcuccugccacagugugcggcccuaagaaaagcaccaaucucgugaagaacaaaugcgugaacuucaacuucaacggccugaccggcaccggcgugcugacagagagcaacaagaaguuccugccauuccagcaguuuggccgggauaucgacgauaccacagacgccguuagagauccccagacacuggaaauccuggacaucaccccaugcagcuucggcggagugucugugaucaccccuggcaccaacaccagcaaucagguggcagugcuguaccagggcgugaacuguaccgaagugcccguggccauucacgccgaucagcugacaccuacauggcggguguacuccaccggcagcaauguguuucagaccagagccggcugucugaucggagccgagcacgugaacaauagcuacgagugcgacauccccaucggcgcuggcaucugugccagcuaccagacacagacaaacagccacagacgggcuagaagcguggccagccagagcaucauugccuacacaaugucucugggcgccgagaacagcguggccuacuccaacaacucuaucgcuauccccaucaacuucaccaucagcgugaccaccgagauccugccuguguccaugaccaagaccagcguggacugcaccauguacaucugcggcgauuccaccgagugcuccaaccugcugcugcaguacggcagcuucugcacccagcugaauagagcccugacagggaucgccguggaacaggacaagaacacccaagagguguucgcccaagugaagcaaaucuacaagaccccuccuaucaaggacuucggcggcuucaauuucagccagauucugcccgauccuagcaagcccagcaagcggagcuucaucgaggaccugcuguucaacaaagugacacuggccgacgccggcuucaucaagcaguauggcgauugucugggcgacauugccgccagggaucugauuugcgcccagaaguuuaacggacugacagugcugccuccucugcugaccgaugagaugaucgcccaguacacaucugcccugcuggccggcacaaucacaagcggcuggacauuuggagcuggcgccgcucugcagauccccuuugcuaugcagauggccuaccgguucaacggcaucggagugacccagaaugugcuguacgagaaccagaagcugaucgccaaccaguucaacagcgccaucggcaagauccaggacagccugagcagcacagcaagcgcccugggaaagcugcaggacguggucaaccagaaugcccaggcacugaacacccuggucaagcagcuguccuccaacuucggcgccaucagcucugugcugaacgauauccuggccagacuggacaaggucgaggccgaggugcagaucgacagacugaucacaggcagacugcagagccuccagacauacgugacccagcagcugaucagagccgccgagauuagagccucugccaaucuggccgccaccaagaugucugagugugugcugggccagagcaagagaguggacuuuugcggcaagggcuaccaccugaugagcuucccucagucugccccucacggcgugguguuucugcacgugacauaugugcccgcucaagagaagaauuucaccaccgcuccagccaucugccacgacggcaaagcccacuuuccuagagaaggcguguucguguccaacggcacccauugguucgugacacagcggaacuucuacgagccccagaucaucaccacccacaacaccuucgugucuggcaacugcgacguugugaucggcauugugaacaauaccguguacgacccucugcagcccgagcuggacagcuucaaagaggaacuggacaaguacuuuaagaaccacacaagccccgacguggaccugggcgauaucagcggaaucaaugccagcgucgugaacauccagaaagagaucgaccggcugaacgagguggccaagaaucugaacgagagccugaucgaccugcaagaacuggggaaguacgagcaguacaucaaguggcccugguacaucuggcugggcuuuaucgccggacugauugccaucgugauggucacaaucaugcuguguugcaugaccagcugcuguagcugccugaagggcuguuguagcuguggcagcugcugcaaguucgacgaggacgauucugagcccgugcugaagggcgugaaacugcacuacaccugaggacuaguuauaagacugacuagcccgaugggccucccaacgggcccuccuccccuccuugcaccgagagaucuaaaaaaaaaaaaaaaaaaaaaaaaaaaaaaaaaaaaaaaaaaaaaaaaaaaaaaaaaaaaaaaaaaaaaaaaaaaaaaaaaaaaaaaaaaaaaaaaaaaa

SEQ ID NO: 25914 - RNA, 4011 nt, Artificial Sequence
  SARS-CoV-2/Wuhan/WIV05/2019__EPI_ISL_402128 spike protein mRNA gc mod (1-1273)(K417N_E484K_N501Y_D614G)
aggagaaagcuuaccauguucguguuucuggugcugcugccccugguguccagccagugugugaaccugaccaccagaacacagcugccuccagccuacaccaacagcuucaccagaggcguguacuaccccgacaagguguucagauccagcgugcugcacucuacccaggaccuguuccugccuuucuucagcaacgugaccugguuccacgccauccacguguccggcaccaauggcaccaagagauucgacaaccccgugcugcccuucaacgacgggguguacuuugccagcaccgagaaguccaacaucaucagaggcuggaucuucggcaccacacuggacagcaagacccagagccugcugaucgugaacaacgccaccaacguggucaucaaagugugcgaguuccaguucugcaacgaccccuuccugggcgucuacuaccacaagaacaacaagagcuggauggaaagcgaguuccggguguacagcagcgccaacaacugcaccuucgaguacgugucccagccuuuccugauggaccuggaaggcaagcagggcaacuucaagaaccugcgcgaguucguguucaagaacaucgacggcuacuucaaaaucuacagcaagcacaccccuaucaaccucgugcgggaucugccucagggcuucucugcucuggaaccccugguggaucugcccaucggcaucaacaucacccgguuucagacacugcuggcccugcacagaagcuaccugacaccuggcgauagcagcagcggauggacagcuggugccgccgcuuacuaugugggcuaccugcagccuagaaccuuccugcugaaguacaacgagaacggcaccaucaccgacgccguggauugugcucuggauccucugagcgagacaaagugcacccugaaguccuucaccguggaaaagggcaucuaccagaccagcaacuuccgggugcagcccaccgaauccaucgugcgguuccccaauaucaccaaucugugccccuucggcgagguguucaaugccaccagauucgccucuguguacgccuggaaccggaagcggaucagcaauugcguggccgacuacuccgugcuguacaacuccgccagcuucagcaccuucaagugcuacggcguguccccuaccaagcugaacgaccugugcuucacaaacguguacgccgacagcuucgugauccggggagaugaagugcggcagauugccccuggacagacaggcaacaucgccgacuacaacuacaagcugcccgacgacuucaccggcugugugauugccuggaacagcaacaaccuggacuccaaagucggcggcaacuacaauuaccuguaccggcuguuccggaaguccaaucugaagcccuucgagcgggacaucagcaccgaaaucuaucaggccggcagcaccccuugcaacggcgugaagggcuucaacugcuacuucccacugcaguccuacggcuuucagcccacauacggcgugggcuaucagcccuacagagugguggugcugagcuucgaacugcugcaugcuccugccacagugugcggcccuaagaaaagcaccaaucucgugaagaacaaaugcgugaacuucaacuucaacggccugaccggcaccggcgugcugacagagagcaacaagaaguuccugccauuccagcaguuuggccgggauaucgccgauaccacagacgccguuagagauccccagacacuggaaauccuggacaucaccccaugcagcuucggcggagugucugugaucaccccuggcaccaacaccagcaaucagguggcagugcuguaccagggcgugaacuguaccgaagugcccguggccauucacgccgaucagcugacaccuacauggcggguguacuccaccggcagcaauguguuucagaccagagccggcugucugaucggagccgagcacgugaacaauagcuacgagugcgacauccccaucggcgcuggcaucugugccagcuaccagacacagacaaacagccccagacgggcuagaagcguggccagccagagcaucauugccuacacaaugucucugggcgccgagaacagcguggccuacuccaacaacucuaucgcuauccccaccaacuucaccaucagcgugaccaccgagauccugccuguguccaugaccaagaccagcguggacugcaccauguacaucugcggcgauuccaccgagugcuccaaccugcugcugcaguacggcagcuucugcacccagcugaauagagcccugacagggaucgccguggaacaggacaagaacacccaagagguguucgcccaagugaagcaaaucuacaagaccccuccuaucaaggacuucggcggcuucaauuucagccagauucugcccgauccuagcaagcccagcaagcggagcuucaucgaggaccugcuguucaacaaagugacacuggccgacgccggcuucaucaagcaguauggcgauugucugggcgacauugccgccagggaucugauuugcgcccagaaguuuaacggacugacagugcugccuccucugcugaccgaugagaugaucgcccaguacacaucugcccugcuggccggcacaaucacaagcggcuggacauuuggagcuggcgccgcucugcagauccccuuugcuaugcagauggccuaccgguucaacggcaucggagugacccagaaugugcuguacgagaaccagaagcugaucgccaaccaguucaacagcgccaucggcaagauccaggacagccugagcagcacagcaagcgcccugggaaagcugcaggacguggucaaccagaaugcccaggcacugaacacccuggucaagcagcuguccuccaacuucggcgccaucagcucugugcugaacgauauccugagcagacuggacaaggucgaggccgaggugcagaucgacagacugaucacaggcagacugcagagccuccagacauacgugacccagcagcugaucagagccgccgagauuagagccucugccaaucuggccgccaccaagaugucugagugugugcugggccagagcaagagaguggacuuuugcggcaagggcuaccaccugaugagcuucccucagucugccccucacggcgugguguuucugcacgugacauaugugcccgcucaagagaagaauuucaccaccgcuccagccaucugccacgacggcaaagcccacuuuccuagagaaggcguguucguguccaacggcacccauugguucgugacacagcggaacuucuacgagccccagaucaucaccaccgacaacaccuucgugucuggcaacugcgacguugugaucggcauugugaacaauaccguguacgacccucugcagcccgagcuggacagcuucaaagaggaacuggacaaguacuuuaagaaccacacaagccccgacguggaccugggcgauaucagcggaaucaaugccagcgucgugaacauccagaaagagaucgaccggcugaacgagguggccaagaaucugaacgagagccugaucgaccugcaagaacuggggaaguacgagcaguacaucaaguggcccugguacaucuggcugggcuuuaucgccggacugauugccaucgugauggucacaaucaugcuguguugcaugaccagcugcuguagcugccugaagggcuguuguagcuguggcagcugcugcaaguucgacgaggacgauucugagcccgugcugaagggcgugaaacugcacuacaccugaggacuaguuauaagacugacuagcccgaugggccucccaacgggcccuccuccccuccuugcaccgagagaucuaaaaaaaaaaaaaaaaaaaaaaaaaaaaaaaaaaaaaaaaaaaaaaaaaaaaaaaaaaaaaaaaaaaaaaaaaaaaaaaaaaaaaaaaaaaaaaaaaaaa

SEQ ID NO: 25915 - RNA, 4002 nt, Artificial Sequence
  SARS-CoV-2/Wuhan/WIV05/2019__EPI_ISL_402128 spike protein mRNA gc mod (1-1273)(L18F_D80A_D215G_L242del_A243del_L244del_R246I_K417N_E484 K_N501Y_D614G_A701V)
aggagaaagcuuaccauguucguguuucuggugcugcugccccugguguccagccagugugugaacuucaccaccagaacacagcugccuccagccuacaccaacagcuucaccagaggcguguacuaccccgacaagguguucagauccagcgugcugcacucuacccaggaccuguuccugccuuucuucagcaacgugaccugguuccacgccauccacguguccggcaccaauggcaccaagagauucgccaaccccgugcugcccuucaacgacgggguguacuuugccagcaccgagaaguccaacaucaucagaggcuggaucuucggcaccacacuggacagcaagacccagagccugcugaucgugaacaacgccaccaacguggucaucaaagugugcgaguuccaguucugcaacgaccccuuccugggcgucuacuaccacaagaacaacaagagcuggauggaaagcgaguuccggguguacagcagcgccaacaacugcaccuucgaguacgugucccagccuuuccugauggaccuggaaggcaagcagggcaacuucaagaaccugcgcgaguucguguucaagaacaucgacggcuacuucaaaaucuacagcaagcacaccccuaucaaccucgugcggggccugccucagggcuucucugcucuggaaccccugguggaucugcccaucggcaucaacaucacccgguuucagacacugcacaucagcuaccugacaccuggcgauagcagcagcggauggacagcuggugccgccgcuuacuaugugggcuaccugcagccuagaaccuuccugcugaaguacaacgagaacggcaccaucaccgacgccguggauugugcucuggauccucugagcgagacaaagugcacccugaaguccuucaccguggaaaagggcaucuaccagaccagcaacuuccgggugcagcccaccgaauccaucgugcgguuccccaauaucaccaaucugugccccuucggcgagguguucaaugccaccagauucgccucuguguacgccuggaaccggaagcggaucagcaauugcguggccgacuacuccgugcuguacaacuccgccagcuucagcaccuucaagugcuacggcguguccccuaccaagcugaacgaccugugcuucacaaacguguacgccgacagcuucgugauccggggagaugaagugcggcagauugccccuggacagacaggcaacaucgccgacuacaacuacaagcugcccgacgacuucaccggcugugugauugccuggaacagcaacaaccuggacuccaaagucggcggcaacuacaauuaccuguaccggcuguuccggaaguccaaucugaagcccuucgagcgggacaucagcaccgaaaucuaucaggccggcagcaccccuugcaacggcgugaagggcuucaacugcuacuucccacugcaguccuacggcuuucagcccacauacggcgugggcuaucagcccuacagagugguggugcugagcuucgaacugcugcaugcuccugccacagugugcggcccuaagaaaagcaccaaucucgugaagaacaaaugcgugaacuucaacuucaacggccugaccggcaccggcgugcugacagagagcaacaagaaguuccugccauuccagcaguuuggccgggauaucgccgauaccacagacgccguuagagauccccagacacuggaaauccuggacaucaccccaugcagcuucggcggagugucugugaucaccccuggcaccaacaccagcaaucagguggcagugcuguaccagggcgugaacuguaccgaagugcccguggccauucacgccgaucagcugacaccuacauggcggguguacuccaccggcagcaauguguuucagaccagagccggcugucugaucggagccgagcacgugaacaauagcuacgagugcgacauccccaucggcgcuggcaucugugccagcuaccagacacagacaaacagccccagacgggcuagaagcguggccagccagagcaucauugccuacacaaugucucugggcguggagaacagcguggccuacuccaacaacucuaucgcuauccccaccaacuucaccaucagcgugaccaccgagauccugccuguguccaugaccaagaccagcguggacugcaccauguacaucugcggcgauuccaccgagugcuccaaccugcugcugcaguacggcagcuucugcacccagcugaauagagcccugacagggaucgccguggaacaggacaagaacacccaagagguguucgcccaagugaagcaaaucuacaagaccccuccuaucaaggacuucggcggcuucaauuucagccagauucugcccgauccuagcaagcccagcaagcggagcuucaucgaggaccugcuguucaacaaagugacacuggccgacgccggcuucaucaagcaguauggcgauugucugggcgacauugccgccagggaucugauuugcgcccagaaguuuaacggacugacagugcugccuccucugcugaccgaugagaugaucgcccaguacacaucugcccugcuggccggcacaaucacaagcggcuggacauuuggagcuggcgccgcucugcagauccccuuugcuaugcagauggccuaccgguucaacggcaucggagugacccagaaugugcuguacgagaaccagaagcugaucgccaaccaguucaacagcgccaucggcaagauccaggacagccugagcagcacagcaagcgcccugggaaagcugcaggacguggucaaccagaaugcccaggcacugaacacccuggucaagcagcuguccuccaacuucggcgccaucagcucugugcugaacgauauccugagcagacuggacaaggucgaggccgaggugcagaucgacagacugaucacaggcagacugcagagccuccagacauacgugacccagcagcugaucagagccgccgagauuagagccucugccaaucuggccgccaccaagaugucugagugugugcugggccagagcaagagaguggacuuuugcggcaagggcuaccaccugaugagcuucccucagucugccccucacggcgugguguuucugcacgugacauaugugcccgcucaagagaagaauuucaccaccgcuccagccaucugccacgacggcaaagcccacuuuccuagagaaggcguguucguguccaacggcacccauugguucgugacacagcggaacuucuacgagccccagaucaucaccaccgacaacaccuucgugucuggcaacugcgacguugugaucggcauugugaacaauaccguguacgacccucugcagcccgagcuggacagcuucaaagaggaacuggacaaguacuuuaagaaccacacaagccccgacguggaccugggcgauaucagcggaaucaaugccagcgucgugaacauccagaaagagaucgaccggcugaacgagguggccaagaaucugaacgagagccugaucgaccugcaagaacuggggaaguacgagcaguacaucaaguggcccugguacaucuggcugggcuuuaucgccggacugauugccaucgugauggucacaaucaugcuguguugcaugaccagcugcuguagcugccugaagggcuguuguagcuguggcagcugcugcaaguucgacgaggacgauucugagcccgugcugaagggcgugaaacugcacuacaccugaggacuaguuauaagacugacuagcccgaugggccucccaacgggcccuccuccccuccuugcaccgagagaucuaaaaaaaaaaaaaaaaaaaaaaaaaaaaaaaaaaaaaaaaaaaaaaaaaaaaaaaaaaaaaaaaaaaaaaaaaaaaaaaaaaaaaaaaaaaaaaaaaaaa

SEQ ID NO: 25916 - RNA, 4011 nt, Artificial Sequence
  SARS-CoV-2/Wuhan/WIV05/2019__EPI_ISL_402128 spike protein mRNA gc mod (1-1273)(E484K_D614G)
aggagaaagcuuaccauguucguguuucuggugcugcugccccugguguccagccagugugugaaccugaccaccagaacacagcugccuccagccuacaccaacagcuucaccagaggcguguacuaccccgacaagguguucagauccagcgugcugcacucuacccaggaccuguuccugccuuucuucagcaacgugaccugguuccacgccauccacguguccggcaccaauggcaccaagagauucgacaaccccgugcugcccuucaacgacgggguguacuuugccagcaccgagaaguccaacaucaucagaggcuggaucuucggcaccacacuggacagcaagacccagagccugcugaucgugaacaacgccaccaacguggucaucaaagugugcgaguuccaguucugcaacgaccccuuccugggcgucuacuaccacaagaacaacaagagcuggauggaaagcgaguuccggguguacagcagcgccaacaacugcaccuucgaguacgugucccagccuuuccugauggaccuggaaggcaagcagggcaacuucaagaaccugcgcgaguucguguucaagaacaucgacggcuacuucaaaaucuacagcaagcacaccccuaucaaccucgugcgggaucugccucagggcuucucugcucuggaaccccugguggaucugcccaucggcaucaacaucacccgguuucagacacugcuggcccugcacagaagcuaccugacaccuggcgauagcagcagcggauggacagcuggugccgccgcuuacuaugugggcuaccugcagccuagaaccuuccugcugaaguacaacgagaacggcaccaucaccgacgccguggauugugcucuggauccucugagcgagacaaagugcacccugaaguccuucaccguggaaaagggcaucuaccagaccagcaacuuccgggugcagcccaccgaauccaucgugcgguuccccaauaucaccaaucugugccccuucggcgagguguucaaugccaccagauucgccucuguguacgccuggaaccggaagcggaucagcaauugcguggccgacuacuccgugcuguacaacuccgccagcuucagcaccuucaagugcuacggcguguccccuaccaagcugaacgaccugugcuucacaaacguguacgccgacagcuucgugauccggggagaugaagugcggcagauugccccuggacagacaggcaagaucgccgacuacaacuacaagcugcccgacgacuucaccggcugugugauugccuggaacagcaacaaccuggacuccaaagucggcggcaacuacaauuaccuguaccggcuguuccggaaguccaaucugaagcccuucgagcgggacaucagcaccgaaaucuaucaggccggcagcaccccuugcaacggcgugaagggcuucaacugcuacuucccacugcaguccuacggcuuucagcccacaaauggcgugggcuaucagcccuacagagugguggugcugagcuucgaacugcugcaugcuccugccacagugugcggcccuaagaaaagcaccaaucucgugaagaacaaaugcgugaacuucaacuucaacggccugaccggcaccggcgugcugacagagagcaacaagaaguuccugccauuccagcaguuuggccgggauaucgccgauaccacagacgccguuagagauccccagacacuggaaauccuggacaucaccccaugcagcuucggcggagugucugugaucaccccuggcaccaacaccagcaaucagguggcagugcuguaccagggcgugaacuguaccgaagugcccguggccauucacgccgaucagcugacaccuacauggcggguguacuccaccggcagcaauguguuucagaccagagccggcugucugaucggagccgagcacgugaacaauagcuacgagugcgacauccccaucggcgcuggcaucugugccagcuaccagacacagacaaacagccccagacgggcuagaagcguggccagccagagcaucauugccuacacaaugucucugggcgccgagaacagcguggccuacuccaacaacucuaucgcuauccccaccaacuucaccaucagcgugaccaccgagauccugccuguguccaugaccaagaccagcguggacugcaccauguacaucugcggcgauuccaccgagugcuccaaccugcugcugcaguacggcagcuucugcacccagcugaauagagcccugacagggaucgccguggaacaggacaagaacacccaagagguguucgcccaagugaagcaaaucuacaagaccccuccuaucaaggacuucggcggcuucaauuucagccagauucugcccgauccuagcaagcccagcaagcggagcuucaucgaggaccugcuguucaacaaagugacacuggccgacgccggcuucaucaagcaguauggcgauugucugggcgacauugccgccagggaucugauuugcgcccagaaguuuaacggacugacagugcugccuccucugcugaccgaugagaugaucgcccaguacacaucugcccugcuggccggcacaaucacaagcggcuggacauuuggagcuggcgccgcucugcagauccccuuugcuaugcagauggccuaccgguucaacggcaucggagugacccagaaugugcuguacgagaaccagaagcugaucgccaaccaguucaacagcgccaucggcaagauccaggacagccugagcagcacagcaagcgcccugggaaagcugcaggacguggucaaccagaaugcccaggcacugaacacccuggucaagcagcuguccuccaacuucggcgccaucagcucugugcugaacgauauccugagcagacuggacaaggucgaggccgaggugcagaucgacagacugaucacaggcagacugcagagccuccagacauacgugacccagcagcugaucagagccgccgagauuagagccucugccaaucuggccgccaccaagaugucugagugugugcugggccagagcaagagaguggacuuuugcggcaagggcuaccaccugaugagcuucccucagucugccccucacggcgugguguuucugcacgugacauaugugcccgcucaagagaagaauuucaccaccgcuccagccaucugccacgacggcaaagcccacuuuccuagagaaggcguguucguguccaacggcacccauugguucgugacacagcggaacuucuacgagccccagaucaucaccaccgacaacaccuucgugucuggcaacugcgacguugugaucggcauugugaacaauaccguguacgacccucugcagcccgagcuggacagcuucaaagaggaacuggacaaguacuuuaagaaccacacaagccccgacguggaccugggcgauaucagcggaaucaaugccagcgucgugaacauccagaaagagaucgaccggcugaacgagguggccaagaaucugaacgagagccugaucgaccugcaagaacuggggaaguacgagcaguacaucaaguggcccugguacaucuggcugggcuuuaucgccggacugauugccaucgugauggucacaaucaugcuguguugcaugaccagcugcuguagcugccugaagggcuguuguagcuguggcagcugcugcaaguucgacgaggacgauucugagcccgugcugaagggcgugaaacugcacuacaccugaggacuaguuauaagacugacuagcccgaugggccucccaacgggcccuccuccccuccuugcaccgagagaucuaaaaaaaaaaaaaaaaaaaaaaaaaaaaaaaaaaaaaaaaaaaaaaaaaaaaaaaaaaaaaaaaaaaaaaaaaaaaaaaaaaaaaaaaaaaaaaaaaaaa

SEQ ID NO: 25917 - RNA, 4011 nt, Artificial Sequence
  SARS-CoV-2/Wuhan/WIV05/2019__EPI_ISL_402128 spike protein mRNA gc mod (1-1273)(L18F_T20N_P26S_D138Y_R190S_K417T_E484K_N501Y_D614G_H655Y _T1027I)
aggagaaagcuuaccauguucguguuucuggugcugcugccccugguguccagccagugugugaacuucaccaacagaacacagcugccuagcgccuacaccaacagcuucaccagaggcguguacuaccccgacaagguguucagauccagcgugcugcacucuacccaggaccuguuccugccuuucuucagcaacgugaccugguuccacgccauccacguguccggcaccaauggcaccaagagauucgacaaccccgugcugcccuucaacgacgggguguacuuugccagcaccgagaaguccaacaucaucagaggcuggaucuucggcaccacacuggacagcaagacccagagccugcugaucgugaacaacgccaccaacguggucaucaaagugugcgaguuccaguucugcaacuaccccuuccugggcgucuacuaccacaagaacaacaagagcuggauggaaagcgaguuccggguguacagcagcgccaacaacugcaccuucgaguacgugucccagccuuuccugauggaccuggaaggcaagcagggcaacuucaagaaccugagcgaguucguguucaagaacaucgacggcuacuucaaaaucuacagcaagcacaccccuaucaaccucgugcgggaucugccucagggcuucucugcucuggaaccccugguggaucugcccaucggcaucaacaucacccgguuucagacacugcuggcccugcacagaagcuaccugacaccuggcgauagcagcagcggauggacagcuggugccgccgcuuacuaugugggcuaccugcagccuagaaccuuccugcugaaguacaacgagaacggcaccaucaccgacgccguggauugugcucuggauccucugagcgagacaaagugcacccugaaguccuucaccguggaaaagggcaucuaccagaccagcaacuuccgggugcagcccaccgaauccaucgugcgguuccccaauaucaccaaucugugccccuucggcgagguguucaaugccaccagauucgccucuguguacgccuggaaccggaagcggaucagcaauugcguggccgacuacuccgugcuguacaacuccgccagcuucagcaccuucaagugcuacggcguguccccuaccaagcugaacgaccugugcuucacaaacguguacgccgacagcuucgugauccggggagaugaagugcggcagauugccccuggacagacaggcaccaucgccgacuacaacuacaagcugcccgacgacuucaccggcugugugauugccuggaacagcaacaaccuggacuccaaagucggcggcaacuacaauuaccuguaccggcuguuccggaaguccaaucugaagcccuucgagcgggacaucagcaccgaaaucuaucaggccggcagcaccccuugcaacggcgugaagggcuucaacugcuacuucccacugcaguccuacggcuuucagcccacauacggcgugggcuaucagcccuacagagugguggugcugagcuucgaacugcugcaugcuccugccacagugugcggcccuaagaaaagcaccaaucucgugaagaacaaaugcgugaacuucaacuucaacggccugaccggcaccggcgugcugacagagagcaacaagaaguuccugccauuccagcaguuuggccgggauaucgccgauaccacagacgccguuagagauccccagacacuggaaauccuggacaucaccccaugcagcuucggcggagugucugugaucaccccuggcaccaacaccagcaaucagguggcagugcuguaccagggcgugaacuguaccgaagugcccguggccauucacgccgaucagcugacaccuacauggcggguguacuccaccggcagcaauguguuucagaccagagccggcugucugaucggagccgaguacgugaacaauagcuacgagugcgacauccccaucggcgcuggcaucugugccagcuaccagacacagacaaacagccccagacgggcuagaagcguggccagccagagcaucauugccuacacaaugucucugggcgccgagaacagcguggccuacuccaacaacucuaucgcuauccccaccaacuucaccaucagcgugaccaccgagauccugccuguguccaugaccaagaccagcguggacugcaccauguacaucugcggcgauuccaccgagugcuccaaccugcugcugcaguacggcagcuucugcacccagcugaauagagcccugacagggaucgccguggaacaggacaagaacacccaagagguguucgcccaagugaagcaaaucuacaagaccccuccuaucaaggacuucggcggcuucaauuucagccagauucugcccgauccuagcaagcccagcaagcggagcuucaucgaggaccugcuguucaacaaagugacacuggccgacgccggcuucaucaagcaguauggcgauugucugggcgacauugccgccagggaucugauuugcgcccagaaguuuaacggacugacagugcugccuccucugcugaccgaugagaugaucgcccaguacacaucugcccugcuggccggcacaaucacaagcggcuggacauuuggagcuggcgccgcucugcagauccccuuugcuaugcagauggccuaccgguucaacggcaucggagugacccagaaugugcuguacgagaaccagaagcugaucgccaaccaguucaacagcgccaucggcaagauccaggacagccugagcagcacagcaagcgcccugggaaagcugcaggacguggucaaccagaaugcccaggcacugaacacccuggucaagcagcuguccuccaacuucggcgccaucagcucugugcugaacgauauccugagcagacuggacaaggucgaggccgaggugcagaucgacagacugaucacaggcagacugcagagccuccagacauacgugacccagcagcugaucagagccgccgagauuagagccucugccaaucuggccgccaucaagaugucugagugugugcugggccagagcaagagaguggacuuuugcggcaagggcuaccaccugaugagcuucccucagucugccccucacggcgugguguuucugcacgugacauaugugcccgcucaagagaagaauuucaccaccgcuccagccaucugccacgacggcaaagcccacuuuccuagagaaggcguguucguguccaacggcacccauugguucgugacacagcggaacuucuacgagccccagaucaucaccaccgacaacaccuucgugucuggcaacugcgacguugugaucggcauugugaacaauaccguguacgacccucugcagcccgagcuggacagcuucaaagaggaacuggacaaguacuuuaagaaccacacaagccccgacguggaccugggcgauaucagcggaaucaaugccagcgucgugaacauccagaaagagaucgaccggcugaacgagguggccaagaaucugaacgagagccugaucgaccugcaagaacuggggaaguacgagcaguacaucaaguggcccugguacaucuggcugggcuuuaucgccggacugauugccaucgugauggucacaaucaugcuguguugcaugaccagcugcuguagcugccugaagggcuguuguagcuguggcagcugcugcaaguucgacgaggacgauucugagcccgugcugaagggcgugaaacugcacuacaccugaggacuaguuauaagacugacuagcccgaugggccucccaacgggcccuccuccccuccuugcaccgagagaucuaaaaaaaaaaaaaaaaaaaaaaaaaaaaaaaaaaaaaaaaaaaaaaaaaaaaaaaaaaaaaaaaaaaaaaaaaaaaaaaaaaaaaaaaaaaaaaaaaaaa

SEQ ID NO: 25918 - RNA, 4011 nt, Artificial Sequence
  SARS-CoV-2/Wuhan/WIV05/2019__EPI_ISL_402128 spike protein mRNA gc mod (1-1273)(S13I_W152C_L452R_D614G)
aggagaaagcuuaccauguucguguuucuggugcugcugccccugguguccauccagugugugaaccugaccaccagaacacagcugccuccagccuacaccaacagcuucaccagaggcguguacuaccccgacaagguguucagauccagcgugcugcacucuacccaggaccuguuccugccuuucuucagcaacgugaccugguuccacgccauccacguguccggcaccaauggcaccaagagauucgacaaccccgugcugcccuucaacgacgggguguacuuugccagcaccgagaaguccaacaucaucagaggcuggaucuucggcaccacacuggacagcaagacccagagccugcugaucgugaacaacgccaccaacguggucaucaaagugugcgaguuccaguucugcaacgaccccuuccugggcgucuacuaccacaagaacaacaagagcugcauggaaagcgaguuccggguguacagcagcgccaacaacugcaccuucgaguacgugucccagccuuuccugauggaccuggaaggcaagcagggcaacuucaagaaccugcgcgaguucguguucaagaacaucgacggcuacuucaaaaucuacagcaagcacaccccuaucaaccucgugcgggaucugccucagggcuucucugcucuggaaccccugguggaucugcccaucggcaucaacaucacccgguuucagacacugcuggcccugcacagaagcuaccugacaccuggcgauagcagcagcggauggacagcuggugccgccgcuuacuaugugggcuaccugcagccuagaaccuuccugcugaaguacaacgagaacggcaccaucaccgacgccguggauugugcucuggauccucugagcgagacaaagugcacccugaaguccuucaccguggaaaagggcaucuaccagaccagcaacuuccgggugcagcccaccgaauccaucgugcgguuccccaauaucaccaaucugugccccuucggcgagguguucaaugccaccagauucgccucuguguacgccuggaaccggaagcggaucagcaauugcguggccgacuacuccgugcuguacaacuccgccagcuucagcaccuucaagugcuacggcguguccccuaccaagcugaacgaccugugcuucacaaacguguacgccgacagcuucgugauccggggagaugaagugcggcagauugccccuggacagacaggcaagaucgccgacuacaacuacaagcugcccgacgacuucaccggcugugugauugccuggaacagcaacaaccuggacuccaaagucggcggcaacuacaauuaccgcuaccggcuguuccggaaguccaaucugaagcccuucgagcgggacaucagcaccgaaaucuaucaggccggcagcaccccuugcaacggcguggaaggcuucaacugcuacuucccacugcaguccuacggcuuucagcccacaaauggcgugggcuaucagcccuacagagugguggugcugagcuucgaacugcugcaugcuccugccacagugugcggcccuaagaaaagcaccaaucucgugaagaacaaaugcgugaacuucaacuucaacggccugaccggcaccggcgugcugacagagagcaacaagaaguuccugccauuccagcaguuuggccgggauaucgccgauaccacagacgccguuagagauccccagacacuggaaauccuggacaucaccccaugcagcuucggcggagugucugugaucaccccuggcaccaacaccagcaaucagguggcagugcuguaccagggcgugaacuguaccgaagugcccguggccauucacgccgaucagcugacaccuacauggcggguguacuccaccggcagcaauguguuucagaccagagccggcugucugaucggagccgagcacgugaacaauagcuacgagugcgacauccccaucggcgcuggcaucugugccagcuaccagacacagacaaacagccccagacgggcuagaagcguggccagccagagcaucauugccuacacaaugucucugggcgccgagaacagcguggccuacuccaacaacucuaucgcuauccccaccaacuucaccaucagcgugaccaccgagauccugccuguguccaugaccaagaccagcguggacugcaccauguacaucugcggcgauuccaccgagugcuccaaccugcugcugcaguacggcagcuucugcacccagcugaauagagcccugacagggaucgccguggaacaggacaagaacacccaagagguguucgcccaagugaagcaaaucuacaagaccccuccuaucaaggacuucggcggcuucaauuucagccagauucugcccgauccuagcaagcccagcaagcggagcuucaucgaggaccugcuguucaacaaagugacacuggccgacgccggcuucaucaagcaguauggcgauugucugggcgacauugccgccagggaucugauuugcgcccagaaguuuaacggacugacagugcugccuccucugcugaccgaugagaugaucgcccaguacacaucugcccugcuggccggcacaaucacaagcggcuggacauuuggagcuggcgccgcucugcagauccccuuugcuaugcagauggccuaccgguucaacggcaucggagugacccagaaugugcuguacgagaaccagaagcugaucgccaaccaguucaacagcgccaucggcaagauccaggacagccugagcagcacagcaagcgcccugggaaagcugcaggacguggucaaccagaaugcccaggcacugaacacccuggucaagcagcuguccuccaacuucggcgccaucagcucugugcugaacgauauccugagcagacuggacaaggucgaggccgaggugcagaucgacagacugaucacaggcagacugcagagccuccagacauacgugacccagcagcugaucagagccgccgagauuagagccucugccaaucuggccgccaccaagaugucugagugugugcugggccagagcaagagaguggacuuuugcggcaagggcuaccaccugaugagcuucccucagucugccccucacggcgugguguuucugcacgugacauaugugcccgcucaagagaagaauuucaccaccgcuccagccaucugccacgacggcaaagcccacuuuccuagagaaggcguguucguguccaacggcacccauugguucgugacacagcggaacuucuacgagccccagaucaucaccaccgacaacaccuucgugucuggcaacugcgacguugugaucggcauugugaacaauaccguguacgacccucugcagcccgagcuggacagcuucaaagaggaacuggacaaguacuuuaagaaccacacaagccccgacguggaccugggcgauaucagcggaaucaaugccagcgucgugaacauccagaaagagaucgaccggcugaacgagguggccaagaaucugaacgagagccugaucgaccugcaagaacuggggaaguacgagcaguacaucaaguggcccugguacaucuggcugggcuuuaucgccggacugauugccaucgugauggucacaaucaugcuguguugcaugaccagcugcuguagcugccugaagggcuguuguagcuguggcagcugcugcaaguucgacgaggacgauucugagcccgugcugaagggcgugaaacugcacuacaccugaggacuaguuauaagacugacuagcccgaugggccucccaacgggcccuccuccccuccuugcaccgagagaucuaaaaaaaaaaaaaaaaaaaaaaaaaaaaaaaaaaaaaaaaaaaaaaaaaaaaaaaaaaaaaaaaaaaaaaaaaaaaaaaaaaaaaaaaaaaaaaaaaaaa

SEQ ID NO: 25919 - RNA, 4011 nt, Artificial Sequence
  SARS-CoV-2/Wuhan/WIV05/2019__EPI_ISL_402128 spike protein mRNA gc mod (1-1273)
aggagaaagcuuaccauguucguguuccuggugcugcugccucugguguccagccagugugugaaccugaccaccagaacacagcugccuccagccuacaccaacagcuuuaccagaggcguguacuaccccgacaagguguucagauccagcgugcugcacucuacccaggaccuguuccugccuuucuucagcaacgugaccugguuccacgccauccacguguccggcaccaauggcaccaagagauucgacaaccccgugcugcccuucaacgacgggguguacuuugccagcaccgagaaguccaacaucaucagaggcuggaucuucggcaccacacuggacagcaagacccagagccugcugaucgugaacaacgccaccaacguggucaucaaagugugcgaguuccaguucugcaacgaccccuuccugggcgucuacuaccacaagaacaacaagagcuggauggaaagcgaguuccggguguacagcagcgccaacaacugcaccuucgaguacgugucccagccuuuccugauggaccuggaaggcaagcagggcaacuucaagaaccugcgcgaguucguguuuaagaacaucgacggcuacuucaagaucuacagcaagcacaccccuaucaaccucgugcgggaucugccucagggcuucucugcucuggaaccccugguggaucugcccaucggcaucaacaucacccgguuucagacacugcuggcccugcacagaagcuaccugacaccuggcgauagcagcagcggauggacagcuggugccgccgcuuacuaugugggcuaccugcagccuagaaccuuccugcugaaguacaacgagaacggcaccaucaccgacgccguggauugugcucuggauccucugagcgagacaaagugcacccugaaguccuucaccguggaaaagggcaucuaccagaccagcaacuuccgggugcagcccaccgaauccaucgugcgguuccccaauaucaccaaucugugccccuucggcgagguguucaaugccaccagauucgccucuguguacgccuggaaccggaagcggaucagcaauugcguggccgacuacuccgugcuguacaacuccgccagcuucagcaccuucaagugcuacggcguguccccuaccaagcugaacgaccugugcuucacaaacguguacgccgacagcuucgugauccggggagaugaagugcggcagauugccccuggacagacaggcaagaucgccgacuacaacuacaagcugcccgacgacuucaccggcugugugauugccuggaacagcaacaaccuggacuccaaagucggcggcaacuacaauuaccuguaccggcuguuccggaaguccaaucugaagcccuucgagcgggacaucuccaccgagaucuaucaggccggcagcaccccuuguaacggcguggaaggcuucaacugcuacuucccacugcaguccuacggcuuucagcccacaaauggcgugggcuaucagcccuacagagugguggugcugagcuucgaacugcugcaugccccugccacagugugcggcccuaagaaaagcaccaaucucgugaagaacaaaugcgugaacuucaacuucaacggccugaccggcaccggcgugcugacagagagcaacaagaaguuccugccauuccagcaguuuggccgggauaucgccgauaccacagacgccguuagagauccccagacacuggaaauccuggacaucaccccuugcagcuucggcggagugucugugaucaccccuggcaccaacaccagcaaucagguggcagugcuguaccaggacgugaacuguaccgaagugcccguggccauucacgccgaucagcugacaccuacauggcggguguacuccaccggcagcaauguguuucagaccagagccggcugucugaucggagccgagcacgugaacaauagcuacgagugcgacauccccaucggcgcuggaaucugcgccagcuaccagacacagacaaacagcccucggagagccagaagcguggccagccagagcaucauugccuacacaaugucucugggcgccgagaacagcguggccuacuccaacaacucuaucgcuauccccaccaacuucaccaucagcgugaccacagagauccugccuguguccaugaccaagaccagcguggacugcaccauguacaucugcggcgauuccaccgagugcuccaaccugcugcugcaguacggcagcuucugcacccagcugaauagagcccugacagggaucgccguggaacaggacaagaacacccaagagguguucgcccaagugaagcagaucuacaagaccccuccuaucaaggacuucggcggcuucaauuucagccagauucugcccgauccuagcaagcccagcaagcggagcuucaucgaggaccugcuguucaacaaagugacacuggccgacgccggcuucaucaagcaguauggcgauugucugggcgacauugccgccagggaucugauuugcgcccagaaguuuaacggacugacagugcugccuccucugcugaccgaugagaugaucgcccaguacacaucugcccugcuggccggcacaaucacaagcggcuggacauuuggagcaggcgccgcucugcagauccccuuugcuaugcagauggccuaccgguucaacggcaucggagugacccagaaugugcuguacgagaaccagaagcugaucgccaaccaguucaacagcgccaucggcaagauccaggacagccugagcagcacagcaagcgcccugggaaagcugcaggacguggucaaccagaaugcccaggcacugaacacccuggucaagcagcuguccuccaacuucggcgccaucagcucugugcugaacgauauccugagcagacuggacaaggucgaggccgaggugcagaucgacagacugaucacaggcagacugcagagccuccagacauacgugacccagcagcugaucagagccgccgagauuagagccucugccaaucuggccgccaccaagaugucugagugugugcugggccagagcaagagaguggacuuuugcggcaagggcuaccaccugaugagcuucccucagucugccccucacggcgugguguuucugcacgugacauaugugcccgcucaagagaagaauuucaccaccgcuccagccaucugccacgacggcaaagcccacuuuccuagagaaggcguguucguguccaacggcacccauugguucgugacacagcggaacuucuacgagccccagaucaucaccaccgacaacaccuucgugucuggcaacugcgacgucgugaucggcauugugaacaauaccguguacgacccucugcagcccgagcuggacagcuucaaagaggaacuggacaaguacuuuaagaaccacacaagccccgacguggaccugggcgauaucagcggaaucaaugccagcgucgugaacauccagaaagagaucgaccggcugaacgagguggccaagaaucugaacgagagccugaucgaccugcaagaacuggggaaguacgagcaguacaucaaguggcccugguacaucuggcugggcuuuaucgccggacugauugccaucgugauggucacaaucaugcuguguugcaugaccagcugcuguagcugccugaagggcuguuguagcuguggcagcugcugcaaguucgacgaggacgauucugagcccgugcugaagggcgugaaacugcacuacacaugaggacuaguuauaagacugacuagcccgaugggccucccaacgggcccuccuccccuccuugcaccgagagaucuaaaaaaaaaaaaaaaaaaaaaaaaaaaaaaaaaaaaaaaaaaaaaaaaaaaaaaaaaaaaaaaaaaaaaaaaaaaaaaaaaaaaaaaaaaaaaaaaaaaa

SEQ ID NO: 25920 - RNA, 4011 nt, Artificial Sequence
  SARS-CoV-2/Wuhan/WIV05/2019__EPI_ISL_402128 spike protein mRNA gc mod (1-1273)(D614G)
aggagaaagcuuaccauguucguguuccuggugcugcugccucugguguccagccagugugugaaccugaccaccagaacacagcugccuccagccuacaccaacagcuuuaccagaggcguguacuaccccgacaagguguucagauccagcgugcugcacucuacccaggaccuguuccugccuuucuucagcaacgugaccugguuccacgccauccacguguccggcaccaauggcaccaagagauucgacaaccccgugcugcccuucaacgacgggguguacuuugccagcaccgagaaguccaacaucaucagaggcuggaucuucggcaccacacuggacagcaagacccagagccugcugaucgugaacaacgccaccaacguggucaucaaagugugcgaguuccaguucugcaacgaccccuuccugggcgucuacuaccacaagaacaacaagagcuggauggaaagcgaguuccggguguacagcagcgccaacaacugcaccuucgaguacgugucccagccuuuccugauggaccuggaaggcaagcagggcaacuucaagaaccugcgcgaguucguguuuaagaacaucgacggcuacuucaagaucuacagcaagcacaccccuaucaaccucgugcgggaucugccucagggcuucucugcucuggaaccccugguggaucugcccaucggcaucaacaucacccgguuucagacacugcuggcccugcacagaagcuaccugacaccuggcgauagcagcagcggauggacagcuggugccgccgcuuacuaugugggcuaccugcagccuagaaccuuccugcugaaguacaacgagaacggcaccaucaccgacgccguggauugugcucuggauccucugagcgagacaaagugcacccugaaguccuucaccguggaaaagggcaucuaccagaccagcaacuuccgggugcagcccaccgaauccaucgugcgguuccccaauaucaccaaucugugccccuucggcgagguguucaaugccaccagauucgccucuguguacgccuggaaccggaagcggaucagcaauugcguggccgacuacuccgugcuguacaacuccgccagcuucagcaccuucaagugcuacggcguguccccuaccaagcugaacgaccugugcuucacaaacguguacgccgacagcuucgugauccggggagaugaagugcggcagauugccccuggacagacaggcaagaucgccgacuacaacuacaagcugcccgacgacuucaccggcugugugauugccuggaacagcaacaaccuggacuccaaagucggcggcaacuacaauuaccuguaccggcuguuccggaaguccaaucugaagcccuucgagcgggacaucuccaccgagaucuaucaggccggcagcaccccuuguaacggcguggaaggcuucaacugcuacuucccacugcaguccuacggcuuucagcccacaaauggcgugggcuaucagcccuacagagugguggugcugagcuucgaacugcugcaugccccugccacagugugcggcccuaagaaaagcaccaaucucgugaagaacaaaugcgugaacuucaacuucaacggccugaccggcaccggcgugcugacagagagcaacaagaaguuccugccauuccagcaguuuggccgggauaucgccgauaccacagacgccguuagagauccccagacacuggaaauccuggacaucaccccuugcagcuucggcggagugucugugaucaccccuggcaccaacaccagcaaucagguggcagugcuguaccagggcgugaacuguaccgaagugcccguggccauucacgccgaucagcugacaccuacauggcggguguacuccaccggcagcaauguguuucagaccagagccggcugucugaucggagccgagcacgugaacaauagcuacgagugcgacauccccaucggcgcuggaaucugcgccagcuaccagacacagacaaacagcccucggagagccagaagcguggccagccagagcaucauugccuacacaaugucucugggcgccgagaacagcguggccuacuccaacaacucuaucgcuauccccaccaacuucaccaucagcgugaccacagagauccugccuguguccaugaccaagaccagcguggacugcaccauguacaucugcggcgauuccaccgagugcuccaaccugcugcugcaguacggcagcuucugcacccagcugaauagagcccugacagggaucgccguggaacaggacaagaacacccaagagguguucgcccaagugaagcagaucuacaagaccccuccuaucaaggacuucggcggcuucaauuucagccagauucugcccgauccuagcaagcccagcaagcggagcuucaucgaggaccugcuguucaacaaagugacacuggccgacgccggcuucaucaagcaguauggcgauugucugggcgacauugccgccagggaucugauuugcgcccagaaguuuaacggacugacagugcugccuccucugcugaccgaugagaugaucgcccaguacacaucugcccugcuggccggcacaaucacaagcggcuggacauuuggagcaggcgccgcucugcagauccccuuugcuaugcagauggccuaccgguucaacggcaucggagugacccagaaugugcuguacgagaaccagaagcugaucgccaaccaguucaacagcgccaucggcaagauccaggacagccugagcagcacagcaagcgcccugggaaagcugcaggacguggucaaccagaaugcccaggcacugaacacccuggucaagcagcuguccuccaacuucggcgccaucagcucugugcugaacgauauccugagcagacuggacaaggucgaggccgaggugcagaucgacagacugaucacaggcagacugcagagccuccagacauacgugacccagcagcugaucagagccgccgagauuagagccucugccaaucuggccgccaccaagaugucugagugugugcugggccagagcaagagaguggacuuuugcggcaagggcuaccaccugaugagcuucccucagucugccccucacggcgugguguuucugcacgugacauaugugcccgcucaagagaagaauuucaccaccgcuccagccaucugccacgacggcaaagcccacuuuccuagagaaggcguguucguguccaacggcacccauugguucgugacacagcggaacuucuacgagccccagaucaucaccaccgacaacaccuucgugucuggcaacugcgacgucgugaucggcauugugaacaauaccguguacgacccucugcagcccgagcuggacagcuucaaagaggaacuggacaaguacuuuaagaaccacacaagccccgacguggaccugggcgauaucagcggaaucaaugccagcgucgugaacauccagaaagagaucgaccggcugaacgagguggccaagaaucugaacgagagccugaucgaccugcaagaacuggggaaguacgagcaguacaucaaguggcccugguacaucuggcugggcuuuaucgccggacugauugccaucgugauggucacaaucaugcuguguugcaugaccagcugcuguagcugccugaagggcuguuguagcuguggcagcugcugcaaguucgacgaggacgauucugagcccgugcugaagggcgugaaacugcacuacacaugaggacuaguuauaagacugacuagcccgaugggccucccaacgggcccuccuccccuccuugcaccgagagaucuaaaaaaaaaaaaaaaaaaaaaaaaaaaaaaaaaaaaaaaaaaaaaaaaaaaaaaaaaaaaaaaaaaaaaaaaaaaaaaaaaaaaaaaaaaaaaaaaaaaa

SEQ ID NO: 25921 - RNA, 4011 nt, Artificial Sequence
  SARS-CoV-2/Wuhan/WIV05/2019__EPI_ISL_402128 spike protein mRNA gc mod (1-1273)(A222V_D614G)
aggagaaagcuuaccauguucguguuccuggugcugcugccucugguguccagccagugugugaaccugaccaccagaacacagcugccuccagccuacaccaacagcuuuaccagaggcguguacuaccccgacaagguguucagauccagcgugcugcacucuacccaggaccuguuccugccuuucuucagcaacgugaccugguuccacgccauccacguguccggcaccaauggcaccaagagauucgacaaccccgugcugcccuucaacgacgggguguacuuugccagcaccgagaaguccaacaucaucagaggcuggaucuucggcaccacacuggacagcaagacccagagccugcugaucgugaacaacgccaccaacguggucaucaaagugugcgaguuccaguucugcaacgaccccuuccugggcgucuacuaccacaagaacaacaagagcuggauggaaagcgaguuccggguguacagcagcgccaacaacugcaccuucgaguacgugucccagccuuuccugauggaccuggaaggcaagcagggcaacuucaagaaccugcgcgaguucguguuuaagaacaucgacggcuacuucaagaucuacagcaagcacaccccuaucaaccucgugcgggaucugccucagggcuucucugugcuggaaccccugguggaucugcccaucggcaucaacaucacccgguuucagacacugcuggcccugcacagaagcuaccugacaccuggcgauagcagcagcggauggacagcuggugccgccgcuuacuaugugggcuaccugcagccuagaaccuuccugcugaaguacaacgagaacggcaccaucaccgacgccguggauugugcucuggauccucugagcgagacaaagugcacccugaaguccuucaccguggaaaagggcaucuaccagaccagcaacuuccgggugcagcccaccgaauccaucgugcgguuccccaauaucaccaaucugugccccuucggcgagguguucaaugccaccagauucgccucuguguacgccuggaaccggaagcggaucagcaauugcguggccgacuacuccgugcuguacaacuccgccagcuucagcaccuucaagugcuacggcguguccccuaccaagcugaacgaccugugcuucacaaacguguacgccgacagcuucgugauccggggagaugaagugcggcagauugccccuggacagacaggcaagaucgccgacuacaacuacaagcugcccgacgacuucaccggcugugugauugccuggaacagcaacaaccuggacuccaaagucggcggcaacuacaauuaccuguaccggcuguuccggaaguccaaucugaagcccuucgagcgggacaucuccaccgagaucuaucaggccggcagcaccccuuguaacggcguggaaggcuucaacugcuacuucccacugcaguccuacggcuuucagcccacaaauggcgugggcuaucagcccuacagagugguggugcugagcuucgaacugcugcaugccccugccacagugugcggcccuaagaaaagcaccaaucucgugaagaacaaaugcgugaacuucaacuucaacggccugaccggcaccggcgugcugacagagagcaacaagaaguuccugccauuccagcaguuuggccgggauaucgccgauaccacagacgccguuagagauccccagacacuggaaauccuggacaucaccccuugcagcuucggcggagugucugugaucaccccuggcaccaacaccagcaaucagguggcagugcuguaccagggcgugaacuguaccgaagugcccguggccauucacgccgaucagcugacaccuacauggcggguguacuccaccggcagcaauguguuucagaccagagccggcugucugaucggagccgagcacgugaacaauagcuacgagugcgacauccccaucggcgcuggaaucugcgccagcuaccagacacagacaaacagcccucggagagccagaagcguggccagccagagcaucauugccuacacaaugucucugggcgccgagaacagcguggccuacuccaacaacucuaucgcuauccccaccaacuucaccaucagcgugaccacagagauccugccuguguccaugaccaagaccagcguggacugcaccauguacaucugcggcgauuccaccgagugcuccaaccugcugcugcaguacggcagcuucugcacccagcugaauagagcccugacagggaucgccguggaacaggacaagaacacccaagagguguucgcccaagugaagcagaucuacaagaccccuccuaucaaggacuucggcggcuucaauuucagccagauucugcccgauccuagcaagcccagcaagcggagcuucaucgaggaccugcuguucaacaaagugacacuggccgacgccggcuucaucaagcaguauggcgauugucugggcgacauugccgccagggaucugauuugcgcccagaaguuuaacggacugacagugcugccuccucugcugaccgaugagaugaucgcccaguacacaucugcccugcuggccggcacaaucacaagcggcuggacauuuggagcaggcgccgcucugcagauccccuuugcuaugcagauggccuaccgguucaacggcaucggagugacccagaaugugcuguacgagaaccagaagcugaucgccaaccaguucaacagcgccaucggcaagauccaggacagccugagcagcacagcaagcgcccugggaaagcugcaggacguggucaaccagaaugcccaggcacugaacacccuggucaagcagcuguccuccaacuucggcgccaucagcucugugcugaacgauauccugagcagacuggacaaggucgaggccgaggugcagaucgacagacugaucacaggcagacugcagagccuccagacauacgugacccagcagcugaucagagccgccgagauuagagccucugccaaucuggccgccaccaagaugucugagugugugcugggccagagcaagagaguggacuuuugcggcaagggcuaccaccugaugagcuucccucagucugccccucacggcgugguguuucugcacgugacauaugugcccgcucaagagaagaauuucaccaccgcuccagccaucugccacgacggcaaagcccacuuuccuagagaaggcguguucguguccaacggcacccauugguucgugacacagcggaacuucuacgagccccagaucaucaccaccgacaacaccuucgugucuggcaacugcgacgucgugaucggcauugugaacaauaccguguacgacccucugcagcccgagcuggacagcuucaaagaggaacuggacaaguacuuuaagaaccacacaagccccgacguggaccugggcgauaucagcggaaucaaugccagcgucgugaacauccagaaagagaucgaccggcugaacgagguggccaagaaucugaacgagagccugaucgaccugcaagaacuggggaaguacgagcaguacaucaaguggcccugguacaucuggcugggcuuuaucgccggacugauugccaucgugauggucacaaucaugcuguguugcaugaccagcugcuguagcugccugaagggcuguuguagcuguggcagcugcugcaaguucgacgaggacgauucugagcccgugcugaagggcgugaaacugcacuacacaugaggacuaguuauaagacugacuagcccgaugggccucccaacgggcccuccuccccuccuugcaccgagagaucuaaaaaaaaaaaaaaaaaaaaaaaaaaaaaaaaaaaaaaaaaaaaaaaaaaaaaaaaaaaaaaaaaaaaaaaaaaaaaaaaaaaaaaaaaaaaaaaaaaaa

SEQ ID NO: 25922 - RNA, 4011 nt, Artificial Sequence
  SARS-CoV-2/Wuhan/WIV05/2019__EPI_ISL_402128 spike protein mRNA gc mod (1-1273)(N439K_D614G)
aggagaaagcuuaccauguucguguuccuggugcugcugccucugguguccagccagugugugaaccugaccaccagaacacagcugccuccagccuacaccaacagcuuuaccagaggcguguacuaccccgacaagguguucagauccagcgugcugcacucuacccaggaccuguuccugccuuucuucagcaacgugaccugguuccacgccauccacguguccggcaccaauggcaccaagagauucgacaaccccgugcugcccuucaacgacgggguguacuuugccagcaccgagaaguccaacaucaucagaggcuggaucuucggcaccacacuggacagcaagacccagagccugcugaucgugaacaacgccaccaacguggucaucaaagugugcgaguuccaguucugcaacgaccccuuccugggcgucuacuaccacaagaacaacaagagcuggauggaaagcgaguuccggguguacagcagcgccaacaacugcaccuucgaguacgugucccagccuuuccugauggaccuggaaggcaagcagggcaacuucaagaaccugcgcgaguucguguuuaagaacaucgacggcuacuucaagaucuacagcaagcacaccccuaucaaccucgugcgggaucugccucagggcuucucugcucuggaaccccugguggaucugcccaucggcaucaacaucacccgguuucagacacugcuggcccugcacagaagcuaccugacaccuggcgauagcagcagcggauggacagcuggugccgccgcuuacuaugugggcuaccugcagccuagaaccuuccugcugaaguacaacgagaacggcaccaucaccgacgccguggauugugcucuggauccucugagcgagacaaagugcacccugaaguccuucaccguggaaaagggcaucuaccagaccagcaacuuccgggugcagcccaccgaauccaucgugcgguuccccaauaucaccaaucugugccccuucggcgagguguucaaugccaccagauucgccucuguguacgccuggaaccggaagcggaucagcaauugcguggccgacuacuccgugcuguacaacuccgccagcuucagcaccuucaagugcuacggcguguccccuaccaagcugaacgaccugugcuucacaaacguguacgccgacagcuucgugauccggggagaugaagugcggcagauugccccuggacagacaggcaagaucgccgacuacaacuacaagcugcccgacgacuucaccggcugugugauugccuggaacagcaagaaccuggacuccaaagucggcggcaacuacaauuaccuguaccggcuguuccggaaguccaaucugaagcccuucgagcgggacaucuccaccgagaucuaucaggccggcagcaccccuuguaacggcguggaaggcuucaacugcuacuucccacugcaguccuacggcuuucagcccacaaauggcgugggcuaucagcccuacagagugguggugcugagcuucgaacugcugcaugccccugccacagugugcggcccuaagaaaagcaccaaucucgugaagaacaaaugcgugaacuucaacuucaacggccugaccggcaccggcgugcugacagagagcaacaagaaguuccugccauuccagcaguuuggccgggauaucgccgauaccacagacgccguuagagauccccagacacuggaaauccuggacaucaccccuugcagcuucggcggagugucugugaucaccccuggcaccaacaccagcaaucagguggcagugcuguaccagggcgugaacuguaccgaagugcccguggccauucacgccgaucagcugacaccuacauggcggguguacuccaccggcagcaauguguuucagaccagagccggcugucugaucggagccgagcacgugaacaauagcuacgagugcgacauccccaucggcgcuggaaucugcgccagcuaccagacacagacaaacagcccucggagagccagaagcguggccagccagagcaucauugccuacacaaugucucugggcgccgagaacagcguggccuacuccaacaacucuaucgcuauccccaccaacuucaccaucagcgugaccacagagauccugccuguguccaugaccaagaccagcguggacugcaccauguacaucugcggcgauuccaccgagugcuccaaccugcugcugcaguacggcagcuucugcacccagcugaauagagcccugacagggaucgccguggaacaggacaagaacacccaagagguguucgcccaagugaagcagaucuacaagaccccuccuaucaaggacuucggcggcuucaauuucagccagauucugcccgauccuagcaagcccagcaagcggagcuucaucgaggaccugcuguucaacaaagugacacuggccgacgccggcuucaucaagcaguauggcgauugucugggcgacauugccgccagggaucugauuugcgcccagaaguuuaacggacugacagugcugccuccucugcugaccgaugagaugaucgcccaguacacaucugcccugcuggccggcacaaucacaagcggcuggacauuuggagcaggcgccgcucugcagauccccuuugcuaugcagauggccuaccgguucaacggcaucggagugacccagaaugugcuguacgagaaccagaagcugaucgccaaccaguucaacagcgccaucggcaagauccaggacagccugagcagcacagcaagcgcccugggaaagcugcaggacguggucaaccagaaugcccaggcacugaacacccuggucaagcagcuguccuccaacuucggcgccaucagcucugugcugaacgauauccugagcagacuggacaaggucgaggccgaggugcagaucgacagacugaucacaggcagacugcagagccuccagacauacgugacccagcagcugaucagagccgccgagauuagagccucugccaaucuggccgccaccaagaugucugagugugugcugggccagagcaagagaguggacuuuugcggcaagggcuaccaccugaugagcuucccucagucugccccucacggcgugguguuucugcacgugacauaugugcccgcucaagagaagaauuucaccaccgcuccagccaucugccacgacggcaaagcccacuuuccuagagaaggcguguucguguccaacggcacccauugguucgugacacagcggaacuucuacgagccccagaucaucaccaccgacaacaccuucgugucuggcaacugcgacgucgugaucggcauugugaacaauaccguguacgacccucugcagcccgagcuggacagcuucaaagaggaacuggacaaguacuuuaagaaccacacaagccccgacguggaccugggcgauaucagcggaaucaaugccagcgucgugaacauccagaaagagaucgaccggcugaacgagguggccaagaaucugaacgagagccugaucgaccugcaagaacuggggaaguacgagcaguacaucaaguggcccugguacaucuggcugggcuuuaucgccggacugauugccaucgugauggucacaaucaugcuguguugcaugaccagcugcuguagcugccugaagggcuguuguagcuguggcagcugcugcaaguucgacgaggacgauucugagcccgugcugaagggcgugaaacugcacuacacaugaggacuaguuauaagacugacuagcccgaugggccucccaacgggcccuccuccccuccuugcaccgagagaucuaaaaaaaaaaaaaaaaaaaaaaaaaaaaaaaaaaaaaaaaaaaaaaaaaaaaaaaaaaaaaaaaaaaaaaaaaaaaaaaaaaaaaaaaaaaaaaaaaaaa

SEQ ID NO: 25923 - RNA, 4011 nt, Artificial Sequence
  SARS-CoV-2/Wuhan/WIV05/2019__EPI_ISL_402128 spike protein mRNA gc mod (1-1273)(S477N_D614G)
aggagaaagcuuaccauguucguguuccuggugcugcugccucugguguccagccagugugugaaccugaccaccagaacacagcugccuccagccuacaccaacagcuuuaccagaggcguguacuaccccgacaagguguucagauccagcgugcugcacucuacccaggaccuguuccugccuuucuucagcaacgugaccugguuccacgccauccacguguccggcaccaauggcaccaagagauucgacaaccccgugcugcccuucaacgacgggguguacuuugccagcaccgagaaguccaacaucaucagaggcuggaucuucggcaccacacuggacagcaagacccagagccugcugaucgugaacaacgccaccaacguggucaucaaagugugcgaguuccaguucugcaacgaccccuuccugggcgucuacuaccacaagaacaacaagagcuggauggaaagcgaguuccggguguacagcagcgccaacaacugcaccuucgaguacgugucccagccuuuccugauggaccuggaaggcaagcagggcaacuucaagaaccugcgcgaguucguguuuaagaacaucgacggcuacuucaagaucuacagcaagcacaccccuaucaaccucgugcgggaucugccucagggcuucucugcucuggaaccccugguggaucugcccaucggcaucaacaucacccgguuucagacacugcuggcccugcacagaagcuaccugacaccuggcgauagcagcagcggauggacagcuggugccgccgcuuacuaugugggcuaccugcagccuagaaccuuccugcugaaguacaacgagaacggcaccaucaccgacgccguggauugugcucuggauccucugagcgagacaaagugcacccugaaguccuucaccguggaaaagggcaucuaccagaccagcaacuuccgggugcagcccaccgaauccaucgugcgguuccccaauaucaccaaucugugccccuucggcgagguguucaaugccaccagauucgccucuguguacgccuggaaccggaagcggaucagcaauugcguggccgacuacuccgugcuguacaacuccgccagcuucagcaccuucaagugcuacggcguguccccuaccaagcugaacgaccugugcuucacaaacguguacgccgacagcuucgugauccggggagaugaagugcggcagauugccccuggacagacaggcaagaucgccgacuacaacuacaagcugcccgacgacuucaccggcugugugauugccuggaacagcaacaaccuggacuccaaagucggcggcaacuacaauuaccuguaccggcuguuccggaaguccaaucugaagcccuucgagcgggacaucuccaccgagaucuaucaggccggcaacaccccuuguaacggcguggaaggcuucaacugcuacuucccacugcaguccuacggcuuucagcccacaaauggcgugggcuaucagcccuacagagugguggugcugagcuucgaacugcugcaugccccugccacagugugcggcccuaagaaaagcaccaaucucgugaagaacaaaugcgugaacuucaacuucaacggccugaccggcaccggcgugcugacagagagcaacaagaaguuccugccauuccagcaguuuggccgggauaucgccgauaccacagacgccguuagagauccccagacacuggaaauccuggacaucaccccuugcagcuucggcggagugucugugaucaccccuggcaccaacaccagcaaucagguggcagugcuguaccagggcgugaacuguaccgaagugcccguggccauucacgccgaucagcugacaccuacauggcggguguacuccaccggcagcaauguguuucagaccagagccggcugucugaucggagccgagcacgugaacaauagcuacgagugcgacauccccaucggcgcuggaaucugcgccagcuaccagacacagacaaacagcccucggagagccagaagcguggccagccagagcaucauugccuacacaaugucucugggcgccgagaacagcguggccuacuccaacaacucuaucgcuauccccaccaacuucaccaucagcgugaccacagagauccugccuguguccaugaccaagaccagcguggacugcaccauguacaucugcggcgauuccaccgagugcuccaaccugcugcugcaguacggcagcuucugcacccagcugaauagagcccugacagggaucgccguggaacaggacaagaacacccaagagguguucgcccaagugaagcagaucuacaagaccccuccuaucaaggacuucggcggcuucaauuucagccagauucugcccgauccuagcaagcccagcaagcggagcuucaucgaggaccugcuguucaacaaagugacacuggccgacgccggcuucaucaagcaguauggcgauugucugggcgacauugccgccagggaucugauuugcgcccagaaguuuaacggacugacagugcugccuccucugcugaccgaugagaugaucgcccaguacacaucugcccugcuggccggcacaaucacaagcggcuggacauuuggagcaggcgccgcucugcagauccccuuugcuaugcagauggccuaccgguucaacggcaucggagugacccagaaugugcuguacgagaaccagaagcugaucgccaaccaguucaacagcgccaucggcaagauccaggacagccugagcagcacagcaagcgcccugggaaagcugcaggacguggucaaccagaaugcccaggcacugaacacccuggucaagcagcuguccuccaacuucggcgccaucagcucugugcugaacgauauccugagcagacuggacaaggucgaggccgaggugcagaucgacagacugaucacaggcagacugcagagccuccagacauacgugacccagcagcugaucagagccgccgagauuagagccucugccaaucuggccgccaccaagaugucugagugugugcugggccagagcaagagaguggacuuuugcggcaagggcuaccaccugaugagcuucccucagucugccccucacggcgugguguuucugcacgugacauaugugcccgcucaagagaagaauuucaccaccgcuccagccaucugccacgacggcaaagcccacuuuccuagagaaggcguguucguguccaacggcacccauugguucgugacacagcggaacuucuacgagccccagaucaucaccaccgacaacaccuucgugucuggcaacugcgacgucgugaucggcauugugaacaauaccguguacgacccucugcagcccgagcuggacagcuucaaagaggaacuggacaaguacuuuaagaaccacacaagccccgacguggaccugggcgauaucagcggaaucaaugccagcgucgugaacauccagaaagagaucgaccggcugaacgagguggccaagaaucugaacgagagccugaucgaccugcaagaacuggggaaguacgagcaguacaucaaguggcccugguacaucuggcugggcuuuaucgccggacugauugccaucgugauggucacaaucaugcuguguugcaugaccagcugcuguagcugccugaagggcuguuguagcuguggcagcugcugcaaguucgacgaggacgauucugagcccgugcugaagggcgugaaacugcacuacacaugaggacuaguuauaagacugacuagcccgaugggccucccaacgggcccuccuccccuccuugcaccgagagaucuaaaaaaaaaaaaaaaaaaaaaaaaaaaaaaaaaaaaaaaaaaaaaaaaaaaaaaaaaaaaaaaaaaaaaaaaaaaaaaaaaaaaaaaaaaaaaaaaaaaa

SEQ ID NO: 25924 - RNA, 4011 nt, Artificial Sequence
  SARS-CoV-2/Wuhan/WIV05/2019__EPI_ISL_402128 spike protein mRNA gc mod (1-1273)(N501Y_D614G)
aggagaaagcuuaccauguucguguuccuggugcugcugccucugguguccagccagugugugaaccugaccaccagaacacagcugccuccagccuacaccaacagcuuuaccagaggcguguacuaccccgacaagguguucagauccagcgugcugcacucuacccaggaccuguuccugccuuucuucagcaacgugaccugguuccacgccauccacguguccggcaccaauggcaccaagagauucgacaaccccgugcugcccuucaacgacgggguguacuuugccagcaccgagaaguccaacaucaucagaggcuggaucuucggcaccacacuggacagcaagacccagagccugcugaucgugaacaacgccaccaacguggucaucaaagugugcgaguuccaguucugcaacgaccccuuccugggcgucuacuaccacaagaacaacaagagcuggauggaaagcgaguuccggguguacagcagcgccaacaacugcaccuucgaguacgugucccagccuuuccugauggaccuggaaggcaagcagggcaacuucaagaaccugcgcgaguucguguuuaagaacaucgacggcuacuucaagaucuacagcaagcacaccccuaucaaccucgugcgggaucugccucagggcuucucugcucuggaaccccugguggaucugcccaucggcaucaacaucacccgguuucagacacugcuggcccugcacagaagcuaccugacaccuggcgauagcagcagcggauggacagcuggugccgccgcuuacuaugugggcuaccugcagccuagaaccuuccugcugaaguacaacgagaacggcaccaucaccgacgccguggauugugcucuggauccucugagcgagacaaagugcacccugaaguccuucaccguggaaaagggcaucuaccagaccagcaacuuccgggugcagcccaccgaauccaucgugcgguuccccaauaucaccaaucugugccccuucggcgagguguucaaugccaccagauucgccucuguguacgccuggaaccggaagcggaucagcaauugcguggccgacuacuccgugcuguacaacuccgccagcuucagcaccuucaagugcuacggcguguccccuaccaagcugaacgaccugugcuucacaaacguguacgccgacagcuucgugauccggggagaugaagugcggcagauugccccuggacagacaggcaagaucgccgacuacaacuacaagcugcccgacgacuucaccggcugugugauugccuggaacagcaacaaccuggacuccaaagucggcggcaacuacaauuaccuguaccggcuguuccggaaguccaaucugaagcccuucgagcgggacaucuccaccgagaucuaucaggccggcagcaccccuuguaacggcguggaaggcuucaacugcuacuucccacugcaguccuacggcuuucagcccacauacggcgugggcuaucagcccuacagagugguggugcugagcuucgaacugcugcaugccccugccacagugugcggcccuaagaaaagcaccaaucucgugaagaacaaaugcgugaacuucaacuucaacggccugaccggcaccggcgugcugacagagagcaacaagaaguuccugccauuccagcaguuuggccgggauaucgccgauaccacagacgccguuagagauccccagacacuggaaauccuggacaucaccccuugcagcuucggcggagugucugugaucaccccuggcaccaacaccagcaaucagguggcagugcuguaccagggcgugaacuguaccgaagugcccguggccauucacgccgaucagcugacaccuacauggcggguguacuccaccggcagcaauguguuucagaccagagccggcugucugaucggagccgagcacgugaacaauagcuacgagugcgacauccccaucggcgcuggaaucugcgccagcuaccagacacagacaaacagcccucggagagccagaagcguggccagccagagcaucauugccuacacaaugucucugggcgccgagaacagcguggccuacuccaacaacucuaucgcuauccccaccaacuucaccaucagcgugaccacagagauccugccuguguccaugaccaagaccagcguggacugcaccauguacaucugcggcgauuccaccgagugcuccaaccugcugcugcaguacggcagcuucugcacccagcugaauagagcccugacagggaucgccguggaacaggacaagaacacccaagagguguucgcccaagugaagcagaucuacaagaccccuccuaucaaggacuucggcggcuucaauuucagccagauucugcccgauccuagcaagcccagcaagcggagcuucaucgaggaccugcuguucaacaaagugacacuggccgacgccggcuucaucaagcaguauggcgauugucugggcgacauugccgccagggaucugauuugcgcccagaaguuuaacggacugacagugcugccuccucugcugaccgaugagaugaucgcccaguacacaucugcccugcuggccggcacaaucacaagcggcuggacauuuggagcaggcgccgcucugcagauccccuuugcuaugcagauggccuaccgguucaacggcaucggagugacccagaaugugcuguacgagaaccagaagcugaucgccaaccaguucaacagcgccaucggcaagauccaggacagccugagcagcacagcaagcgcccugggaaagcugcaggacguggucaaccagaaugcccaggcacugaacacccuggucaagcagcuguccuccaacuucggcgccaucagcucugugcugaacgauauccugagcagacuggacaaggucgaggccgaggugcagaucgacagacugaucacaggcagacugcagagccuccagacauacgugacccagcagcugaucagagccgccgagauuagagccucugccaaucuggccgccaccaagaugucugagugugugcugggccagagcaagagaguggacuuuugcggcaagggcuaccaccugaugagcuucccucagucugccccucacggcgugguguuucugcacgugacauaugugcccgcucaagagaagaauuucaccaccgcuccagccaucugccacgacggcaaagcccacuuuccuagagaaggcguguucguguccaacggcacccauugguucgugacacagcggaacuucuacgagccccagaucaucaccaccgacaacaccuucgugucuggcaacugcgacgucgugaucggcauugugaacaauaccguguacgacccucugcagcccgagcuggacagcuucaaagaggaacuggacaaguacuuuaagaaccacacaagccccgacguggaccugggcgauaucagcggaaucaaugccagcgucgugaacauccagaaagagaucgaccggcugaacgagguggccaagaaucugaacgagagccugaucgaccugcaagaacuggggaaguacgagcaguacaucaaguggcccugguacaucuggcugggcuuuaucgccggacugauugccaucgugauggucacaaucaugcuguguugcaugaccagcugcuguagcugccugaagggcuguuguagcuguggcagcugcugcaaguucgacgaggacgauucugagcccgugcugaagggcgugaaacugcacuacacaugaggacuaguuauaagacugacuagcccgaugggccucccaacgggcccuccuccccuccuugcaccgagagaucuaaaaaaaaaaaaaaaaaaaaaaaaaaaaaaaaaaaaaaaaaaaaaaaaaaaaaaaaaaaaaaaaaaaaaaaaaaaaaaaaaaaaaaaaaaaaaaaaaaaa

SEQ ID NO: 25925 - RNA, 4005 nt, Artificial Sequence
  SARS-CoV-2/Wuhan/WIV05/2019__EPI_ISL_402128 spike protein mRNA gc mod (1-1273)(H69del_V70del_D614G)
aggagaaagcuuaccauguucguguuccuggugcugcugccucugguguccagccagugugugaaccugaccaccagaacacagcugccuccagccuacaccaacagcuuuaccagaggcguguacuaccccgacaagguguucagauccagcgugcugcacucuacccaggaccuguuccugccuuucuucagcaacgugaccugguuccacgccaucuccggcaccaauggcaccaagagauucgacaaccccgugcugcccuucaacgacgggguguacuuugccagcaccgagaaguccaacaucaucagaggcuggaucuucggcaccacacuggacagcaagacccagagccugcugaucgugaacaacgccaccaacguggucaucaaagugugcgaguuccaguucugcaacgaccccuuccugggcgucuacuaccacaagaacaacaagagcuggauggaaagcgaguuccggguguacagcagcgccaacaacugcaccuucgaguacgugucccagccuuuccugauggaccuggaaggcaagcagggcaacuucaagaaccugcgcgaguucguguuuaagaacaucgacggcuacuucaagaucuacagcaagcacaccccuaucaaccucgugcgggaucugccucagggcuucucugcucuggaaccccugguggaucugcccaucggcaucaacaucacccgguuucagacacugcuggcccugcacagaagcuaccugacaccuggcgauagcagcagcggauggacagcuggugccgccgcuuacuaugugggcuaccugcagccuagaaccuuccugcugaaguacaacgagaacggcaccaucaccgacgccguggauugugcucuggauccucugagcgagacaaagugcacccugaaguccuucaccguggaaaagggcaucuaccagaccagcaacuuccgggugcagcccaccgaauccaucgugcgguuccccaauaucaccaaucugugccccuucggcgagguguucaaugccaccagauucgccucuguguacgccuggaaccggaagcggaucagcaauugcguggccgacuacuccgugcuguacaacuccgccagcuucagcaccuucaagugcuacggcguguccccuaccaagcugaacgaccugugcuucacaaacguguacgccgacagcuucgugauccggggagaugaagugcggcagauugccccuggacagacaggcaagaucgccgacuacaacuacaagcugcccgacgacuucaccggcugugugauugccuggaacagcaacaaccuggacuccaaagucggcggcaacuacaauuaccuguaccggcuguuccggaaguccaaucugaagcccuucgagcgggacaucuccaccgagaucuaucaggccggcagcaccccuuguaacggcguggaaggcuucaacugcuacuucccacugcaguccuacggcuuucagcccacaaauggcgugggcuaucagcccuacagagugguggugcugagcuucgaacugcugcaugccccugccacagugugcggcccuaagaaaagcaccaaucucgugaagaacaaaugcgugaacuucaacuucaacggccugaccggcaccggcgugcugacagagagcaacaagaaguuccugccauuccagcaguuuggccgggauaucgccgauaccacagacgccguuagagauccccagacacuggaaauccuggacaucaccccuugcagcuucggcggagugucugugaucaccccuggcaccaacaccagcaaucagguggcagugcuguaccagggcgugaacuguaccgaagugcccguggccauucacgccgaucagcugacaccuacauggcggguguacuccaccggcagcaauguguuucagaccagagccggcugucugaucggagccgagcacgugaacaauagcuacgagugcgacauccccaucggcgcuggaaucugcgccagcuaccagacacagacaaacagcccucggagagccagaagcguggccagccagagcaucauugccuacacaaugucucugggcgccgagaacagcguggccuacuccaacaacucuaucgcuauccccaccaacuucaccaucagcgugaccacagagauccugccuguguccaugaccaagaccagcguggacugcaccauguacaucugcggcgauuccaccgagugcuccaaccugcugcugcaguacggcagcuucugcacccagcugaauagagcccugacagggaucgccguggaacaggacaagaacacccaagagguguucgcccaagugaagcagaucuacaagaccccuccuaucaaggacuucggcggcuucaauuucagccagauucugcccgauccuagcaagcccagcaagcggagcuucaucgaggaccugcuguucaacaaagugacacuggccgacgccggcuucaucaagcaguauggcgauugucugggcgacauugccgccagggaucugauuugcgcccagaaguuuaacggacugacagugcugccuccucugcugaccgaugagaugaucgcccaguacacaucugcccugcuggccggcacaaucacaagcggcuggacauuuggagcaggcgccgcucugcagauccccuuugcuaugcagauggccuaccgguucaacggcaucggagugacccagaaugugcuguacgagaaccagaagcugaucgccaaccaguucaacagcgccaucggcaagauccaggacagccugagcagcacagcaagcgcccugggaaagcugcaggacguggucaaccagaaugcccaggcacugaacacccuggucaagcagcuguccuccaacuucggcgccaucagcucugugcugaacgauauccugagcagacuggacaaggucgaggccgaggugcagaucgacagacugaucacaggcagacugcagagccuccagacauacgugacccagcagcugaucagagccgccgagauuagagccucugccaaucuggccgccaccaagaugucugagugugugcugggccagagcaagagaguggacuuuugcggcaagggcuaccaccugaugagcuucccucagucugccccucacggcgugguguuucugcacgugacauaugugcccgcucaagagaagaauuucaccaccgcuccagccaucugccacgacggcaaagcccacuuuccuagagaaggcguguucguguccaacggcacccauugguucgugacacagcggaacuucuacgagccccagaucaucaccaccgacaacaccuucgugucuggcaacugcgacgucgugaucggcauugugaacaauaccguguacgacccucugcagcccgagcuggacagcuucaaagaggaacuggacaaguacuuuaagaaccacacaagccccgacguggaccugggcgauaucagcggaaucaaugccagcgucgugaacauccagaaagagaucgaccggcugaacgagguggccaagaaucugaacgagagccugaucgaccugcaagaacuggggaaguacgagcaguacaucaaguggcccugguacaucuggcugggcuuuaucgccggacugauugccaucgugauggucacaaucaugcuguguugcaugaccagcugcuguagcugccugaagggcuguuguagcuguggcagcugcugcaaguucgacgaggacgauucugagcccgugcugaagggcgugaaacugcacuacacaugaggacuaguuauaagacugacuagcccgaugggccucccaacgggcccuccuccccuccuugcaccgagagaucuaaaaaaaaaaaaaaaaaaaaaaaaaaaaaaaaaaaaaaaaaaaaaaaaaaaaaaaaaaaaaaaaaaaaaaaaaaaaaaaaaaaaaaaaaaaaaaaaaaaa

SEQ ID NO: 25926 - RNA, 4011 nt, Artificial Sequence
  SARS-CoV-2/Wuhan/WIV05/2019__EPI_ISL_402128 spike protein mRNA gc mod (1-1273)(Y453F_D614G)
aggagaaagcuuaccauguucguguuccuggugcugcugccucugguguccagccagugugugaaccugaccaccagaacacagcugccuccagccuacaccaacagcuuuaccagaggcguguacuaccccgacaagguguucagauccagcgugcugcacucuacccaggaccuguuccugccuuucuucagcaacgugaccugguuccacgccauccacguguccggcaccaauggcaccaagagauucgacaaccccgugcugcccuucaacgacgggguguacuuugccagcaccgagaaguccaacaucaucagaggcuggaucuucggcaccacacuggacagcaagacccagagccugcugaucgugaacaacgccaccaacguggucaucaaagugugcgaguuccaguucugcaacgaccccuuccugggcgucuacuaccacaagaacaacaagagcuggauggaaagcgaguuccggguguacagcagcgccaacaacugcaccuucgaguacgugucccagccuuuccugauggaccuggaaggcaagcagggcaacuucaagaaccugcgcgaguucguguuuaagaacaucgacggcuacuucaagaucuacagcaagcacaccccuaucaaccucgugcgggaucugccucagggcuucucugcucuggaaccccugguggaucugcccaucggcaucaacaucacccgguuucagacacugcuggcccugcacagaagcuaccugacaccuggcgauagcagcagcggauggacagcuggugccgccgcuuacuaugugggcuaccugcagccuagaaccuuccugcugaaguacaacgagaacggcaccaucaccgacgccguggauugugcucuggauccucugagcgagacaaagugcacccugaaguccuucaccguggaaaagggcaucuaccagaccagcaacuuccgggugcagcccaccgaauccaucgugcgguuccccaauaucaccaaucugugccccuucggcgagguguucaaugccaccagauucgccucuguguacgccuggaaccggaagcggaucagcaauugcguggccgacuacuccgugcuguacaacuccgccagcuucagcaccuucaagugcuacggcguguccccuaccaagcugaacgaccugugcuucacaaacguguacgccgacagcuucgugauccggggagaugaagugcggcagauugccccuggacagacaggcaagaucgccgacuacaacuacaagcugcccgacgacuucaccggcugugugauugccuggaacagcaacaaccuggacuccaaagucggcggcaacuacaauuaccuguuccggcuguuccggaaguccaaucugaagcccuucgagcgggacaucuccaccgagaucuaucaggccggcagcaccccuuguaacggcguggaaggcuucaacugcuacuucccacugcaguccuacggcuuucagcccacaaauggcgugggcuaucagcccuacagagugguggugcugagcuucgaacugcugcaugccccugccacagugugcggcccuaagaaaagcaccaaucucgugaagaacaaaugcgugaacuucaacuucaacggccugaccggcaccggcgugcugacagagagcaacaagaaguuccugccauuccagcaguuuggccgggauaucgccgauaccacagacgccguuagagauccccagacacuggaaauccuggacaucaccccuugcagcuucggcggagugucugugaucaccccuggcaccaacaccagcaaucagguggcagugcuguaccagggcgugaacuguaccgaagugcccguggccauucacgccgaucagcugacaccuacauggcggguguacuccaccggcagcaauguguuucagaccagagccggcugucugaucggagccgagcacgugaacaauagcuacgagugcgacauccccaucggcgcuggaaucugcgccagcuaccagacacagacaaacagcccucggagagccagaagcguggccagccagagcaucauugccuacacaaugucucugggcgccgagaacagcguggccuacuccaacaacucuaucgcuauccccaccaacuucaccaucagcgugaccacagagauccugccuguguccaugaccaagaccagcguggacugcaccauguacaucugcggcgauuccaccgagugcuccaaccugcugcugcaguacggcagcuucugcacccagcugaauagagcccugacagggaucgccguggaacaggacaagaacacccaagagguguucgcccaagugaagcagaucuacaagaccccuccuaucaaggacuucggcggcuucaauuucagccagauucugcccgauccuagcaagcccagcaagcggagcuucaucgaggaccugcuguucaacaaagugacacuggccgacgccggcuucaucaagcaguauggcgauugucugggcgacauugccgccagggaucugauuugcgcccagaaguuuaacggacugacagugcugccuccucugcugaccgaugagaugaucgcccaguacacaucugcccugcuggccggcacaaucacaagcggcuggacauuuggagcaggcgccgcucugcagauccccuuugcuaugcagauggccuaccgguucaacggcaucggagugacccagaaugugcuguacgagaaccagaagcugaucgccaaccaguucaacagcgccaucggcaagauccaggacagccugagcagcacagcaagcgcccugggaaagcugcaggacguggucaaccagaaugcccaggcacugaacacccuggucaagcagcuguccuccaacuucggcgccaucagcucugugcugaacgauauccugagcagacuggacaaggucgaggccgaggugcagaucgacagacugaucacaggcagacugcagagccuccagacauacgugacccagcagcugaucagagccgccgagauuagagccucugccaaucuggccgccaccaagaugucugagugugugcugggccagagcaagagaguggacuuuugcggcaagggcuaccaccugaugagcuucccucagucugccccucacggcgugguguuucugcacgugacauaugugcccgcucaagagaagaauuucaccaccgcuccagccaucugccacgacggcaaagcccacuuuccuagagaaggcguguucguguccaacggcacccauugguucgugacacagcggaacuucuacgagccccagaucaucaccaccgacaacaccuucgugucuggcaacugcgacgucgugaucggcauugugaacaauaccguguacgacccucugcagcccgagcuggacagcuucaaagaggaacuggacaaguacuuuaagaaccacacaagccccgacguggaccugggcgauaucagcggaaucaaugccagcgucgugaacauccagaaagagaucgaccggcugaacgagguggccaagaaucugaacgagagccugaucgaccugcaagaacuggggaaguacgagcaguacaucaaguggcccugguacaucuggcugggcuuuaucgccggacugauugccaucgugauggucacaaucaugcuguguugcaugaccagcugcuguagcugccugaagggcuguuguagcuguggcagcugcugcaaguucgacgaggacgauucugagcccgugcugaagggcgugaaacugcacuacacaugaggacuaguuauaagacugacuagcccgaugggccucccaacgggcccuccuccccuccuugcaccgagagaucuaaaaaaaaaaaaaaaaaaaaaaaaaaaaaaaaaaaaaaaaaaaaaaaaaaaaaaaaaaaaaaaaaaaaaaaaaaaaaaaaaaaaaaaaaaaaaaaaaaaa

SEQ ID NO: 25927 - RNA, 4011 nt, Artificial Sequence
  SARS-CoV-2/Wuhan/WIV05/2019__EPI_ISL_402128 spike protein mRNA gc mod (1-1273)(D614G_I692V)
aggagaaagcuuaccauguucguguuccuggugcugcugccucugguguccagccagugugugaaccugaccaccagaacacagcugccuccagccuacaccaacagcuuuaccagaggcguguacuaccccgacaagguguucagauccagcgugcugcacucuacccaggaccuguuccugccuuucuucagcaacgugaccugguuccacgccauccacguguccggcaccaauggcaccaagagauucgacaaccccgugcugcccuucaacgacgggguguacuuugccagcaccgagaaguccaacaucaucagaggcuggaucuucggcaccacacuggacagcaagacccagagccugcugaucgugaacaacgccaccaacguggucaucaaagugugcgaguuccaguucugcaacgaccccuuccugggcgucuacuaccacaagaacaacaagagcuggauggaaagcgaguuccggguguacagcagcgccaacaacugcaccuucgaguacgugucccagccuuuccugauggaccuggaaggcaagcagggcaacuucaagaaccugcgcgaguucguguuuaagaacaucgacggcuacuucaagaucuacagcaagcacaccccuaucaaccucgugcgggaucugccucagggcuucucugcucuggaaccccugguggaucugcccaucggcaucaacaucacccgguuucagacacugcuggcccugcacagaagcuaccugacaccuggcgauagcagcagcggauggacagcuggugccgccgcuuacuaugugggcuaccugcagccuagaaccuuccugcugaaguacaacgagaacggcaccaucaccgacgccguggauugugcucuggauccucugagcgagacaaagugcacccugaaguccuucaccguggaaaagggcaucuaccagaccagcaacuuccgggugcagcccaccgaauccaucgugcgguuccccaauaucaccaaucugugccccuucggcgagguguucaaugccaccagauucgccucuguguacgccuggaaccggaagcggaucagcaauugcguggccgacuacuccgugcuguacaacuccgccagcuucagcaccuucaagugcuacggcguguccccuaccaagcugaacgaccugugcuucacaaacguguacgccgacagcuucgugauccggggagaugaagugcggcagauugccccuggacagacaggcaagaucgccgacuacaacuacaagcugcccgacgacuucaccggcugugugauugccuggaacagcaacaaccuggacuccaaagucggcggcaacuacaauuaccuguaccggcuguuccggaaguccaaucugaagcccuucgagcgggacaucuccaccgagaucuaucaggccggcagcaccccuuguaacggcguggaaggcuucaacugcuacuucccacugcaguccuacggcuuucagcccacaaauggcgugggcuaucagcccuacagagugguggugcugagcuucgaacugcugcaugccccugccacagugugcggcccuaagaaaagcaccaaucucgugaagaacaaaugcgugaacuucaacuucaacggccugaccggcaccggcgugcugacagagagcaacaagaaguuccugccauuccagcaguuuggccgggauaucgccgauaccacagacgccguuagagauccccagacacuggaaauccuggacaucaccccuugcagcuucggcggagugucugugaucaccccuggcaccaacaccagcaaucagguggcagugcuguaccagggcgugaacuguaccgaagugcccguggccauucacgccgaucagcugacaccuacauggcggguguacuccaccggcagcaauguguuucagaccagagccggcugucugaucggagccgagcacgugaacaauagcuacgagugcgacauccccaucggcgcuggaaucugcgccagcuaccagacacagacaaacagcccucggagagccagaagcguggccagccagagcgugauugccuacacaaugucucugggcgccgagaacagcguggccuacuccaacaacucuaucgcuauccccaccaacuucaccaucagcgugaccacagagauccugccuguguccaugaccaagaccagcguggacugcaccauguacaucugcggcgauuccaccgagugcuccaaccugcugcugcaguacggcagcuucugcacccagcugaauagagcccugacagggaucgccguggaacaggacaagaacacccaagagguguucgcccaagugaagcagaucuacaagaccccuccuaucaaggacuucggcggcuucaauuucagccagauucugcccgauccuagcaagcccagcaagcggagcuucaucgaggaccugcuguucaacaaagugacacuggccgacgccggcuucaucaagcaguauggcgauugucugggcgacauugccgccagggaucugauuugcgcccagaaguuuaacggacugacagugcugccuccucugcugaccgaugagaugaucgcccaguacacaucugcccugcuggccggcacaaucacaagcggcuggacauuuggagcaggcgccgcucugcagauccccuuugcuaugcagauggccuaccgguucaacggcaucggagugacccagaaugugcuguacgagaaccagaagcugaucgccaaccaguucaacagcgccaucggcaagauccaggacagccugagcagcacagcaagcgcccugggaaagcugcaggacguggucaaccagaaugcccaggcacugaacacccuggucaagcagcuguccuccaacuucggcgccaucagcucugugcugaacgauauccugagcagacuggacaaggucgaggccgaggugcagaucgacagacugaucacaggcagacugcagagccuccagacauacgugacccagcagcugaucagagccgccgagauuagagccucugccaaucuggccgccaccaagaugucugagugugugcugggccagagcaagagaguggacuuuugcggcaagggcuaccaccugaugagcuucccucagucugccccucacggcgugguguuucugcacgugacauaugugcccgcucaagagaagaauuucaccaccgcuccagccaucugccacgacggcaaagcccacuuuccuagagaaggcguguucguguccaacggcacccauugguucgugacacagcggaacuucuacgagccccagaucaucaccaccgacaacaccuucgugucuggcaacugcgacgucgugaucggcauugugaacaauaccguguacgacccucugcagcccgagcuggacagcuucaaagaggaacuggacaaguacuuuaagaaccacacaagccccgacguggaccugggcgauaucagcggaaucaaugccagcgucgugaacauccagaaagagaucgaccggcugaacgagguggccaagaaucugaacgagagccugaucgaccugcaagaacuggggaaguacgagcaguacaucaaguggcccugguacaucuggcugggcuuuaucgccggacugauugccaucgugauggucacaaucaugcuguguugcaugaccagcugcuguagcugccugaagggcuguuguagcuguggcagcugcugcaaguucgacgaggacgauucugagcccgugcugaagggcgugaaacugcacuacacaugaggacuaguuauaagacugacuagcccgaugggccucccaacgggcccuccuccccuccuugcaccgagagaucuaaaaaaaaaaaaaaaaaaaaaaaaaaaaaaaaaaaaaaaaaaaaaaaaaaaaaaaaaaaaaaaaaaaaaaaaaaaaaaaaaaaaaaaaaaaaaaaaaaaa

SEQ ID NO: 25928 - RNA, 4011 nt, Artificial Sequence
  SARS-CoV-2/Wuhan/WIV05/2019__EPI_ISL_402128 spike protein mRNA gc mod (1-1273)(D614G_M1229I)
aggagaaagcuuaccauguucguguuccuggugcugcugccucugguguccagccagugugugaaccugaccaccagaacacagcugccuccagccuacaccaacagcuuuaccagaggcguguacuaccccgacaagguguucagauccagcgugcugcacucuacccaggaccuguuccugccuuucuucagcaacgugaccugguuccacgccauccacguguccggcaccaauggcaccaagagauucgacaaccccgugcugcccuucaacgacgggguguacuuugccagcaccgagaaguccaacaucaucagaggcuggaucuucggcaccacacuggacagcaagacccagagccugcugaucgugaacaacgccaccaacguggucaucaaagugugcgaguuccaguucugcaacgaccccuuccugggcgucuacuaccacaagaacaacaagagcuggauggaaagcgaguuccggguguacagcagcgccaacaacugcaccuucgaguacgugucccagccuuuccugauggaccuggaaggcaagcagggcaacuucaagaaccugcgcgaguucguguuuaagaacaucgacggcuacuucaagaucuacagcaagcacaccccuaucaaccucgugcgggaucugccucagggcuucucugcucuggaaccccugguggaucugcccaucggcaucaacaucacccgguuucagacacugcuggcccugcacagaagcuaccugacaccuggcgauagcagcagcggauggacagcuggugccgccgcuuacuaugugggcuaccugcagccuagaaccuuccugcugaaguacaacgagaacggcaccaucaccgacgccguggauugugcucuggauccucugagcgagacaaagugcacccugaaguccuucaccguggaaaagggcaucuaccagaccagcaacuuccgggugcagcccaccgaauccaucgugcgguuccccaauaucaccaaucugugccccuucggcgagguguucaaugccaccagauucgccucuguguacgccuggaaccggaagcggaucagcaauugcguggccgacuacuccgugcuguacaacuccgccagcuucagcaccuucaagugcuacggcguguccccuaccaagcugaacgaccugugcuucacaaacguguacgccgacagcuucgugauccggggagaugaagugcggcagauugccccuggacagacaggcaagaucgccgacuacaacuacaagcugcccgacgacuucaccggcugugugauugccuggaacagcaacaaccuggacuccaaagucggcggcaacuacaauuaccuguaccggcuguuccggaaguccaaucugaagcccuucgagcgggacaucuccaccgagaucuaucaggccggcagcaccccuuguaacggcguggaaggcuucaacugcuacuucccacugcaguccuacggcuuucagcccacaaauggcgugggcuaucagcccuacagagugguggugcugagcuucgaacugcugcaugccccugccacagugugcggcccuaagaaaagcaccaaucucgugaagaacaaaugcgugaacuucaacuucaacggccugaccggcaccggcgugcugacagagagcaacaagaaguuccugccauuccagcaguuuggccgggauaucgccgauaccacagacgccguuagagauccccagacacuggaaauccuggacaucaccccuugcagcuucggcggagugucugugaucaccccuggcaccaacaccagcaaucagguggcagugcuguaccagggcgugaacuguaccgaagugcccguggccauucacgccgaucagcugacaccuacauggcggguguacuccaccggcagcaauguguuucagaccagagccggcugucugaucggagccgagcacgugaacaauagcuacgagugcgacauccccaucggcgcuggaaucugcgccagcuaccagacacagacaaacagcccucggagagccagaagcguggccagccagagcaucauugccuacacaaugucucugggcgccgagaacagcguggccuacuccaacaacucuaucgcuauccccaccaacuucaccaucagcgugaccacagagauccugccuguguccaugaccaagaccagcguggacugcaccauguacaucugcggcgauuccaccgagugcuccaaccugcugcugcaguacggcagcuucugcacccagcugaauagagcccugacagggaucgccguggaacaggacaagaacacccaagagguguucgcccaagugaagcagaucuacaagaccccuccuaucaaggacuucggcggcuucaauuucagccagauucugcccgauccuagcaagcccagcaagcggagcuucaucgaggaccugcuguucaacaaagugacacuggccgacgccggcuucaucaagcaguauggcgauugucugggcgacauugccgccagggaucugauuugcgcccagaaguuuaacggacugacagugcugccuccucugcugaccgaugagaugaucgcccaguacacaucugcccugcuggccggcacaaucacaagcggcuggacauuuggagcaggcgccgcucugcagauccccuuugcuaugcagauggccuaccgguucaacggcaucggagugacccagaaugugcuguacgagaaccagaagcugaucgccaaccaguucaacagcgccaucggcaagauccaggacagccugagcagcacagcaagcgcccugggaaagcugcaggacguggucaaccagaaugcccaggcacugaacacccuggucaagcagcuguccuccaacuucggcgccaucagcucugugcugaacgauauccugagcagacuggacaaggucgaggccgaggugcagaucgacagacugaucacaggcagacugcagagccuccagacauacgugacccagcagcugaucagagccgccgagauuagagccucugccaaucuggccgccaccaagaugucugagugugugcugggccagagcaagagaguggacuuuugcggcaagggcuaccaccugaugagcuucccucagucugccccucacggcgugguguuucugcacgugacauaugugcccgcucaagagaagaauuucaccaccgcuccagccaucugccacgacggcaaagcccacuuuccuagagaaggcguguucguguccaacggcacccauugguucgugacacagcggaacuucuacgagccccagaucaucaccaccgacaacaccuucgugucuggcaacugcgacgucgugaucggcauugugaacaauaccguguacgacccucugcagcccgagcuggacagcuucaaagaggaacuggacaaguacuuuaagaaccacacaagccccgacguggaccugggcgauaucagcggaaucaaugccagcgucgugaacauccagaaagagaucgaccggcugaacgagguggccaagaaucugaacgagagccugaucgaccugcaagaacuggggaaguacgagcaguacaucaaguggcccugguacaucuggcugggcuuuaucgccggacugauugccaucgugaucgucacaaucaugcuguguugcaugaccagcugcuguagcugccugaagggcuguuguagcuguggcagcugcugcaaguucgacgaggacgauucugagcccgugcugaagggcgugaaacugcacuacacaugaggacuaguuauaagacugacuagcccgaugggccucccaacgggcccuccuccccuccuugcaccgagagaucuaaaaaaaaaaaaaaaaaaaaaaaaaaaaaaaaaaaaaaaaaaaaaaaaaaaaaaaaaaaaaaaaaaaaaaaaaaaaaaaaaaaaaaaaaaaaaaaaaaaa

SEQ ID NO: 25929 - RNA, 4005 nt, Artificial Sequence
  SARS-CoV-2/Wuhan/WIV05/2019__EPI_ISL_402128 spike protein mRNA gc mod (1-1273)(H69del_V70del_A222V_Y453F_S477N_D614G_I692V)
aggagaaagcuuaccauguucguguuccuggugcugcugccucugguguccagccagugugugaaccugaccaccagaacacagcugccuccagccuacaccaacagcuuuaccagaggcguguacuaccccgacaagguguucagauccagcgugcugcacucuacccaggaccuguuccugccuuucuucagcaacgugaccugguuccacgccaucuccggcaccaauggcaccaagagauucgacaaccccgugcugcccuucaacgacgggguguacuuugccagcaccgagaaguccaacaucaucagaggcuggaucuucggcaccacacuggacagcaagacccagagccugcugaucgugaacaacgccaccaacguggucaucaaagugugcgaguuccaguucugcaacgaccccuuccugggcgucuacuaccacaagaacaacaagagcuggauggaaagcgaguuccggguguacagcagcgccaacaacugcaccuucgaguacgugucccagccuuuccugauggaccuggaaggcaagcagggcaacuucaagaaccugcgcgaguucguguuuaagaacaucgacggcuacuucaagaucuacagcaagcacaccccuaucaaccucgugcgggaucugccucagggcuucucugugcuggaaccccugguggaucugcccaucggcaucaacaucacccgguuucagacacugcuggcccugcacagaagcuaccugacaccuggcgauagcagcagcggauggacagcuggugccgccgcuuacuaugugggcuaccugcagccuagaaccuuccugcugaaguacaacgagaacggcaccaucaccgacgccguggauugugcucuggauccucugagcgagacaaagugcacccugaaguccuucaccguggaaaagggcaucuaccagaccagcaacuuccgggugcagcccaccgaauccaucgugcgguuccccaauaucaccaaucugugccccuucggcgagguguucaaugccaccagauucgccucuguguacgccuggaaccggaagcggaucagcaauugcguggccgacuacuccgugcuguacaacuccgccagcuucagcaccuucaagugcuacggcguguccccuaccaagcugaacgaccugugcuucacaaacguguacgccgacagcuucgugauccggggagaugaagugcggcagauugccccuggacagacaggcaagaucgccgacuacaacuacaagcugcccgacgacuucaccggcugugugauugccuggaacagcaacaaccuggacuccaaagucggcggcaacuacaauuaccuguuccggcuguuccggaaguccaaucugaagcccuucgagcgggacaucuccaccgagaucuaucaggccggcaacaccccuuguaacggcguggaaggcuucaacugcuacuucccacugcaguccuacggcuuucagcccacaaauggcgugggcuaucagcccuacagagugguggugcugagcuucgaacugcugcaugccccugccacagugugcggcccuaagaaaagcaccaaucucgugaagaacaaaugcgugaacuucaacuucaacggccugaccggcaccggcgugcugacagagagcaacaagaaguuccugccauuccagcaguuuggccgggauaucgccgauaccacagacgccguuagagauccccagacacuggaaauccuggacaucaccccuugcagcuucggcggagugucugugaucaccccuggcaccaacaccagcaaucagguggcagugcuguaccagggcgugaacuguaccgaagugcccguggccauucacgccgaucagcugacaccuacauggcggguguacuccaccggcagcaauguguuucagaccagagccggcugucugaucggagccgagcacgugaacaauagcuacgagugcgacauccccaucggcgcuggaaucugcgccagcuaccagacacagacaaacagcccucggagagccagaagcguggccagccagagcgugauugccuacacaaugucucugggcgccgagaacagcguggccuacuccaacaacucuaucgcuauccccaccaacuucaccaucagcgugaccacagagauccugccuguguccaugaccaagaccagcguggacugcaccauguacaucugcggcgauuccaccgagugcuccaaccugcugcugcaguacggcagcuucugcacccagcugaauagagcccugacagggaucgccguggaacaggacaagaacacccaagagguguucgcccaagugaagcagaucuacaagaccccuccuaucaaggacuucggcggcuucaauuucagccagauucugcccgauccuagcaagcccagcaagcggagcuucaucgaggaccugcuguucaacaaagugacacuggccgacgccggcuucaucaagcaguauggcgauugucugggcgacauugccgccagggaucugauuugcgcccagaaguuuaacggacugacagugcugccuccucugcugaccgaugagaugaucgcccaguacacaucugcccugcuggccggcacaaucacaagcggcuggacauuuggagcaggcgccgcucugcagauccccuuugcuaugcagauggccuaccgguucaacggcaucggagugacccagaaugugcuguacgagaaccagaagcugaucgccaaccaguucaacagcgccaucggcaagauccaggacagccugagcagcacagcaagcgcccugggaaagcugcaggacguggucaaccagaaugcccaggcacugaacacccuggucaagcagcuguccuccaacuucggcgccaucagcucugugcugaacgauauccugagcagacuggacaaggucgaggccgaggugcagaucgacagacugaucacaggcagacugcagagccuccagacauacgugacccagcagcugaucagagccgccgagauuagagccucugccaaucuggccgccaccaagaugucugagugugugcugggccagagcaagagaguggacuuuugcggcaagggcuaccaccugaugagcuucccucagucugccccucacggcgugguguuucugcacgugacauaugugcccgcucaagagaagaauuucaccaccgcuccagccaucugccacgacggcaaagcccacuuuccuagagaaggcguguucguguccaacggcacccauugguucgugacacagcggaacuucuacgagccccagaucaucaccaccgacaacaccuucgugucuggcaacugcgacgucgugaucggcauugugaacaauaccguguacgacccucugcagcccgagcuggacagcuucaaagaggaacuggacaaguacuuuaagaaccacacaagccccgacguggaccugggcgauaucagcggaaucaaugccagcgucgugaacauccagaaagagaucgaccggcugaacgagguggccaagaaucugaacgagagccugaucgaccugcaagaacuggggaaguacgagcaguacaucaaguggcccugguacaucuggcugggcuuuaucgccggacugauugccaucgugauggucacaaucaugcuguguugcaugaccagcugcuguagcugccugaagggcuguuguagcuguggcagcugcugcaaguucgacgaggacgauucugagcccgugcugaagggcgugaaacugcacuacacaugaggacuaguuauaagacugacuagcccgaugggccucccaacgggcccuccuccccuccuugcaccgagagaucuaaaaaaaaaaaaaaaaaaaaaaaaaaaaaaaaaaaaaaaaaaaaaaaaaaaaaaaaaaaaaaaaaaaaaaaaaaaaaaaaaaaaaaaaaaaaaaaaaaaa

SEQ ID NO: 25930 - RNA, 4005 nt, Artificial Sequence
  SARS-CoV-2/Wuhan/WIV05/2019__EPI_ISL_402128 spike protein mRNA gc mod (1-1273)(H69del_V70del_Y453F_D614G_I692V_M1229I)
aggagaaagcuuaccauguucguguuccuggugcugcugccucugguguccagccagugugugaaccugaccaccagaacacagcugccuccagccuacaccaacagcuuuaccagaggcguguacuaccccgacaagguguucagauccagcgugcugcacucuacccaggaccuguuccugccuuucuucagcaacgugaccugguuccacgccaucuccggcaccaauggcaccaagagauucgacaaccccgugcugcccuucaacgacgggguguacuuugccagcaccgagaaguccaacaucaucagaggcuggaucuucggcaccacacuggacagcaagacccagagccugcugaucgugaacaacgccaccaacguggucaucaaagugugcgaguuccaguucugcaacgaccccuuccugggcgucuacuaccacaagaacaacaagagcuggauggaaagcgaguuccggguguacagcagcgccaacaacugcaccuucgaguacgugucccagccuuuccugauggaccuggaaggcaagcagggcaacuucaagaaccugcgcgaguucguguuuaagaacaucgacggcuacuucaagaucuacagcaagcacaccccuaucaaccucgugcgggaucugccucagggcuucucugcucuggaaccccugguggaucugcccaucggcaucaacaucacccgguuucagacacugcuggcccugcacagaagcuaccugacaccuggcgauagcagcagcggauggacagcuggugccgccgcuuacuaugugggcuaccugcagccuagaaccuuccugcugaaguacaacgagaacggcaccaucaccgacgccguggauugugcucuggauccucugagcgagacaaagugcacccugaaguccuucaccguggaaaagggcaucuaccagaccagcaacuuccgggugcagcccaccgaauccaucgugcgguuccccaauaucaccaaucugugccccuucggcgagguguucaaugccaccagauucgccucuguguacgccuggaaccggaagcggaucagcaauugcguggccgacuacuccgugcuguacaacuccgccagcuucagcaccuucaagugcuacggcguguccccuaccaagcugaacgaccugugcuucacaaacguguacgccgacagcuucgugauccggggagaugaagugcggcagauugccccuggacagacaggcaagaucgccgacuacaacuacaagcugcccgacgacuucaccggcugugugauugccuggaacagcaacaaccuggacuccaaagucggcggcaacuacaauuaccuguuccggcuguuccggaaguccaaucugaagcccuucgagcgggacaucuccaccgagaucuaucaggccggcagcaccccuuguaacggcguggaaggcuucaacugcuacuucccacugcaguccuacggcuuucagcccacaaauggcgugggcuaucagcccuacagagugguggugcugagcuucgaacugcugcaugccccugccacagugugcggcccuaagaaaagcaccaaucucgugaagaacaaaugcgugaacuucaacuucaacggccugaccggcaccggcgugcugacagagagcaacaagaaguuccugccauuccagcaguuuggccgggauaucgccgauaccacagacgccguuagagauccccagacacuggaaauccuggacaucaccccuugcagcuucggcggagugucugugaucaccccuggcaccaacaccagcaaucagguggcagugcuguaccagggcgugaacuguaccgaagugcccguggccauucacgccgaucagcugacaccuacauggcggguguacuccaccggcagcaauguguuucagaccagagccggcugucugaucggagccgagcacgugaacaauagcuacgagugcgacauccccaucggcgcuggaaucugcgccagcuaccagacacagacaaacagcccucggagagccagaagcguggccagccagagcgugauugccuacacaaugucucugggcgccgagaacagcguggccuacuccaacaacucuaucgcuauccccaccaacuucaccaucagcgugaccacagagauccugccuguguccaugaccaagaccagcguggacugcaccauguacaucugcggcgauuccaccgagugcuccaaccugcugcugcaguacggcagcuucugcacccagcugaauagagcccugacagggaucgccguggaacaggacaagaacacccaagagguguucgcccaagugaagcagaucuacaagaccccuccuaucaaggacuucggcggcuucaauuucagccagauucugcccgauccuagcaagcccagcaagcggagcuucaucgaggaccugcuguucaacaaagugacacuggccgacgccggcuucaucaagcaguauggcgauugucugggcgacauugccgccagggaucugauuugcgcccagaaguuuaacggacugacagugcugccuccucugcugaccgaugagaugaucgcccaguacacaucugcccugcuggccggcacaaucacaagcggcuggacauuuggagcaggcgccgcucugcagauccccuuugcuaugcagauggccuaccgguucaacggcaucggagugacccagaaugugcuguacgagaaccagaagcugaucgccaaccaguucaacagcgccaucggcaagauccaggacagccugagcagcacagcaagcgcccugggaaagcugcaggacguggucaaccagaaugcccaggcacugaacacccuggucaagcagcuguccuccaacuucggcgccaucagcucugugcugaacgauauccugagcagacuggacaaggucgaggccgaggugcagaucgacagacugaucacaggcagacugcagagccuccagacauacgugacccagcagcugaucagagccgccgagauuagagccucugccaaucuggccgccaccaagaugucugagugugugcugggccagagcaagagaguggacuuuugcggcaagggcuaccaccugaugagcuucccucagucugccccucacggcgugguguuucugcacgugacauaugugcccgcucaagagaagaauuucaccaccgcuccagccaucugccacgacggcaaagcccacuuuccuagagaaggcguguucguguccaacggcacccauugguucgugacacagcggaacuucuacgagccccagaucaucaccaccgacaacaccuucgugucuggcaacugcgacgucgugaucggcauugugaacaauaccguguacgacccucugcagcccgagcuggacagcuucaaagaggaacuggacaaguacuuuaagaaccacacaagccccgacguggaccugggcgauaucagcggaaucaaugccagcgucgugaacauccagaaagagaucgaccggcugaacgagguggccaagaaucugaacgagagccugaucgaccugcaagaacuggggaaguacgagcaguacaucaaguggcccugguacaucuggcugggcuuuaucgccggacugauugccaucgugaucgucacaaucaugcuguguugcaugaccagcugcuguagcugccugaagggcuguuguagcuguggcagcugcugcaaguucgacgaggacgauucugagcccgugcugaagggcgugaaacugcacuacacaugaggacuaguuauaagacugacuagcccgaugggccucccaacgggcccuccuccccuccuugcaccgagagaucuaaaaaaaaaaaaaaaaaaaaaaaaaaaaaaaaaaaaaaaaaaaaaaaaaaaaaaaaaaaaaaaaaaaaaaaaaaaaaaaaaaaaaaaaaaaaaaaaaaaa

SEQ ID NO: 25931 - RNA, 4002 nt, Artificial Sequence
  SARS-CoV-2/Wuhan/WIV05/2019__EPI_ISL_402128 spike protein mRNA gc mod (1-1273)(H69del_V70del_Y144del_N501Y_A570D_D614G_P681H_T716I_S982 A_D1118H)
aggagaaagcuuaccauguucguguuccuggugcugcugccucugguguccagccagugugugaaccugaccaccagaacacagcugccuccagccuacaccaacagcuuuaccagaggcguguacuaccccgacaagguguucagauccagcgugcugcacucuacccaggaccuguuccugccuuucuucagcaacgugaccugguuccacgccaucuccggcaccaauggcaccaagagauucgacaaccccgugcugcccuucaacgacgggguguacuuugccagcaccgagaaguccaacaucaucagaggcuggaucuucggcaccacacuggacagcaagacccagagccugcugaucgugaacaacgccaccaacguggucaucaaagugugcgaguuccaguucugcaacgaccccuuccugggcgucuaccacaagaacaacaagagcuggauggaaagcgaguuccggguguacagcagcgccaacaacugcaccuucgaguacgugucccagccuuuccugauggaccuggaaggcaagcagggcaacuucaagaaccugcgcgaguucguguuuaagaacaucgacggcuacuucaagaucuacagcaagcacaccccuaucaaccucgugcgggaucugccucagggcuucucugcucuggaaccccugguggaucugcccaucggcaucaacaucacccgguuucagacacugcuggcccugcacagaagcuaccugacaccuggcgauagcagcagcggauggacagcuggugccgccgcuuacuaugugggcuaccugcagccuagaaccuuccugcugaaguacaacgagaacggcaccaucaccgacgccguggauugugcucuggauccucugagcgagacaaagugcacccugaaguccuucaccguggaaaagggcaucuaccagaccagcaacuuccgggugcagcccaccgaauccaucgugcgguuccccaauaucaccaaucugugccccuucggcgagguguucaaugccaccagauucgccucuguguacgccuggaaccggaagcggaucagcaauugcguggccgacuacuccgugcuguacaacuccgccagcuucagcaccuucaagugcuacggcguguccccuaccaagcugaacgaccugugcuucacaaacguguacgccgacagcuucgugauccggggagaugaagugcggcagauugccccuggacagacaggcaagaucgccgacuacaacuacaagcugcccgacgacuucaccggcugugugauugccuggaacagcaacaaccuggacuccaaagucggcggcaacuacaauuaccuguaccggcuguuccggaaguccaaucugaagcccuucgagcgggacaucuccaccgagaucuaucaggccggcagcaccccuuguaacggcguggaaggcuucaacugcuacuucccacugcaguccuacggcuuucagcccacauacggcgugggcuaucagcccuacagagugguggugcugagcuucgaacugcugcaugccccugccacagugugcggcccuaagaaaagcaccaaucucgugaagaacaaaugcgugaacuucaacuucaacggccugaccggcaccggcgugcugacagagagcaacaagaaguuccugccauuccagcaguuuggccgggauaucgacgauaccacagacgccguuagagauccccagacacuggaaauccuggacaucaccccuugcagcuucggcggagugucugugaucaccccuggcaccaacaccagcaaucagguggcagugcuguaccagggcgugaacuguaccgaagugcccguggccauucacgccgaucagcugacaccuacauggcggguguacuccaccggcagcaauguguuucagaccagagccggcugucugaucggagccgagcacgugaacaauagcuacgagugcgacauccccaucggcgcuggaaucugcgccagcuaccagacacagacaaacagccaccggagagccagaagcguggccagccagagcaucauugccuacacaaugucucugggcgccgagaacagcguggccuacuccaacaacucuaucgcuauccccaucaacuucaccaucagcgugaccacagagauccugccuguguccaugaccaagaccagcguggacugcaccauguacaucugcggcgauuccaccgagugcuccaaccugcugcugcaguacggcagcuucugcacccagcugaauagagcccugacagggaucgccguggaacaggacaagaacacccaagagguguucgcccaagugaagcagaucuacaagaccccuccuaucaaggacuucggcggcuucaauuucagccagauucugcccgauccuagcaagcccagcaagcggagcuucaucgaggaccugcuguucaacaaagugacacuggccgacgccggcuucaucaagcaguauggcgauugucugggcgacauugccgccagggaucugauuugcgcccagaaguuuaacggacugacagugcugccuccucugcugaccgaugagaugaucgcccaguacacaucugcccugcuggccggcacaaucacaagcggcuggacauuuggagcaggcgccgcucugcagauccccuuugcuaugcagauggccuaccgguucaacggcaucggagugacccagaaugugcuguacgagaaccagaagcugaucgccaaccaguucaacagcgccaucggcaagauccaggacagccugagcagcacagcaagcgcccugggaaagcugcaggacguggucaaccagaaugcccaggcacugaacacccuggucaagcagcuguccuccaacuucggcgccaucagcucugugcugaacgauauccuggccagacuggacaaggucgaggccgaggugcagaucgacagacugaucacaggcagacugcagagccuccagacauacgugacccagcagcugaucagagccgccgagauuagagccucugccaaucuggccgccaccaagaugucugagugugugcugggccagagcaagagaguggacuuuugcggcaagggcuaccaccugaugagcuucccucagucugccccucacggcgugguguuucugcacgugacauaugugcccgcucaagagaagaauuucaccaccgcuccagccaucugccacgacggcaaagcccacuuuccuagagaaggcguguucguguccaacggcacccauugguucgugacacagcggaacuucuacgagccccagaucaucaccacccacaacaccuucgugucuggcaacugcgacgucgugaucggcauugugaacaauaccguguacgacccucugcagcccgagcuggacagcuucaaagaggaacuggacaaguacuuuaagaaccacacaagccccgacguggaccugggcgauaucagcggaaucaaugccagcgucgugaacauccagaaagagaucgaccggcugaacgagguggccaagaaucugaacgagagccugaucgaccugcaagaacuggggaaguacgagcaguacaucaaguggcccugguacaucuggcugggcuuuaucgccggacugauugccaucgugauggucacaaucaugcuguguugcaugaccagcugcuguagcugccugaagggcuguuguagcuguggcagcugcugcaaguucgacgaggacgauucugagcccgugcugaagggcgugaaacugcacuacacaugaggacuaguuauaagacugacuagcccgaugggccucccaacgggcccuccuccccuccuugcaccgagagaucuaaaaaaaaaaaaaaaaaaaaaaaaaaaaaaaaaaaaaaaaaaaaaaaaaaaaaaaaaaaaaaaaaaaaaaaaaaaaaaaaaaaaaaaaaaaaaaaaaaaa

SEQ ID NO: 25932 - RNA, 4011 nt, Artificial Sequence
  SARS-CoV-2/Wuhan/WIV05/2019__EPI_ISL_402128 spike protein mRNA gc mod (1-1273)(K417N_E484K_N501Y_D614G)
aggagaaagcuuaccauguucguguuccuggugcugcugccucugguguccagccagugugugaaccugaccaccagaacacagcugccuccagccuacaccaacagcuuuaccagaggcguguacuaccccgacaagguguucagauccagcgugcugcacucuacccaggaccuguuccugccuuucuucagcaacgugaccugguuccacgccauccacguguccggcaccaauggcaccaagagauucgacaaccccgugcugcccuucaacgacgggguguacuuugccagcaccgagaaguccaacaucaucagaggcuggaucuucggcaccacacuggacagcaagacccagagccugcugaucgugaacaacgccaccaacguggucaucaaagugugcgaguuccaguucugcaacgaccccuuccugggcgucuacuaccacaagaacaacaagagcuggauggaaagcgaguuccggguguacagcagcgccaacaacugcaccuucgaguacgugucccagccuuuccugauggaccuggaaggcaagcagggcaacuucaagaaccugcgcgaguucguguuuaagaacaucgacggcuacuucaagaucuacagcaagcacaccccuaucaaccucgugcgggaucugccucagggcuucucugcucuggaaccccugguggaucugcccaucggcaucaacaucacccgguuucagacacugcuggcccugcacagaagcuaccugacaccuggcgauagcagcagcggauggacagcuggugccgccgcuuacuaugugggcuaccugcagccuagaaccuuccugcugaaguacaacgagaacggcaccaucaccgacgccguggauugugcucuggauccucugagcgagacaaagugcacccugaaguccuucaccguggaaaagggcaucuaccagaccagcaacuuccgggugcagcccaccgaauccaucgugcgguuccccaauaucaccaaucugugccccuucggcgagguguucaaugccaccagauucgccucuguguacgccuggaaccggaagcggaucagcaauugcguggccgacuacuccgugcuguacaacuccgccagcuucagcaccuucaagugcuacggcguguccccuaccaagcugaacgaccugugcuucacaaacguguacgccgacagcuucgugauccggggagaugaagugcggcagauugccccuggacagacaggcaacaucgccgacuacaacuacaagcugcccgacgacuucaccggcugugugauugccuggaacagcaacaaccuggacuccaaagucggcggcaacuacaauuaccuguaccggcuguuccggaaguccaaucugaagcccuucgagcgggacaucuccaccgagaucuaucaggccggcagcaccccuuguaacggcgugaagggcuucaacugcuacuucccacugcaguccuacggcuuucagcccacauacggcgugggcuaucagcccuacagagugguggugcugagcuucgaacugcugcaugccccugccacagugugcggcccuaagaaaagcaccaaucucgugaagaacaaaugcgugaacuucaacuucaacggccugaccggcaccggcgugcugacagagagcaacaagaaguuccugccauuccagcaguuuggccgggauaucgccgauaccacagacgccguuagagauccccagacacuggaaauccuggacaucaccccuugcagcuucggcggagugucugugaucaccccuggcaccaacaccagcaaucagguggcagugcuguaccagggcgugaacuguaccgaagugcccguggccauucacgccgaucagcugacaccuacauggcggguguacuccaccggcagcaauguguuucagaccagagccggcugucugaucggagccgagcacgugaacaauagcuacgagugcgacauccccaucggcgcuggaaucugcgccagcuaccagacacagacaaacagcccucggagagccagaagcguggccagccagagcaucauugccuacacaaugucucugggcgccgagaacagcguggccuacuccaacaacucuaucgcuauccccaccaacuucaccaucagcgugaccacagagauccugccuguguccaugaccaagaccagcguggacugcaccauguacaucugcggcgauuccaccgagugcuccaaccugcugcugcaguacggcagcuucugcacccagcugaauagagcccugacagggaucgccguggaacaggacaagaacacccaagagguguucgcccaagugaagcagaucuacaagaccccuccuaucaaggacuucggcggcuucaauuucagccagauucugcccgauccuagcaagcccagcaagcggagcuucaucgaggaccugcuguucaacaaagugacacuggccgacgccggcuucaucaagcaguauggcgauugucugggcgacauugccgccagggaucugauuugcgcccagaaguuuaacggacugacagugcugccuccucugcugaccgaugagaugaucgcccaguacacaucugcccugcuggccggcacaaucacaagcggcuggacauuuggagcaggcgccgcucugcagauccccuuugcuaugcagauggccuaccgguucaacggcaucggagugacccagaaugugcuguacgagaaccagaagcugaucgccaaccaguucaacagcgccaucggcaagauccaggacagccugagcagcacagcaagcgcccugggaaagcugcaggacguggucaaccagaaugcccaggcacugaacacccuggucaagcagcuguccuccaacuucggcgccaucagcucugugcugaacgauauccugagcagacuggacaaggucgaggccgaggugcagaucgacagacugaucacaggcagacugcagagccuccagacauacgugacccagcagcugaucagagccgccgagauuagagccucugccaaucuggccgccaccaagaugucugagugugugcugggccagagcaagagaguggacuuuugcggcaagggcuaccaccugaugagcuucccucagucugccccucacggcgugguguuucugcacgugacauaugugcccgcucaagagaagaauuucaccaccgcuccagccaucugccacgacggcaaagcccacuuuccuagagaaggcguguucguguccaacggcacccauugguucgugacacagcggaacuucuacgagccccagaucaucaccaccgacaacaccuucgugucuggcaacugcgacgucgugaucggcauugugaacaauaccguguacgacccucugcagcccgagcuggacagcuucaaagaggaacuggacaaguacuuuaagaaccacacaagccccgacguggaccugggcgauaucagcggaaucaaugccagcgucgugaacauccagaaagagaucgaccggcugaacgagguggccaagaaucugaacgagagccugaucgaccugcaagaacuggggaaguacgagcaguacaucaaguggcccugguacaucuggcugggcuuuaucgccggacugauugccaucgugauggucacaaucaugcuguguugcaugaccagcugcuguagcugccugaagggcuguuguagcuguggcagcugcugcaaguucgacgaggacgauucugagcccgugcugaagggcgugaaacugcacuacacaugaggacuaguuauaagacugacuagcccgaugggccucccaacgggcccuccuccccuccuugcaccgagagaucuaaaaaaaaaaaaaaaaaaaaaaaaaaaaaaaaaaaaaaaaaaaaaaaaaaaaaaaaaaaaaaaaaaaaaaaaaaaaaaaaaaaaaaaaaaaaaaaaaaaa

SEQ ID NO: 25933 - RNA, 4002 nt, Artificial Sequence
  SARS-CoV-2/Wuhan/WIV05/2019__EPI_ISL_402128 spike protein mRNA gc mod (1-1273)(L18F_D80A_D215G_L242del_A243del_L244del_R246I_K417N_E484 K_N501Y_D614G_A701V)
aggagaaagcuuaccauguucguguuccuggugcugcugccucugguguccagccagugugugaacuucaccaccagaacacagcugccuccagccuacaccaacagcuuuaccagaggcguguacuaccccgacaagguguucagauccagcgugcugcacucuacccaggaccuguuccugccuuucuucagcaacgugaccugguuccacgccauccacguguccggcaccaauggcaccaagagauucgccaaccccgugcugcccuucaacgacgggguguacuuugccagcaccgagaaguccaacaucaucagaggcuggaucuucggcaccacacuggacagcaagacccagagccugcugaucgugaacaacgccaccaacguggucaucaaagugugcgaguuccaguucugcaacgaccccuuccugggcgucuacuaccacaagaacaacaagagcuggauggaaagcgaguuccggguguacagcagcgccaacaacugcaccuucgaguacgugucccagccuuuccugauggaccuggaaggcaagcagggcaacuucaagaaccugcgcgaguucguguuuaagaacaucgacggcuacuucaagaucuacagcaagcacaccccuaucaaccucgugcggggccugccucagggcuucucugcucuggaaccccugguggaucugcccaucggcaucaacaucacccgguuucagacacugcacaucagcuaccugacaccuggcgauagcagcagcggauggacagcuggugccgccgcuuacuaugugggcuaccugcagccuagaaccuuccugcugaaguacaacgagaacggcaccaucaccgacgccguggauugugcucuggauccucugagcgagacaaagugcacccugaaguccuucaccguggaaaagggcaucuaccagaccagcaacuuccgggugcagcccaccgaauccaucgugcgguuccccaauaucaccaaucugugccccuucggcgagguguucaaugccaccagauucgccucuguguacgccuggaaccggaagcggaucagcaauugcguggccgacuacuccgugcuguacaacuccgccagcuucagcaccuucaagugcuacggcguguccccuaccaagcugaacgaccugugcuucacaaacguguacgccgacagcuucgugauccggggagaugaagugcggcagauugccccuggacagacaggcaacaucgccgacuacaacuacaagcugcccgacgacuucaccggcugugugauugccuggaacagcaacaaccuggacuccaaagucggcggcaacuacaauuaccuguaccggcuguuccggaaguccaaucugaagcccuucgagcgggacaucuccaccgagaucuaucaggccggcagcaccccuuguaacggcgugaagggcuucaacugcuacuucccacugcaguccuacggcuuucagcccacauacggcgugggcuaucagcccuacagagugguggugcugagcuucgaacugcugcaugccccugccacagugugcggcccuaagaaaagcaccaaucucgugaagaacaaaugcgugaacuucaacuucaacggccugaccggcaccggcgugcugacagagagcaacaagaaguuccugccauuccagcaguuuggccgggauaucgccgauaccacagacgccguuagagauccccagacacuggaaauccuggacaucaccccuugcagcuucggcggagugucugugaucaccccuggcaccaacaccagcaaucagguggcagugcuguaccagggcgugaacuguaccgaagugcccguggccauucacgccgaucagcugacaccuacauggcggguguacuccaccggcagcaauguguuucagaccagagccggcugucugaucggagccgagcacgugaacaauagcuacgagugcgacauccccaucggcgcuggaaucugcgccagcuaccagacacagacaaacagcccucggagagccagaagcguggccagccagagcaucauugccuacacaaugucucugggcguggagaacagcguggccuacuccaacaacucuaucgcuauccccaccaacuucaccaucagcgugaccacagagauccugccuguguccaugaccaagaccagcguggacugcaccauguacaucugcggcgauuccaccgagugcuccaaccugcugcugcaguacggcagcuucugcacccagcugaauagagcccugacagggaucgccguggaacaggacaagaacacccaagagguguucgcccaagugaagcagaucuacaagaccccuccuaucaaggacuucggcggcuucaauuucagccagauucugcccgauccuagcaagcccagcaagcggagcuucaucgaggaccugcuguucaacaaagugacacuggccgacgccggcuucaucaagcaguauggcgauugucugggcgacauugccgccagggaucugauuugcgcccagaaguuuaacggacugacagugcugccuccucugcugaccgaugagaugaucgcccaguacacaucugcccugcuggccggcacaaucacaagcggcuggacauuuggagcaggcgccgcucugcagauccccuuugcuaugcagauggccuaccgguucaacggcaucggagugacccagaaugugcuguacgagaaccagaagcugaucgccaaccaguucaacagcgccaucggcaagauccaggacagccugagcagcacagcaagcgcccugggaaagcugcaggacguggucaaccagaaugcccaggcacugaacacccuggucaagcagcuguccuccaacuucggcgccaucagcucugugcugaacgauauccugagcagacuggacaaggucgaggccgaggugcagaucgacagacugaucacaggcagacugcagagccuccagacauacgugacccagcagcugaucagagccgccgagauuagagccucugccaaucuggccgccaccaagaugucugagugugugcugggccagagcaagagaguggacuuuugcggcaagggcuaccaccugaugagcuucccucagucugccccucacggcgugguguuucugcacgugacauaugugcccgcucaagagaagaauuucaccaccgcuccagccaucugccacgacggcaaagcccacuuuccuagagaaggcguguucguguccaacggcacccauugguucgugacacagcggaacuucuacgagccccagaucaucaccaccgacaacaccuucgugucuggcaacugcgacgucgugaucggcauugugaacaauaccguguacgacccucugcagcccgagcuggacagcuucaaagaggaacuggacaaguacuuuaagaaccacacaagccccgacguggaccugggcgauaucagcggaaucaaugccagcgucgugaacauccagaaagagaucgaccggcugaacgagguggccaagaaucugaacgagagccugaucgaccugcaagaacuggggaaguacgagcaguacaucaaguggcccugguacaucuggcugggcuuuaucgccggacugauugccaucgugauggucacaaucaugcuguguugcaugaccagcugcuguagcugccugaagggcuguuguagcuguggcagcugcugcaaguucgacgaggacgauucugagcccgugcugaagggcgugaaacugcacuacacaugaggacuaguuauaagacugacuagcccgaugggccucccaacgggcccuccuccccuccuugcaccgagagaucuaaaaaaaaaaaaaaaaaaaaaaaaaaaaaaaaaaaaaaaaaaaaaaaaaaaaaaaaaaaaaaaaaaaaaaaaaaaaaaaaaaaaaaaaaaaaaaaaaaaa

SEQ ID NO: 25934 - RNA, 4011 nt, Artificial Sequence
  SARS-CoV-2/Wuhan/WIV05/2019__EPI_ISL_402128 spike protein mRNA gc mod (1-1273)(E484K_D614G)
aggagaaagcuuaccauguucguguuccuggugcugcugccucugguguccagccagugugugaaccugaccaccagaacacagcugccuccagccuacaccaacagcuuuaccagaggcguguacuaccccgacaagguguucagauccagcgugcugcacucuacccaggaccuguuccugccuuucuucagcaacgugaccugguuccacgccauccacguguccggcaccaauggcaccaagagauucgacaaccccgugcugcccuucaacgacgggguguacuuugccagcaccgagaaguccaacaucaucagaggcuggaucuucggcaccacacuggacagcaagacccagagccugcugaucgugaacaacgccaccaacguggucaucaaagugugcgaguuccaguucugcaacgaccccuuccugggcgucuacuaccacaagaacaacaagagcuggauggaaagcgaguuccggguguacagcagcgccaacaacugcaccuucgaguacgugucccagccuuuccugauggaccuggaaggcaagcagggcaacuucaagaaccugcgcgaguucguguuuaagaacaucgacggcuacuucaagaucuacagcaagcacaccccuaucaaccucgugcgggaucugccucagggcuucucugcucuggaaccccugguggaucugcccaucggcaucaacaucacccgguuucagacacugcuggcccugcacagaagcuaccugacaccuggcgauagcagcagcggauggacagcuggugccgccgcuuacuaugugggcuaccugcagccuagaaccuuccugcugaaguacaacgagaacggcaccaucaccgacgccguggauugugcucuggauccucugagcgagacaaagugcacccugaaguccuucaccguggaaaagggcaucuaccagaccagcaacuuccgggugcagcccaccgaauccaucgugcgguuccccaauaucaccaaucugugccccuucggcgagguguucaaugccaccagauucgccucuguguacgccuggaaccggaagcggaucagcaauugcguggccgacuacuccgugcuguacaacuccgccagcuucagcaccuucaagugcuacggcguguccccuaccaagcugaacgaccugugcuucacaaacguguacgccgacagcuucgugauccggggagaugaagugcggcagauugccccuggacagacaggcaagaucgccgacuacaacuacaagcugcccgacgacuucaccggcugugugauugccuggaacagcaacaaccuggacuccaaagucggcggcaacuacaauuaccuguaccggcuguuccggaaguccaaucugaagcccuucgagcgggacaucuccaccgagaucuaucaggccggcagcaccccuuguaacggcgugaagggcuucaacugcuacuucccacugcaguccuacggcuuucagcccacaaauggcgugggcuaucagcccuacagagugguggugcugagcuucgaacugcugcaugccccugccacagugugcggcccuaagaaaagcaccaaucucgugaagaacaaaugcgugaacuucaacuucaacggccugaccggcaccggcgugcugacagagagcaacaagaaguuccugccauuccagcaguuuggccgggauaucgccgauaccacagacgccguuagagauccccagacacuggaaauccuggacaucaccccuugcagcuucggcggagugucugugaucaccccuggcaccaacaccagcaaucagguggcagugcuguaccagggcgugaacuguaccgaagugcccguggccauucacgccgaucagcugacaccuacauggcggguguacuccaccggcagcaauguguuucagaccagagccggcugucugaucggagccgagcacgugaacaauagcuacgagugcgacauccccaucggcgcuggaaucugcgccagcuaccagacacagacaaacagcccucggagagccagaagcguggccagccagagcaucauugccuacacaaugucucugggcgccgagaacagcguggccuacuccaacaacucuaucgcuauccccaccaacuucaccaucagcgugaccacagagauccugccuguguccaugaccaagaccagcguggacugcaccauguacaucugcggcgauuccaccgagugcuccaaccugcugcugcaguacggcagcuucugcacccagcugaauagagcccugacagggaucgccguggaacaggacaagaacacccaagagguguucgcccaagugaagcagaucuacaagaccccuccuaucaaggacuucggcggcuucaauuucagccagauucugcccgauccuagcaagcccagcaagcggagcuucaucgaggaccugcuguucaacaaagugacacuggccgacgccggcuucaucaagcaguauggcgauugucugggcgacauugccgccagggaucugauuugcgcccagaaguuuaacggacugacagugcugccuccucugcugaccgaugagaugaucgcccaguacacaucugcccugcuggccggcacaaucacaagcggcuggacauuuggagcaggcgccgcucugcagauccccuuugcuaugcagauggccuaccgguucaacggcaucggagugacccagaaugugcuguacgagaaccagaagcugaucgccaaccaguucaacagcgccaucggcaagauccaggacagccugagcagcacagcaagcgcccugggaaagcugcaggacguggucaaccagaaugcccaggcacugaacacccuggucaagcagcuguccuccaacuucggcgccaucagcucugugcugaacgauauccugagcagacuggacaaggucgaggccgaggugcagaucgacagacugaucacaggcagacugcagagccuccagacauacgugacccagcagcugaucagagccgccgagauuagagccucugccaaucuggccgccaccaagaugucugagugugugcugggccagagcaagagaguggacuuuugcggcaagggcuaccaccugaugagcuucccucagucugccccucacggcgugguguuucugcacgugacauaugugcccgcucaagagaagaauuucaccaccgcuccagccaucugccacgacggcaaagcccacuuuccuagagaaggcguguucguguccaacggcacccauugguucgugacacagcggaacuucuacgagccccagaucaucaccaccgacaacaccuucgugucuggcaacugcgacgucgugaucggcauugugaacaauaccguguacgacccucugcagcccgagcuggacagcuucaaagaggaacuggacaaguacuuuaagaaccacacaagccccgacguggaccugggcgauaucagcggaaucaaugccagcgucgugaacauccagaaagagaucgaccggcugaacgagguggccaagaaucugaacgagagccugaucgaccugcaagaacuggggaaguacgagcaguacaucaaguggcccugguacaucuggcugggcuuuaucgccggacugauugccaucgugauggucacaaucaugcuguguugcaugaccagcugcuguagcugccugaagggcuguuguagcuguggcagcugcugcaaguucgacgaggacgauucugagcccgugcugaagggcgugaaacugcacuacacaugaggacuaguuauaagacugacuagcccgaugggccucccaacgggcccuccuccccuccuugcaccgagagaucuaaaaaaaaaaaaaaaaaaaaaaaaaaaaaaaaaaaaaaaaaaaaaaaaaaaaaaaaaaaaaaaaaaaaaaaaaaaaaaaaaaaaaaaaaaaaaaaaaaaa

SEQ ID NO: 25935 - RNA, 4011 nt, Artificial Sequence
  SARS-CoV-2/Wuhan/WIV05/2019__EPI_ISL_402128 spike protein mRNA gc mod (1-1273)(L18F_T20N_P26S_D138Y_R190S_K417T_E484K_N501Y_D614G_H655Y _T1027I)
aggagaaagcuuaccauguucguguuccuggugcugcugccucugguguccagccagugugugaacuucaccaacagaacacagcugccuagcgccuacaccaacagcuuuaccagaggcguguacuaccccgacaagguguucagauccagcgugcugcacucuacccaggaccuguuccugccuuucuucagcaacgugaccugguuccacgccauccacguguccggcaccaauggcaccaagagauucgacaaccccgugcugcccuucaacgacgggguguacuuugccagcaccgagaaguccaacaucaucagaggcuggaucuucggcaccacacuggacagcaagacccagagccugcugaucgugaacaacgccaccaacguggucaucaaagugugcgaguuccaguucugcaacuaccccuuccugggcgucuacuaccacaagaacaacaagagcuggauggaaagcgaguuccggguguacagcagcgccaacaacugcaccuucgaguacgugucccagccuuuccugauggaccuggaaggcaagcagggcaacuucaagaaccugagcgaguucguguuuaagaacaucgacggcuacuucaagaucuacagcaagcacaccccuaucaaccucgugcgggaucugccucagggcuucucugcucuggaaccccugguggaucugcccaucggcaucaacaucacccgguuucagacacugcuggcccugcacagaagcuaccugacaccuggcgauagcagcagcggauggacagcuggugccgccgcuuacuaugugggcuaccugcagccuagaaccuuccugcugaaguacaacgagaacggcaccaucaccgacgccguggauugugcucuggauccucugagcgagacaaagugcacccugaaguccuucaccguggaaaagggcaucuaccagaccagcaacuuccgggugcagcccaccgaauccaucgugcgguuccccaauaucaccaaucugugccccuucggcgagguguucaaugccaccagauucgccucuguguacgccuggaaccggaagcggaucagcaauugcguggccgacuacuccgugcuguacaacuccgccagcuucagcaccuucaagugcuacggcguguccccuaccaagcugaacgaccugugcuucacaaacguguacgccgacagcuucgugauccggggagaugaagugcggcagauugccccuggacagacaggcaccaucgccgacuacaacuacaagcugcccgacgacuucaccggcugugugauugccuggaacagcaacaaccuggacuccaaagucggcggcaacuacaauuaccuguaccggcuguuccggaaguccaaucugaagcccuucgagcgggacaucuccaccgagaucuaucaggccggcagcaccccuuguaacggcgugaagggcuucaacugcuacuucccacugcaguccuacggcuuucagcccacauacggcgugggcuaucagcccuacagagugguggugcugagcuucgaacugcugcaugccccugccacagugugcggcccuaagaaaagcaccaaucucgugaagaacaaaugcgugaacuucaacuucaacggccugaccggcaccggcgugcugacagagagcaacaagaaguuccugccauuccagcaguuuggccgggauaucgccgauaccacagacgccguuagagauccccagacacuggaaauccuggacaucaccccuugcagcuucggcggagugucugugaucaccccuggcaccaacaccagcaaucagguggcagugcuguaccagggcgugaacuguaccgaagugcccguggccauucacgccgaucagcugacaccuacauggcggguguacuccaccggcagcaauguguuucagaccagagccggcugucugaucggagccgaguacgugaacaauagcuacgagugcgacauccccaucggcgcuggaaucugcgccagcuaccagacacagacaaacagcccucggagagccagaagcguggccagccagagcaucauugccuacacaaugucucugggcgccgagaacagcguggccuacuccaacaacucuaucgcuauccccaccaacuucaccaucagcgugaccacagagauccugccuguguccaugaccaagaccagcguggacugcaccauguacaucugcggcgauuccaccgagugcuccaaccugcugcugcaguacggcagcuucugcacccagcugaauagagcccugacagggaucgccguggaacaggacaagaacacccaagagguguucgcccaagugaagcagaucuacaagaccccuccuaucaaggacuucggcggcuucaauuucagccagauucugcccgauccuagcaagcccagcaagcggagcuucaucgaggaccugcuguucaacaaagugacacuggccgacgccggcuucaucaagcaguauggcgauugucugggcgacauugccgccagggaucugauuugcgcccagaaguuuaacggacugacagugcugccuccucugcugaccgaugagaugaucgcccaguacacaucugcccugcuggccggcacaaucacaagcggcuggacauuuggagcaggcgccgcucugcagauccccuuugcuaugcagauggccuaccgguucaacggcaucggagugacccagaaugugcuguacgagaaccagaagcugaucgccaaccaguucaacagcgccaucggcaagauccaggacagccugagcagcacagcaagcgcccugggaaagcugcaggacguggucaaccagaaugcccaggcacugaacacccuggucaagcagcuguccuccaacuucggcgccaucagcucugugcugaacgauauccugagcagacuggacaaggucgaggccgaggugcagaucgacagacugaucacaggcagacugcagagccuccagacauacgugacccagcagcugaucagagccgccgagauuagagccucugccaaucuggccgccaucaagaugucugagugugugcugggccagagcaagagaguggacuuuugcggcaagggcuaccaccugaugagcuucccucagucugccccucacggcgugguguuucugcacgugacauaugugcccgcucaagagaagaauuucaccaccgcuccagccaucugccacgacggcaaagcccacuuuccuagagaaggcguguucguguccaacggcacccauugguucgugacacagcggaacuucuacgagccccagaucaucaccaccgacaacaccuucgugucuggcaacugcgacgucgugaucggcauugugaacaauaccguguacgacccucugcagcccgagcuggacagcuucaaagaggaacuggacaaguacuuuaagaaccacacaagccccgacguggaccugggcgauaucagcggaaucaaugccagcgucgugaacauccagaaagagaucgaccggcugaacgagguggccaagaaucugaacgagagccugaucgaccugcaagaacuggggaaguacgagcaguacaucaaguggcccugguacaucuggcugggcuuuaucgccggacugauugccaucgugauggucacaaucaugcuguguugcaugaccagcugcuguagcugccugaagggcuguuguagcuguggcagcugcugcaaguucgacgaggacgauucugagcccgugcugaagggcgugaaacugcacuacacaugaggacuaguuauaagacugacuagcccgaugggccucccaacgggcccuccuccccuccuugcaccgagagaucuaaaaaaaaaaaaaaaaaaaaaaaaaaaaaaaaaaaaaaaaaaaaaaaaaaaaaaaaaaaaaaaaaaaaaaaaaaaaaaaaaaaaaaaaaaaaaaaaaaaa

SEQ ID NO: 25936 - RNA, 4011 nt, Artificial Sequence
  SARS-CoV-2/Wuhan/WIV05/2019__EPI_ISL_402128 spike protein mRNA gc mod (1-1273)(S13I_W152C_L452R_D614G)
aggagaaagcuuaccauguucguguuccuggugcugcugccucugguguccauccagugugugaaccugaccaccagaacacagcugccuccagccuacaccaacagcuuuaccagaggcguguacuaccccgacaagguguucagauccagcgugcugcacucuacccaggaccuguuccugccuuucuucagcaacgugaccugguuccacgccauccacguguccggcaccaauggcaccaagagauucgacaaccccgugcugcccuucaacgacgggguguacuuugccagcaccgagaaguccaacaucaucagaggcuggaucuucggcaccacacuggacagcaagacccagagccugcugaucgugaacaacgccaccaacguggucaucaaagugugcgaguuccaguucugcaacgaccccuuccugggcgucuacuaccacaagaacaacaagagcugcauggaaagcgaguuccggguguacagcagcgccaacaacugcaccuucgaguacgugucccagccuuuccugauggaccuggaaggcaagcagggcaacuucaagaaccugcgcgaguucguguuuaagaacaucgacggcuacuucaagaucuacagcaagcacaccccuaucaaccucgugcgggaucugccucagggcuucucugcucuggaaccccugguggaucugcccaucggcaucaacaucacccgguuucagacacugcuggcccugcacagaagcuaccugacaccuggcgauagcagcagcggauggacagcuggugccgccgcuuacuaugugggcuaccugcagccuagaaccuuccugcugaaguacaacgagaacggcaccaucaccgacgccguggauugugcucuggauccucugagcgagacaaagugcacccugaaguccuucaccguggaaaagggcaucuaccagaccagcaacuuccgggugcagcccaccgaauccaucgugcgguuccccaauaucaccaaucugugccccuucggcgagguguucaaugccaccagauucgccucuguguacgccuggaaccggaagcggaucagcaauugcguggccgacuacuccgugcuguacaacuccgccagcuucagcaccuucaagugcuacggcguguccccuaccaagcugaacgaccugugcuucacaaacguguacgccgacagcuucgugauccggggagaugaagugcggcagauugccccuggacagacaggcaagaucgccgacuacaacuacaagcugcccgacgacuucaccggcugugugauugccuggaacagcaacaaccuggacuccaaagucggcggcaacuacaauuaccgcuaccggcuguuccggaaguccaaucugaagcccuucgagcgggacaucuccaccgagaucuaucaggccggcagcaccccuuguaacggcguggaaggcuucaacugcuacuucccacugcaguccuacggcuuucagcccacaaauggcgugggcuaucagcccuacagagugguggugcugagcuucgaacugcugcaugccccugccacagugugcggcccuaagaaaagcaccaaucucgugaagaacaaaugcgugaacuucaacuucaacggccugaccggcaccggcgugcugacagagagcaacaagaaguuccugccauuccagcaguuuggccgggauaucgccgauaccacagacgccguuagagauccccagacacuggaaauccuggacaucaccccuugcagcuucggcggagugucugugaucaccccuggcaccaacaccagcaaucagguggcagugcuguaccagggcgugaacuguaccgaagugcccguggccauucacgccgaucagcugacaccuacauggcggguguacuccaccggcagcaauguguuucagaccagagccggcugucugaucggagccgagcacgugaacaauagcuacgagugcgacauccccaucggcgcuggaaucugcgccagcuaccagacacagacaaacagcccucggagagccagaagcguggccagccagagcaucauugccuacacaaugucucugggcgccgagaacagcguggccuacuccaacaacucuaucgcuauccccaccaacuucaccaucagcgugaccacagagauccugccuguguccaugaccaagaccagcguggacugcaccauguacaucugcggcgauuccaccgagugcuccaaccugcugcugcaguacggcagcuucugcacccagcugaauagagcccugacagggaucgccguggaacaggacaagaacacccaagagguguucgcccaagugaagcagaucuacaagaccccuccuaucaaggacuucggcggcuucaauuucagccagauucugcccgauccuagcaagcccagcaagcggagcuucaucgaggaccugcuguucaacaaagugacacuggccgacgccggcuucaucaagcaguauggcgauugucugggcgacauugccgccagggaucugauuugcgcccagaaguuuaacggacugacagugcugccuccucugcugaccgaugagaugaucgcccaguacacaucugcccugcuggccggcacaaucacaagcggcuggacauuuggagcaggcgccgcucugcagauccccuuugcuaugcagauggccuaccgguucaacggcaucggagugacccagaaugugcuguacgagaaccagaagcugaucgccaaccaguucaacagcgccaucggcaagauccaggacagccugagcagcacagcaagcgcccugggaaagcugcaggacguggucaaccagaaugcccaggcacugaacacccuggucaagcagcuguccuccaacuucggcgccaucagcucugugcugaacgauauccugagcagacuggacaaggucgaggccgaggugcagaucgacagacugaucacaggcagacugcagagccuccagacauacgugacccagcagcugaucagagccgccgagauuagagccucugccaaucuggccgccaccaagaugucugagugugugcugggccagagcaagagaguggacuuuugcggcaagggcuaccaccugaugagcuucccucagucugccccucacggcgugguguuucugcacgugacauaugugcccgcucaagagaagaauuucaccaccgcuccagccaucugccacgacggcaaagcccacuuuccuagagaaggcguguucguguccaacggcacccauugguucgugacacagcggaacuucuacgagccccagaucaucaccaccgacaacaccuucgugucuggcaacugcgacgucgugaucggcauugugaacaauaccguguacgacccucugcagcccgagcuggacagcuucaaagaggaacuggacaaguacuuuaagaaccacacaagccccgacguggaccugggcgauaucagcggaaucaaugccagcgucgugaacauccagaaagagaucgaccggcugaacgagguggccaagaaucugaacgagagccugaucgaccugcaagaacuggggaaguacgagcaguacaucaaguggcccugguacaucuggcugggcuuuaucgccggacugauugccaucgugauggucacaaucaugcuguguugcaugaccagcugcuguagcugccugaagggcuguuguagcuguggcagcugcugcaaguucgacgaggacgauucugagcccgugcugaagggcgugaaacugcacuacacaugaggacuaguuauaagacugacuagcccgaugggccucccaacgggcccuccuccccuccuugcaccgagagaucuaaaaaaaaaaaaaaaaaaaaaaaaaaaaaaaaaaaaaaaaaaaaaaaaaaaaaaaaaaaaaaaaaaaaaaaaaaaaaaaaaaaaaaaaaaaaaaaaaaaa

SEQ ID NO: 25937 - RNA, 4011 nt, Artificial Sequence
  SARS-CoV-2/Wuhan/WIV05/2019__EPI_ISL_402128 spike protein mRNA gc (1-1273)(K986P_V987P)
aggagaaagcuuaccauguucguguuccugguccuccugccccuggugagcucccagugcgugaaccucaccacccgcacgcagcugccgcccgccuacaccaacagcuucacccggggcgucuacuaccccgacaagguguuccgcuccagcgugcugcacuccacccaggaccucuuccugcccuucuucagcaacgucacgugguuccacgccauccacguguccgggaccaacggcaccaagcgguucgacaacccggugcugcccuucaacgacggggucuacuucgcgagcaccgagaaguccaacaucauccgcggcuggaucuucgggacgacccucgacagcaagacccagucccugcugaucgugaacaacgccaccaacguggucaucaaggugugcgaguuccaguucugcaacgaccccuuccucggcguguacuaccacaagaacaacaagagcuggauggaguccgaguuccgggucuacagcuccgccaacaacugcacguucgaguacgugagccagcccuuccugauggaccuggagggcaagcaggggaacuucaagaaccuccgcgaguucguguucaagaacaucgacggcuacuucaagaucuacuccaagcacaccccgaucaaccugguccgggaccugccccagggguucagcgcccucgagccccugguggaccugcccaucggcaucaacaucacccgcuuccagacccuccuggcccugcaccgguccuaccucacgccgggggacagcagcuccggcuggaccgcgggcgccgccgccuacuacgugggguaccugcagccccgcaccuuccugcucaaguacaacgagaacggcaccaucacggacgcggucgacugcgcccuggacccccugagcgagaccaagugcacccucaaguccuucaccguggagaaggggaucuaccagacgagcaacuuccgggugcagcccaccgaguccaucguccgcuucccgaacaucaccaaccugugccccuucggcgagguguucaacgccacccgguucgccagcgucuacgccuggaaccgcaagcggaucuccaacugcguggcggacuacagcgugcuguacaacuccgccagcuucuccacguucaagugcuacggcgucagccccaccaagcucaacgaccugugcuucaccaacguguacgccgacuccuucgugauccgcggggacgagguccggcagaucgcccccggccagaccgggaagaucgccgacuacaacuacaagcugccggacgacuucacgggcugcgugaucgcguggaacagcaacaaccucgacuccaaggucgggggcaacuacaacuaccuguaccgccuguuccgcaagagcaaccucaagcccuucgagcgggacaucuccaccgagaucuaccaggccggcagcacccccugcaacgggguggagggcuucaacugcuacuucccccugcaguccuacggguuccagccgaccaacggcgugggguaccagcccuaccggguggucgugcugagcuucgagcuccugcacgcccccgccacggugugcggccccaagaaguccaccaaccuggucaagaacaagugcgugaacuucaacuucaacggccucaccgggaccggcgugcugaccgagagcaacaagaaguuccugccguuccagcaguucgggcgcgacaucgccgacacgaccgacgcgguccgcgacccccagacccuggagauccucgacaucacccccugcagcuucggcgggguguccgugaucacgccgggcaccaacaccagcaaccaggucgccgugcuguaccaggacgugaacugcaccgagguccccguggccauccacgccgaccagcugacgcccaccuggcggguguacuccaccggcagcaacgucuuccagacccgcgccgggugccucaucggcgcggagcacgugaacaacuccuacgagugcgacauccccaucggggccggcaucugcgccagcuaccagacgcagaccaacuccccgcggcgcgcccggagcguggcgucccagagcaucaucgccuacaccaugucccugggcgccgagaacagcgucgccuacuccaacaacagcaucgccauccccaccaacuucacgaucuccgugaccaccgagauccugcccgugagcaugaccaagacgagcgucgacugcaccauguacaucugcggggacuccaccgagugcagcaaccuccugcugcaguacggcuccuucugcacccagcucaaccgcgcgcugacggggaucgccguggagcaggacaagaacacccaggagguguucgcccaggucaagcagaucuacaagacgcccccgaucaaggacuucggcggguucaacuucagccagauccugcccgaccccuccaagcccagcaagcgguccuucaucgaggaccuccuguucaacaaggugacccuggccgacgccggcuucaucaagcaguacggcgacugccucggggacaucgcggcccgcgaccugaucugcgcccagaaguucaacggccugaccgugcucccgccccugcugaccgacgagaugaucgcccaguacaccagcgcccuccuggcggggaccaucacguccggcuggaccuucggggccggcgccgcccugcagauccccuucgcgaugcagauggccuaccgguucaacggcaucggggucacccagaacgugcucuacgagaaccagaagcugaucgccaaccaguucaacagcgccaucggcaagauccaggacucccugagcuccaccgccagcgcgcucgggaagcugcaggacguggucaaccagaacgcccaggcccugaacacgcucgugaagcagcuguccagcaacuucggcgccaucuccagcgugcugaacgacauccucucccgccuggacccgcccgaggccgaggugcagaucgaccggcugaucaccgggcgccuccagagccugcagaccuacgugacccagcagcugauccgggcggccgagauccgcgccagcgccaaccucgccgcgaccaagauguccgagugcguccugggccagagcaagcggguggacuucugcggcaagggguaccaccugauguccuucccccagagcgccccgcacggcguggucuuccuccacgugacguacguccccgcccaggagaagaacuucaccaccgcccccgcgaucugccacgacgggaaggcccacuucccccgcgagggcguguucguguccaacgggacccacugguucgucacgcagcggaacuucuacgagccgcagaucaucaccaccgacaacaccuucgugagcggcaacugcgacguggucaucggcaucgugaacaacacgguguacgacccccugcagcccgagcuggacuccuucaaggaggagcucgacaaguacuucaagaaccacaccagccccgacgucgaccugggggacaucuccggcaucaacgccagcguggugaacauccagaaggagaucgaccgccugaacgaggucgccaagaaccucaacgagucccugaucgaccugcaggagcucgggaaguacgagcaguacaucaaguggccgugguacaucuggcugggcuucaucgccggccugaucgcgaucgugauggugaccaucaugcucugcugcaugaccagcugcugcuccugccugaaggggugcugcagcugcggcuccugcugcaaguucgacgaggacgacagcgagcccguccugaagggggugaagcuccacuacacgugaggacuaguuauaagacugacuagcccgaugggccucccaacgggcccuccuccccuccuugcaccgagagaucuaaaaaaaaaaaaaaaaaaaaaaaaaaaaaaaaaaaaaaaaaaaaaaaaaaaaaaaaaaaaaaaaaaaaaaaaaaaaaaaaaaaaaaaaaaaaaaaaaaaa

SEQ ID NO: 25938 - RNA, 4011 nt, Artificial Sequence
  SARS-CoV-2/Wuhan/WIV05/2019__EPI_ISL_402128 spike protein mRNA gc (1-1273)(K986P_V987P_ D614G)
aggagaaagcuuaccauguucguguuccugguccuccugccccuggugagcucccagugcgugaaccucaccacccgcacgcagcugccgcccgccuacaccaacagcuucacccggggcgucuacuaccccgacaagguguuccgcuccagcgugcugcacuccacccaggaccucuuccugcccuucuucagcaacgucacgugguuccacgccauccacguguccgggaccaacggcaccaagcgguucgacaacccggugcugcccuucaacgacggggucuacuucgcgagcaccgagaaguccaacaucauccgcggcuggaucuucgggacgacccucgacagcaagacccagucccugcugaucgugaacaacgccaccaacguggucaucaaggugugcgaguuccaguucugcaacgaccccuuccucggcguguacuaccacaagaacaacaagagcuggauggaguccgaguuccgggucuacagcuccgccaacaacugcacguucgaguacgugagccagcccuuccugauggaccuggagggcaagcaggggaacuucaagaaccuccgcgaguucguguucaagaacaucgacggcuacuucaagaucuacuccaagcacaccccgaucaaccugguccgggaccugccccagggguucagcgcccucgagccccugguggaccugcccaucggcaucaacaucacccgcuuccagacccuccuggcccugcaccgguccuaccucacgccgggggacagcagcuccggcuggaccgcgggcgccgccgccuacuacgugggguaccugcagccccgcaccuuccugcucaaguacaacgagaacggcaccaucacggacgcggucgacugcgcccuggacccccugagcgagaccaagugcacccucaaguccuucaccguggagaaggggaucuaccagacgagcaacuuccgggugcagcccaccgaguccaucguccgcuucccgaacaucaccaaccugugccccuucggcgagguguucaacgccacccgguucgccagcgucuacgccuggaaccgcaagcggaucuccaacugcguggcggacuacagcgugcuguacaacuccgccagcuucuccacguucaagugcuacggcgucagccccaccaagcucaacgaccugugcuucaccaacguguacgccgacuccuucgugauccgcggggacgagguccggcagaucgcccccggccagaccgggaagaucgccgacuacaacuacaagcugccggacgacuucacgggcugcgugaucgcguggaacagcaacaaccucgacuccaaggucgggggcaacuacaacuaccuguaccgccuguuccgcaagagcaaccucaagcccuucgagcgggacaucuccaccgagaucuaccaggccggcagcacccccugcaacgggguggagggcuucaacugcuacuucccccugcaguccuacggguuccagccgaccaacggcgugggguaccagcccuaccggguggucgugcugagcuucgagcuccugcacgcccccgccacggugugcggccccaagaaguccaccaaccuggucaagaacaagugcgugaacuucaacuucaacggccucaccgggaccggcgugcugaccgagagcaacaagaaguuccugccguuccagcaguucgggcgcgacaucgccgacacgaccgacgcgguccgcgacccccagacccuggagauccucgacaucacccccugcagcuucggcgggguguccgugaucacgccgggcaccaacaccagcaaccaggucgccgugcuguaccagggcgugaacugcaccgagguccccguggccauccacgccgaccagcugacgcccaccuggcggguguacuccaccggcagcaacgucuuccagacccgcgccgggugccucaucggcgcggagcacgugaacaacuccuacgagugcgacauccccaucggggccggcaucugcgccagcuaccagacgcagaccaacuccccgcggcgcgcccggagcguggcgucccagagcaucaucgccuacaccaugucccugggcgccgagaacagcgucgccuacuccaacaacagcaucgccauccccaccaacuucacgaucuccgugaccaccgagauccugcccgugagcaugaccaagacgagcgucgacugcaccauguacaucugcggggacuccaccgagugcagcaaccuccugcugcaguacggcuccuucugcacccagcucaaccgcgcgcugacggggaucgccguggagcaggacaagaacacccaggagguguucgcccaggucaagcagaucuacaagacgcccccgaucaaggacuucggcggguucaacuucagccagauccugcccgaccccuccaagcccagcaagcgguccuucaucgaggaccuccuguucaacaaggugacccuggccgacgccggcuucaucaagcaguacggcgacugccucggggacaucgcggcccgcgaccugaucugcgcccagaaguucaacggccugaccgugcucccgccccugcugaccgacgagaugaucgcccaguacaccagcgcccuccuggcggggaccaucacguccggcuggaccuucggggccggcgccgcccugcagauccccuucgcgaugcagauggccuaccgguucaacggcaucggggucacccagaacgugcucuacgagaaccagaagcugaucgccaaccaguucaacagcgccaucggcaagauccaggacucccugagcuccaccgccagcgcgcucgggaagcugcaggacguggucaaccagaacgcccaggcccugaacacgcucgugaagcagcuguccagcaacuucggcgccaucuccagcgugcugaacgacauccucucccgccuggacccgcccgaggccgaggugcagaucgaccggcugaucaccgggcgccuccagagccugcagaccuacgugacccagcagcugauccgggcggccgagauccgcgccagcgccaaccucgccgcgaccaagauguccgagugcguccugggccagagcaagcggguggacuucugcggcaagggguaccaccugauguccuucccccagagcgccccgcacggcguggucuuccuccacgugacguacguccccgcccaggagaagaacuucaccaccgcccccgcgaucugccacgacgggaaggcccacuucccccgcgagggcguguucguguccaacgggacccacugguucgucacgcagcggaacuucuacgagccgcagaucaucaccaccgacaacaccuucgugagcggcaacugcgacguggucaucggcaucgugaacaacacgguguacgacccccugcagcccgagcuggacuccuucaaggaggagcucgacaaguacuucaagaaccacaccagccccgacgucgaccugggggacaucuccggcaucaacgccagcguggugaacauccagaaggagaucgaccgccugaacgaggucgccaagaaccucaacgagucccugaucgaccugcaggagcucgggaaguacgagcaguacaucaaguggccgugguacaucuggcugggcuucaucgccggccugaucgcgaucgugauggugaccaucaugcucugcugcaugaccagcugcugcuccugccugaaggggugcugcagcugcggcuccugcugcaaguucgacgaggacgacagcgagcccguccugaagggggugaagcuccacuacacgugaggacuaguuauaagacugacuagcccgaugggccucccaacgggcccuccuccccuccuugcaccgagagaucuaaaaaaaaaaaaaaaaaaaaaaaaaaaaaaaaaaaaaaaaaaaaaaaaaaaaaaaaaaaaaaaaaaaaaaaaaaaaaaaaaaaaaaaaaaaaaaaaaaaa

SEQ ID NO: 25939 - RNA, 4011 nt, Artificial Sequence
  SARS-CoV-2/Wuhan/WIV05/2019__EPI_ISL_402128 spike protein mRNA gc (1-1273)(K986P_V987P_A222V_D614G)
aggagaaagcuuaccauguucguguuccugguccuccugccccuggugagcucccagugcgugaaccucaccacccgcacgcagcugccgcccgccuacaccaacagcuucacccggggcgucuacuaccccgacaagguguuccgcuccagcgugcugcacuccacccaggaccucuuccugcccuucuucagcaacgucacgugguuccacgccauccacguguccgggaccaacggcaccaagcgguucgacaacccggugcugcccuucaacgacggggucuacuucgcgagcaccgagaaguccaacaucauccgcggcuggaucuucgggacgacccucgacagcaagacccagucccugcugaucgugaacaacgccaccaacguggucaucaaggugugcgaguuccaguucugcaacgaccccuuccucggcguguacuaccacaagaacaacaagagcuggauggaguccgaguuccgggucuacagcuccgccaacaacugcacguucgaguacgugagccagcccuuccugauggaccuggagggcaagcaggggaacuucaagaaccuccgcgaguucguguucaagaacaucgacggcuacuucaagaucuacuccaagcacaccccgaucaaccugguccgggaccugccccagggguucagcguccucgagccccugguggaccugcccaucggcaucaacaucacccgcuuccagacccuccuggcccugcaccgguccuaccucacgccgggggacagcagcuccggcuggaccgcgggcgccgccgccuacuacgugggguaccugcagccccgcaccuuccugcucaaguacaacgagaacggcaccaucacggacgcggucgacugcgcccuggacccccugagcgagaccaagugcacccucaaguccuucaccguggagaaggggaucuaccagacgagcaacuuccgggugcagcccaccgaguccaucguccgcuucccgaacaucaccaaccugugccccuucggcgagguguucaacgccacccgguucgccagcgucuacgccuggaaccgcaagcggaucuccaacugcguggcggacuacagcgugcuguacaacuccgccagcuucuccacguucaagugcuacggcgucagccccaccaagcucaacgaccugugcuucaccaacguguacgccgacuccuucgugauccgcggggacgagguccggcagaucgcccccggccagaccgggaagaucgccgacuacaacuacaagcugccggacgacuucacgggcugcgugaucgcguggaacagcaacaaccucgacuccaaggucgggggcaacuacaacuaccuguaccgccuguuccgcaagagcaaccucaagcccuucgagcgggacaucuccaccgagaucuaccaggccggcagcacccccugcaacgggguggagggcuucaacugcuacuucccccugcaguccuacggguuccagccgaccaacggcgugggguaccagcccuaccggguggucgugcugagcuucgagcuccugcacgcccccgccacggugugcggccccaagaaguccaccaaccuggucaagaacaagugcgugaacuucaacuucaacggccucaccgggaccggcgugcugaccgagagcaacaagaaguuccugccguuccagcaguucgggcgcgacaucgccgacacgaccgacgcgguccgcgacccccagacccuggagauccucgacaucacccccugcagcuucggcgggguguccgugaucacgccgggcaccaacaccagcaaccaggucgccgugcuguaccagggcgugaacugcaccgagguccccguggccauccacgccgaccagcugacgcccaccuggcggguguacuccaccggcagcaacgucuuccagacccgcgccgggugccucaucggcgcggagcacgugaacaacuccuacgagugcgacauccccaucggggccggcaucugcgccagcuaccagacgcagaccaacuccccgcggcgcgcccggagcguggcgucccagagcaucaucgccuacaccaugucccugggcgccgagaacagcgucgccuacuccaacaacagcaucgccauccccaccaacuucacgaucuccgugaccaccgagauccugcccgugagcaugaccaagacgagcgucgacugcaccauguacaucugcggggacuccaccgagugcagcaaccuccugcugcaguacggcuccuucugcacccagcucaaccgcgcgcugacggggaucgccguggagcaggacaagaacacccaggagguguucgcccaggucaagcagaucuacaagacgcccccgaucaaggacuucggcggguucaacuucagccagauccugcccgaccccuccaagcccagcaagcgguccuucaucgaggaccuccuguucaacaaggugacccuggccgacgccggcuucaucaagcaguacggcgacugccucggggacaucgcggcccgcgaccugaucugcgcccagaaguucaacggccugaccgugcucccgccccugcugaccgacgagaugaucgcccaguacaccagcgcccuccuggcggggaccaucacguccggcuggaccuucggggccggcgccgcccugcagauccccuucgcgaugcagauggccuaccgguucaacggcaucggggucacccagaacgugcucuacgagaaccagaagcugaucgccaaccaguucaacagcgccaucggcaagauccaggacucccugagcuccaccgccagcgcgcucgggaagcugcaggacguggucaaccagaacgcccaggcccugaacacgcucgugaagcagcuguccagcaacuucggcgccaucuccagcgugcugaacgacauccucucccgccuggacccgcccgaggccgaggugcagaucgaccggcugaucaccgggcgccuccagagccugcagaccuacgugacccagcagcugauccgggcggccgagauccgcgccagcgccaaccucgccgcgaccaagauguccgagugcguccugggccagagcaagcggguggacuucugcggcaagggguaccaccugauguccuucccccagagcgccccgcacggcguggucuuccuccacgugacguacguccccgcccaggagaagaacuucaccaccgcccccgcgaucugccacgacgggaaggcccacuucccccgcgagggcguguucguguccaacgggacccacugguucgucacgcagcggaacuucuacgagccgcagaucaucaccaccgacaacaccuucgugagcggcaacugcgacguggucaucggcaucgugaacaacacgguguacgacccccugcagcccgagcuggacuccuucaaggaggagcucgacaaguacuucaagaaccacaccagccccgacgucgaccugggggacaucuccggcaucaacgccagcguggugaacauccagaaggagaucgaccgccugaacgaggucgccaagaaccucaacgagucccugaucgaccugcaggagcucgggaaguacgagcaguacaucaaguggccgugguacaucuggcugggcuucaucgccggccugaucgcgaucgugauggugaccaucaugcucugcugcaugaccagcugcugcuccugccugaaggggugcugcagcugcggcuccugcugcaaguucgacgaggacgacagcgagcccguccugaagggggugaagcuccacuacacgugaggacuaguuauaagacugacuagcccgaugggccucccaacgggcccuccuccccuccuugcaccgagagaucuaaaaaaaaaaaaaaaaaaaaaaaaaaaaaaaaaaaaaaaaaaaaaaaaaaaaaaaaaaaaaaaaaaaaaaaaaaaaaaaaaaaaaaaaaaaaaaaaaaaa

SEQ ID NO: 25940 - RNA, 4011 nt, Artificial Sequence
  SARS-CoV-2/Wuhan/WIV05/2019__EPI_ISL_402128 spike protein mRNA gc (1-1273)(K986P_V987P_N439K_D614G)
aggagaaagcuuaccauguucguguuccugguccuccugccccuggugagcucccagugcgugaaccucaccacccgcacgcagcugccgcccgccuacaccaacagcuucacccggggcgucuacuaccccgacaagguguuccgcuccagcgugcugcacuccacccaggaccucuuccugcccuucuucagcaacgucacgugguuccacgccauccacguguccgggaccaacggcaccaagcgguucgacaacccggugcugcccuucaacgacggggucuacuucgcgagcaccgagaaguccaacaucauccgcggcuggaucuucgggacgacccucgacagcaagacccagucccugcugaucgugaacaacgccaccaacguggucaucaaggugugcgaguuccaguucugcaacgaccccuuccucggcguguacuaccacaagaacaacaagagcuggauggaguccgaguuccgggucuacagcuccgccaacaacugcacguucgaguacgugagccagcccuuccugauggaccuggagggcaagcaggggaacuucaagaaccuccgcgaguucguguucaagaacaucgacggcuacuucaagaucuacuccaagcacaccccgaucaaccugguccgggaccugccccagggguucagcgcccucgagccccugguggaccugcccaucggcaucaacaucacccgcuuccagacccuccuggcccugcaccgguccuaccucacgccgggggacagcagcuccggcuggaccgcgggcgccgccgccuacuacgugggguaccugcagccccgcaccuuccugcucaaguacaacgagaacggcaccaucacggacgcggucgacugcgcccuggacccccugagcgagaccaagugcacccucaaguccuucaccguggagaaggggaucuaccagacgagcaacuuccgggugcagcccaccgaguccaucguccgcuucccgaacaucaccaaccugugccccuucggcgagguguucaacgccacccgguucgccagcgucuacgccuggaaccgcaagcggaucuccaacugcguggcggacuacagcgugcuguacaacuccgccagcuucuccacguucaagugcuacggcgucagccccaccaagcucaacgaccugugcuucaccaacguguacgccgacuccuucgugauccgcggggacgagguccggcagaucgcccccggccagaccgggaagaucgccgacuacaacuacaagcugccggacgacuucacgggcugcgugaucgcguggaacagcaagaaccucgacuccaaggucgggggcaacuacaacuaccuguaccgccuguuccgcaagagcaaccucaagcccuucgagcgggacaucuccaccgagaucuaccaggccggcagcacccccugcaacgggguggagggcuucaacugcuacuucccccugcaguccuacggguuccagccgaccaacggcgugggguaccagcccuaccggguggucgugcugagcuucgagcuccugcacgcccccgccacggugugcggccccaagaaguccaccaaccuggucaagaacaagugcgugaacuucaacuucaacggccucaccgggaccggcgugcugaccgagagcaacaagaaguuccugccguuccagcaguucgggcgcgacaucgccgacacgaccgacgcgguccgcgacccccagacccuggagauccucgacaucacccccugcagcuucggcgggguguccgugaucacgccgggcaccaacaccagcaaccaggucgccgugcuguaccagggcgugaacugcaccgagguccccguggccauccacgccgaccagcugacgcccaccuggcggguguacuccaccggcagcaacgucuuccagacccgcgccgggugccucaucggcgcggagcacgugaacaacuccuacgagugcgacauccccaucggggccggcaucugcgccagcuaccagacgcagaccaacuccccgcggcgcgcccggagcguggcgucccagagcaucaucgccuacaccaugucccugggcgccgagaacagcgucgccuacuccaacaacagcaucgccauccccaccaacuucacgaucuccgugaccaccgagauccugcccgugagcaugaccaagacgagcgucgacugcaccauguacaucugcggggacuccaccgagugcagcaaccuccugcugcaguacggcuccuucugcacccagcucaaccgcgcgcugacggggaucgccguggagcaggacaagaacacccaggagguguucgcccaggucaagcagaucuacaagacgcccccgaucaaggacuucggcggguucaacuucagccagauccugcccgaccccuccaagcccagcaagcgguccuucaucgaggaccuccuguucaacaaggugacccuggccgacgccggcuucaucaagcaguacggcgacugccucggggacaucgcggcccgcgaccugaucugcgcccagaaguucaacggccugaccgugcucccgccccugcugaccgacgagaugaucgcccaguacaccagcgcccuccuggcggggaccaucacguccggcuggaccuucggggccggcgccgcccugcagauccccuucgcgaugcagauggccuaccgguucaacggcaucggggucacccagaacgugcucuacgagaaccagaagcugaucgccaaccaguucaacagcgccaucggcaagauccaggacucccugagcuccaccgccagcgcgcucgggaagcugcaggacguggucaaccagaacgcccaggcccugaacacgcucgugaagcagcuguccagcaacuucggcgccaucuccagcgugcugaacgacauccucucccgccuggacccgcccgaggccgaggugcagaucgaccggcugaucaccgggcgccuccagagccugcagaccuacgugacccagcagcugauccgggcggccgagauccgcgccagcgccaaccucgccgcgaccaagauguccgagugcguccugggccagagcaagcggguggacuucugcggcaagggguaccaccugauguccuucccccagagcgccccgcacggcguggucuuccuccacgugacguacguccccgcccaggagaagaacuucaccaccgcccccgcgaucugccacgacgggaaggcccacuucccccgcgagggcguguucguguccaacgggacccacugguucgucacgcagcggaacuucuacgagccgcagaucaucaccaccgacaacaccuucgugagcggcaacugcgacguggucaucggcaucgugaacaacacgguguacgacccccugcagcccgagcuggacuccuucaaggaggagcucgacaaguacuucaagaaccacaccagccccgacgucgaccugggggacaucuccggcaucaacgccagcguggugaacauccagaaggagaucgaccgccugaacgaggucgccaagaaccucaacgagucccugaucgaccugcaggagcucgggaaguacgagcaguacaucaaguggccgugguacaucuggcugggcuucaucgccggccugaucgcgaucgugauggugaccaucaugcucugcugcaugaccagcugcugcuccugccugaaggggugcugcagcugcggcuccugcugcaaguucgacgaggacgacagcgagcccguccugaagggggugaagcuccacuacacgugaggacuaguuauaagacugacuagcccgaugggccucccaacgggcccuccuccccuccuugcaccgagagaucuaaaaaaaaaaaaaaaaaaaaaaaaaaaaaaaaaaaaaaaaaaaaaaaaaaaaaaaaaaaaaaaaaaaaaaaaaaaaaaaaaaaaaaaaaaaaaaaaaaaa

SEQ ID NO: 25941 - RNA, 4011 nt, Artificial Sequence
  SARS-CoV-2/Wuhan/WIV05/2019__EPI_ISL_402128 spike protein mRNA gc (1-1273)(K986P_V987P_S477N_D614G)
aggagaaagcuuaccauguucguguuccugguccuccugccccuggugagcucccagugcgugaaccucaccacccgcacgcagcugccgcccgccuacaccaacagcuucacccggggcgucuacuaccccgacaagguguuccgcuccagcgugcugcacuccacccaggaccucuuccugcccuucuucagcaacgucacgugguuccacgccauccacguguccgggaccaacggcaccaagcgguucgacaacccggugcugcccuucaacgacggggucuacuucgcgagcaccgagaaguccaacaucauccgcggcuggaucuucgggacgacccucgacagcaagacccagucccugcugaucgugaacaacgccaccaacguggucaucaaggugugcgaguuccaguucugcaacgaccccuuccucggcguguacuaccacaagaacaacaagagcuggauggaguccgaguuccgggucuacagcuccgccaacaacugcacguucgaguacgugagccagcccuuccugauggaccuggagggcaagcaggggaacuucaagaaccuccgcgaguucguguucaagaacaucgacggcuacuucaagaucuacuccaagcacaccccgaucaaccugguccgggaccugccccagggguucagcgcccucgagccccugguggaccugcccaucggcaucaacaucacccgcuuccagacccuccuggcccugcaccgguccuaccucacgccgggggacagcagcuccggcuggaccgcgggcgccgccgccuacuacgugggguaccugcagccccgcaccuuccugcucaaguacaacgagaacggcaccaucacggacgcggucgacugcgcccuggacccccugagcgagaccaagugcacccucaaguccuucaccguggagaaggggaucuaccagacgagcaacuuccgggugcagcccaccgaguccaucguccgcuucccgaacaucaccaaccugugccccuucggcgagguguucaacgccacccgguucgccagcgucuacgccuggaaccgcaagcggaucuccaacugcguggcggacuacagcgugcuguacaacuccgccagcuucuccacguucaagugcuacggcgucagccccaccaagcucaacgaccugugcuucaccaacguguacgccgacuccuucgugauccgcggggacgagguccggcagaucgcccccggccagaccgggaagaucgccgacuacaacuacaagcugccggacgacuucacgggcugcgugaucgcguggaacagcaacaaccucgacuccaaggucgggggcaacuacaacuaccuguaccgccuguuccgcaagagcaaccucaagcccuucgagcgggacaucuccaccgagaucuaccaggccggcaacacccccugcaacgggguggagggcuucaacugcuacuucccccugcaguccuacggguuccagccgaccaacggcgugggguaccagcccuaccggguggucgugcugagcuucgagcuccugcacgcccccgccacggugugcggccccaagaaguccaccaaccuggucaagaacaagugcgugaacuucaacuucaacggccucaccgggaccggcgugcugaccgagagcaacaagaaguuccugccguuccagcaguucgggcgcgacaucgccgacacgaccgacgcgguccgcgacccccagacccuggagauccucgacaucacccccugcagcuucggcgggguguccgugaucacgccgggcaccaacaccagcaaccaggucgccgugcuguaccagggcgugaacugcaccgagguccccguggccauccacgccgaccagcugacgcccaccuggcggguguacuccaccggcagcaacgucuuccagacccgcgccgggugccucaucggcgcggagcacgugaacaacuccuacgagugcgacauccccaucggggccggcaucugcgccagcuaccagacgcagaccaacuccccgcggcgcgcccggagcguggcgucccagagcaucaucgccuacaccaugucccugggcgccgagaacagcgucgccuacuccaacaacagcaucgccauccccaccaacuucacgaucuccgugaccaccgagauccugcccgugagcaugaccaagacgagcgucgacugcaccauguacaucugcggggacuccaccgagugcagcaaccuccugcugcaguacggcuccuucugcacccagcucaaccgcgcgcugacggggaucgccguggagcaggacaagaacacccaggagguguucgcccaggucaagcagaucuacaagacgcccccgaucaaggacuucggcggguucaacuucagccagauccugcccgaccccuccaagcccagcaagcgguccuucaucgaggaccuccuguucaacaaggugacccuggccgacgccggcuucaucaagcaguacggcgacugccucggggacaucgcggcccgcgaccugaucugcgcccagaaguucaacggccugaccgugcucccgccccugcugaccgacgagaugaucgcccaguacaccagcgcccuccuggcggggaccaucacguccggcuggaccuucggggccggcgccgcccugcagauccccuucgcgaugcagauggccuaccgguucaacggcaucggggucacccagaacgugcucuacgagaaccagaagcugaucgccaaccaguucaacagcgccaucggcaagauccaggacucccugagcuccaccgccagcgcgcucgggaagcugcaggacguggucaaccagaacgcccaggcccugaacacgcucgugaagcagcuguccagcaacuucggcgccaucuccagcgugcugaacgacauccucucccgccuggacccgcccgaggccgaggugcagaucgaccggcugaucaccgggcgccuccagagccugcagaccuacgugacccagcagcugauccgggcggccgagauccgcgccagcgccaaccucgccgcgaccaagauguccgagugcguccugggccagagcaagcggguggacuucugcggcaagggguaccaccugauguccuucccccagagcgccccgcacggcguggucuuccuccacgugacguacguccccgcccaggagaagaacuucaccaccgcccccgcgaucugccacgacgggaaggcccacuucccccgcgagggcguguucguguccaacgggacccacugguucgucacgcagcggaacuucuacgagccgcagaucaucaccaccgacaacaccuucgugagcggcaacugcgacguggucaucggcaucgugaacaacacgguguacgacccccugcagcccgagcuggacuccuucaaggaggagcucgacaaguacuucaagaaccacaccagccccgacgucgaccugggggacaucuccggcaucaacgccagcguggugaacauccagaaggagaucgaccgccugaacgaggucgccaagaaccucaacgagucccugaucgaccugcaggagcucgggaaguacgagcaguacaucaaguggccgugguacaucuggcugggcuucaucgccggccugaucgcgaucgugauggugaccaucaugcucugcugcaugaccagcugcugcuccugccugaaggggugcugcagcugcggcuccugcugcaaguucgacgaggacgacagcgagcccguccugaagggggugaagcuccacuacacgugaggacuaguuauaagacugacuagcccgaugggccucccaacgggcccuccuccccuccuugcaccgagagaucuaaaaaaaaaaaaaaaaaaaaaaaaaaaaaaaaaaaaaaaaaaaaaaaaaaaaaaaaaaaaaaaaaaaaaaaaaaaaaaaaaaaaaaaaaaaaaaaaaaaa

SEQ ID NO: 25942 - RNA, 4011 nt, Artificial Sequence
  SARS-CoV-2/Wuhan/WIV05/2019__EPI_ISL_402128 spike protein mRNA gc (1-1273)(K986P_V987P_N501Y_D614G)
aggagaaagcuuaccauguucguguuccugguccuccugccccuggugagcucccagugcgugaaccucaccacccgcacgcagcugccgcccgccuacaccaacagcuucacccggggcgucuacuaccccgacaagguguuccgcuccagcgugcugcacuccacccaggaccucuuccugcccuucuucagcaacgucacgugguuccacgccauccacguguccgggaccaacggcaccaagcgguucgacaacccggugcugcccuucaacgacggggucuacuucgcgagcaccgagaaguccaacaucauccgcggcuggaucuucgggacgacccucgacagcaagacccagucccugcugaucgugaacaacgccaccaacguggucaucaaggugugcgaguuccaguucugcaacgaccccuuccucggcguguacuaccacaagaacaacaagagcuggauggaguccgaguuccgggucuacagcuccgccaacaacugcacguucgaguacgugagccagcccuuccugauggaccuggagggcaagcaggggaacuucaagaaccuccgcgaguucguguucaagaacaucgacggcuacuucaagaucuacuccaagcacaccccgaucaaccugguccgggaccugccccagggguucagcgcccucgagccccugguggaccugcccaucggcaucaacaucacccgcuuccagacccuccuggcccugcaccgguccuaccucacgccgggggacagcagcuccggcuggaccgcgggcgccgccgccuacuacgugggguaccugcagccccgcaccuuccugcucaaguacaacgagaacggcaccaucacggacgcggucgacugcgcccuggacccccugagcgagaccaagugcacccucaaguccuucaccguggagaaggggaucuaccagacgagcaacuuccgggugcagcccaccgaguccaucguccgcuucccgaacaucaccaaccugugccccuucggcgagguguucaacgccacccgguucgccagcgucuacgccuggaaccgcaagcggaucuccaacugcguggcggacuacagcgugcuguacaacuccgccagcuucuccacguucaagugcuacggcgucagccccaccaagcucaacgaccugugcuucaccaacguguacgccgacuccuucgugauccgcggggacgagguccggcagaucgcccccggccagaccgggaagaucgccgacuacaacuacaagcugccggacgacuucacgggcugcgugaucgcguggaacagcaacaaccucgacuccaaggucgggggcaacuacaacuaccuguaccgccuguuccgcaagagcaaccucaagcccuucgagcgggacaucuccaccgagaucuaccaggccggcagcacccccugcaacgggguggagggcuucaacugcuacuucccccugcaguccuacggguuccagccgaccuacggcgugggguaccagcccuaccggguggucgugcugagcuucgagcuccugcacgcccccgccacggugugcggccccaagaaguccaccaaccuggucaagaacaagugcgugaacuucaacuucaacggccucaccgggaccggcgugcugaccgagagcaacaagaaguuccugccguuccagcaguucgggcgcgacaucgccgacacgaccgacgcgguccgcgacccccagacccuggagauccucgacaucacccccugcagcuucggcgggguguccgugaucacgccgggcaccaacaccagcaaccaggucgccgugcuguaccagggcgugaacugcaccgagguccccguggccauccacgccgaccagcugacgcccaccuggcggguguacuccaccggcagcaacgucuuccagacccgcgccgggugccucaucggcgcggagcacgugaacaacuccuacgagugcgacauccccaucggggccggcaucugcgccagcuaccagacgcagaccaacuccccgcggcgcgcccggagcguggcgucccagagcaucaucgccuacaccaugucccugggcgccgagaacagcgucgccuacuccaacaacagcaucgccauccccaccaacuucacgaucuccgugaccaccgagauccugcccgugagcaugaccaagacgagcgucgacugcaccauguacaucugcggggacuccaccgagugcagcaaccuccugcugcaguacggcuccuucugcacccagcucaaccgcgcgcugacggggaucgccguggagcaggacaagaacacccaggagguguucgcccaggucaagcagaucuacaagacgcccccgaucaaggacuucggcggguucaacuucagccagauccugcccgaccccuccaagcccagcaagcgguccuucaucgaggaccuccuguucaacaaggugacccuggccgacgccggcuucaucaagcaguacggcgacugccucggggacaucgcggcccgcgaccugaucugcgcccagaaguucaacggccugaccgugcucccgccccugcugaccgacgagaugaucgcccaguacaccagcgcccuccuggcggggaccaucacguccggcuggaccuucggggccggcgccgcccugcagauccccuucgcgaugcagauggccuaccgguucaacggcaucggggucacccagaacgugcucuacgagaaccagaagcugaucgccaaccaguucaacagcgccaucggcaagauccaggacucccugagcuccaccgccagcgcgcucgggaagcugcaggacguggucaaccagaacgcccaggcccugaacacgcucgugaagcagcuguccagcaacuucggcgccaucuccagcgugcugaacgacauccucucccgccuggacccgcccgaggccgaggugcagaucgaccggcugaucaccgggcgccuccagagccugcagaccuacgugacccagcagcugauccgggcggccgagauccgcgccagcgccaaccucgccgcgaccaagauguccgagugcguccugggccagagcaagcggguggacuucugcggcaagggguaccaccugauguccuucccccagagcgccccgcacggcguggucuuccuccacgugacguacguccccgcccaggagaagaacuucaccaccgcccccgcgaucugccacgacgggaaggcccacuucccccgcgagggcguguucguguccaacgggacccacugguucgucacgcagcggaacuucuacgagccgcagaucaucaccaccgacaacaccuucgugagcggcaacugcgacguggucaucggcaucgugaacaacacgguguacgacccccugcagcccgagcuggacuccuucaaggaggagcucgacaaguacuucaagaaccacaccagccccgacgucgaccugggggacaucuccggcaucaacgccagcguggugaacauccagaaggagaucgaccgccugaacgaggucgccaagaaccucaacgagucccugaucgaccugcaggagcucgggaaguacgagcaguacaucaaguggccgugguacaucuggcugggcuucaucgccggccugaucgcgaucgugauggugaccaucaugcucugcugcaugaccagcugcugcuccugccugaaggggugcugcagcugcggcuccugcugcaaguucgacgaggacgacagcgagcccguccugaagggggugaagcuccacuacacgugaggacuaguuauaagacugacuagcccgaugggccucccaacgggcccuccuccccuccuugcaccgagagaucuaaaaaaaaaaaaaaaaaaaaaaaaaaaaaaaaaaaaaaaaaaaaaaaaaaaaaaaaaaaaaaaaaaaaaaaaaaaaaaaaaaaaaaaaaaaaaaaaaaaa

SEQ ID NO: 25943 - RNA, 4005 nt, Artificial Sequence
  SARS-CoV-2/Wuhan/WIV05/2019__EPI_ISL_402128 spike protein mRNA gc (1-1273)(K986P_V987P_H69del_V70del_D614G)
aggagaaagcuuaccauguucguguuccugguccuccugccccuggugagcucccagugcgugaaccucaccacccgcacgcagcugccgcccgccuacaccaacagcuucacccggggcgucuacuaccccgacaagguguuccgcuccagcgugcugcacuccacccaggaccucuuccugcccuucuucagcaacgucacgugguuccacgccaucuccgggaccaacggcaccaagcgguucgacaacccggugcugcccuucaacgacggggucuacuucgcgagcaccgagaaguccaacaucauccgcggcuggaucuucgggacgacccucgacagcaagacccagucccugcugaucgugaacaacgccaccaacguggucaucaaggugugcgaguuccaguucugcaacgaccccuuccucggcguguacuaccacaagaacaacaagagcuggauggaguccgaguuccgggucuacagcuccgccaacaacugcacguucgaguacgugagccagcccuuccugauggaccuggagggcaagcaggggaacuucaagaaccuccgcgaguucguguucaagaacaucgacggcuacuucaagaucuacuccaagcacaccccgaucaaccugguccgggaccugccccagggguucagcgcccucgagccccugguggaccugcccaucggcaucaacaucacccgcuuccagacccuccuggcccugcaccgguccuaccucacgccgggggacagcagcuccggcuggaccgcgggcgccgccgccuacuacgugggguaccugcagccccgcaccuuccugcucaaguacaacgagaacggcaccaucacggacgcggucgacugcgcccuggacccccugagcgagaccaagugcacccucaaguccuucaccguggagaaggggaucuaccagacgagcaacuuccgggugcagcccaccgaguccaucguccgcuucccgaacaucaccaaccugugccccuucggcgagguguucaacgccacccgguucgccagcgucuacgccuggaaccgcaagcggaucuccaacugcguggcggacuacagcgugcuguacaacuccgccagcuucuccacguucaagugcuacggcgucagccccaccaagcucaacgaccugugcuucaccaacguguacgccgacuccuucgugauccgcggggacgagguccggcagaucgcccccggccagaccgggaagaucgccgacuacaacuacaagcugccggacgacuucacgggcugcgugaucgcguggaacagcaacaaccucgacuccaaggucgggggcaacuacaacuaccuguaccgccuguuccgcaagagcaaccucaagcccuucgagcgggacaucuccaccgagaucuaccaggccggcagcacccccugcaacgggguggagggcuucaacugcuacuucccccugcaguccuacggguuccagccgaccaacggcgugggguaccagcccuaccggguggucgugcugagcuucgagcuccugcacgcccccgccacggugugcggccccaagaaguccaccaaccuggucaagaacaagugcgugaacuucaacuucaacggccucaccgggaccggcgugcugaccgagagcaacaagaaguuccugccguuccagcaguucgggcgcgacaucgccgacacgaccgacgcgguccgcgacccccagacccuggagauccucgacaucacccccugcagcuucggcgggguguccgugaucacgccgggcaccaacaccagcaaccaggucgccgugcuguaccagggcgugaacugcaccgagguccccguggccauccacgccgaccagcugacgcccaccuggcggguguacuccaccggcagcaacgucuuccagacccgcgccgggugccucaucggcgcggagcacgugaacaacuccuacgagugcgacauccccaucggggccggcaucugcgccagcuaccagacgcagaccaacuccccgcggcgcgcccggagcguggcgucccagagcaucaucgccuacaccaugucccugggcgccgagaacagcgucgccuacuccaacaacagcaucgccauccccaccaacuucacgaucuccgugaccaccgagauccugcccgugagcaugaccaagacgagcgucgacugcaccauguacaucugcggggacuccaccgagugcagcaaccuccugcugcaguacggcuccuucugcacccagcucaaccgcgcgcugacggggaucgccguggagcaggacaagaacacccaggagguguucgcccaggucaagcagaucuacaagacgcccccgaucaaggacuucggcggguucaacuucagccagauccugcccgaccccuccaagcccagcaagcgguccuucaucgaggaccuccuguucaacaaggugacccuggccgacgccggcuucaucaagcaguacggcgacugccucggggacaucgcggcccgcgaccugaucugcgcccagaaguucaacggccugaccgugcucccgccccugcugaccgacgagaugaucgcccaguacaccagcgcccuccuggcggggaccaucacguccggcuggaccuucggggccggcgccgcccugcagauccccuucgcgaugcagauggccuaccgguucaacggcaucggggucacccagaacgugcucuacgagaaccagaagcugaucgccaaccaguucaacagcgccaucggcaagauccaggacucccugagcuccaccgccagcgcgcucgggaagcugcaggacguggucaaccagaacgcccaggcccugaacacgcucgugaagcagcuguccagcaacuucggcgccaucuccagcgugcugaacgacauccucucccgccuggacccgcccgaggccgaggugcagaucgaccggcugaucaccgggcgccuccagagccugcagaccuacgugacccagcagcugauccgggcggccgagauccgcgccagcgccaaccucgccgcgaccaagauguccgagugcguccugggccagagcaagcggguggacuucugcggcaagggguaccaccugauguccuucccccagagcgccccgcacggcguggucuuccuccacgugacguacguccccgcccaggagaagaacuucaccaccgcccccgcgaucugccacgacgggaaggcccacuucccccgcgagggcguguucguguccaacgggacccacugguucgucacgcagcggaacuucuacgagccgcagaucaucaccaccgacaacaccuucgugagcggcaacugcgacguggucaucggcaucgugaacaacacgguguacgacccccugcagcccgagcuggacuccuucaaggaggagcucgacaaguacuucaagaaccacaccagccccgacgucgaccugggggacaucuccggcaucaacgccagcguggugaacauccagaaggagaucgaccgccugaacgaggucgccaagaaccucaacgagucccugaucgaccugcaggagcucgggaaguacgagcaguacaucaaguggccgugguacaucuggcugggcuucaucgccggccugaucgcgaucgugauggugaccaucaugcucugcugcaugaccagcugcugcuccugccugaaggggugcugcagcugcggcuccugcugcaaguucgacgaggacgacagcgagcccguccugaagggggugaagcuccacuacacgugaggacuaguuauaagacugacuagcccgaugggccucccaacgggcccuccuccccuccuugcaccgagagaucuaaaaaaaaaaaaaaaaaaaaaaaaaaaaaaaaaaaaaaaaaaaaaaaaaaaaaaaaaaaaaaaaaaaaaaaaaaaaaaaaaaaaaaaaaaaaaaaaaaaa

SEQ ID NO: 25944 - RNA, 4011 nt, Artificial Sequence
  SARS-CoV-2/Wuhan/WIV05/2019__EPI_ISL_402128 spike protein mRNA gc (1-1273)(K986P_V987P_Y453F_D614G)
aggagaaagcuuaccauguucguguuccugguccuccugccccuggugagcucccagugcgugaaccucaccacccgcacgcagcugccgcccgccuacaccaacagcuucacccggggcgucuacuaccccgacaagguguuccgcuccagcgugcugcacuccacccaggaccucuuccugcccuucuucagcaacgucacgugguuccacgccauccacguguccgggaccaacggcaccaagcgguucgacaacccggugcugcccuucaacgacggggucuacuucgcgagcaccgagaaguccaacaucauccgcggcuggaucuucgggacgacccucgacagcaagacccagucccugcugaucgugaacaacgccaccaacguggucaucaaggugugcgaguuccaguucugcaacgaccccuuccucggcguguacuaccacaagaacaacaagagcuggauggaguccgaguuccgggucuacagcuccgccaacaacugcacguucgaguacgugagccagcccuuccugauggaccuggagggcaagcaggggaacuucaagaaccuccgcgaguucguguucaagaacaucgacggcuacuucaagaucuacuccaagcacaccccgaucaaccugguccgggaccugccccagggguucagcgcccucgagccccugguggaccugcccaucggcaucaacaucacccgcuuccagacccuccuggcccugcaccgguccuaccucacgccgggggacagcagcuccggcuggaccgcgggcgccgccgccuacuacgugggguaccugcagccccgcaccuuccugcucaaguacaacgagaacggcaccaucacggacgcggucgacugcgcccuggacccccugagcgagaccaagugcacccucaaguccuucaccguggagaaggggaucuaccagacgagcaacuuccgggugcagcccaccgaguccaucguccgcuucccgaacaucaccaaccugugccccuucggcgagguguucaacgccacccgguucgccagcgucuacgccuggaaccgcaagcggaucuccaacugcguggcggacuacagcgugcuguacaacuccgccagcuucuccacguucaagugcuacggcgucagccccaccaagcucaacgaccugugcuucaccaacguguacgccgacuccuucgugauccgcggggacgagguccggcagaucgcccccggccagaccgggaagaucgccgacuacaacuacaagcugccggacgacuucacgggcugcgugaucgcguggaacagcaacaaccucgacuccaaggucgggggcaacuacaacuaccuguuccgccuguuccgcaagagcaaccucaagcccuucgagcgggacaucuccaccgagaucuaccaggccggcagcacccccugcaacgggguggagggcuucaacugcuacuucccccugcaguccuacggguuccagccgaccaacggcgugggguaccagcccuaccggguggucgugcugagcuucgagcuccugcacgcccccgccacggugugcggccccaagaaguccaccaaccuggucaagaacaagugcgugaacuucaacuucaacggccucaccgggaccggcgugcugaccgagagcaacaagaaguuccugccguuccagcaguucgggcgcgacaucgccgacacgaccgacgcgguccgcgacccccagacccuggagauccucgacaucacccccugcagcuucggcgggguguccgugaucacgccgggcaccaacaccagcaaccaggucgccgugcuguaccagggcgugaacugcaccgagguccccguggccauccacgccgaccagcugacgcccaccuggcggguguacuccaccggcagcaacgucuuccagacccgcgccgggugccucaucggcgcggagcacgugaacaacuccuacgagugcgacauccccaucggggccggcaucugcgccagcuaccagacgcagaccaacuccccgcggcgcgcccggagcguggcgucccagagcaucaucgccuacaccaugucccugggcgccgagaacagcgucgccuacuccaacaacagcaucgccauccccaccaacuucacgaucuccgugaccaccgagauccugcccgugagcaugaccaagacgagcgucgacugcaccauguacaucugcggggacuccaccgagugcagcaaccuccugcugcaguacggcuccuucugcacccagcucaaccgcgcgcugacggggaucgccguggagcaggacaagaacacccaggagguguucgcccaggucaagcagaucuacaagacgcccccgaucaaggacuucggcggguucaacuucagccagauccugcccgaccccuccaagcccagcaagcgguccuucaucgaggaccuccuguucaacaaggugacccuggccgacgccggcuucaucaagcaguacggcgacugccucggggacaucgcggcccgcgaccugaucugcgcccagaaguucaacggccugaccgugcucccgccccugcugaccgacgagaugaucgcccaguacaccagcgcccuccuggcggggaccaucacguccggcuggaccuucggggccggcgccgcccugcagauccccuucgcgaugcagauggccuaccgguucaacggcaucggggucacccagaacgugcucuacgagaaccagaagcugaucgccaaccaguucaacagcgccaucggcaagauccaggacucccugagcuccaccgccagcgcgcucgggaagcugcaggacguggucaaccagaacgcccaggcccugaacacgcucgugaagcagcuguccagcaacuucggcgccaucuccagcgugcugaacgacauccucucccgccuggacccgcccgaggccgaggugcagaucgaccggcugaucaccgggcgccuccagagccugcagaccuacgugacccagcagcugauccgggcggccgagauccgcgccagcgccaaccucgccgcgaccaagauguccgagugcguccugggccagagcaagcggguggacuucugcggcaagggguaccaccugauguccuucccccagagcgccccgcacggcguggucuuccuccacgugacguacguccccgcccaggagaagaacuucaccaccgcccccgcgaucugccacgacgggaaggcccacuucccccgcgagggcguguucguguccaacgggacccacugguucgucacgcagcggaacuucuacgagccgcagaucaucaccaccgacaacaccuucgugagcggcaacugcgacguggucaucggcaucgugaacaacacgguguacgacccccugcagcccgagcuggacuccuucaaggaggagcucgacaaguacuucaagaaccacaccagccccgacgucgaccugggggacaucuccggcaucaacgccagcguggugaacauccagaaggagaucgaccgccugaacgaggucgccaagaaccucaacgagucccugaucgaccugcaggagcucgggaaguacgagcaguacaucaaguggccgugguacaucuggcugggcuucaucgccggccugaucgcgaucgugauggugaccaucaugcucugcugcaugaccagcugcugcuccugccugaaggggugcugcagcugcggcuccugcugcaaguucgacgaggacgacagcgagcccguccugaagggggugaagcuccacuacacgugaggacuaguuauaagacugacuagcccgaugggccucccaacgggcccuccuccccuccuugcaccgagagaucuaaaaaaaaaaaaaaaaaaaaaaaaaaaaaaaaaaaaaaaaaaaaaaaaaaaaaaaaaaaaaaaaaaaaaaaaaaaaaaaaaaaaaaaaaaaaaaaaaaaa

SEQ ID NO: 25945 - RNA, 4011 nt, Artificial Sequence
  SARS-CoV-2/Wuhan/WIV05/2019__EPI_ISL_402128 spike protein mRNA gc (1-1273)(K986P_V987P_D614G_I692V)
aggagaaagcuuaccauguucguguuccugguccuccugccccuggugagcucccagugcgugaaccucaccacccgcacgcagcugccgcccgccuacaccaacagcuucacccggggcgucuacuaccccgacaagguguuccgcuccagcgugcugcacuccacccaggaccucuuccugcccuucuucagcaacgucacgugguuccacgccauccacguguccgggaccaacggcaccaagcgguucgacaacccggugcugcccuucaacgacggggucuacuucgcgagcaccgagaaguccaacaucauccgcggcuggaucuucgggacgacccucgacagcaagacccagucccugcugaucgugaacaacgccaccaacguggucaucaaggugugcgaguuccaguucugcaacgaccccuuccucggcguguacuaccacaagaacaacaagagcuggauggaguccgaguuccgggucuacagcuccgccaacaacugcacguucgaguacgugagccagcccuuccugauggaccuggagggcaagcaggggaacuucaagaaccuccgcgaguucguguucaagaacaucgacggcuacuucaagaucuacuccaagcacaccccgaucaaccugguccgggaccugccccagggguucagcgcccucgagccccugguggaccugcccaucggcaucaacaucacccgcuuccagacccuccuggcccugcaccgguccuaccucacgccgggggacagcagcuccggcuggaccgcgggcgccgccgccuacuacgugggguaccugcagccccgcaccuuccugcucaaguacaacgagaacggcaccaucacggacgcggucgacugcgcccuggacccccugagcgagaccaagugcacccucaaguccuucaccguggagaaggggaucuaccagacgagcaacuuccgggugcagcccaccgaguccaucguccgcuucccgaacaucaccaaccugugccccuucggcgagguguucaacgccacccgguucgccagcgucuacgccuggaaccgcaagcggaucuccaacugcguggcggacuacagcgugcuguacaacuccgccagcuucuccacguucaagugcuacggcgucagccccaccaagcucaacgaccugugcuucaccaacguguacgccgacuccuucgugauccgcggggacgagguccggcagaucgcccccggccagaccgggaagaucgccgacuacaacuacaagcugccggacgacuucacgggcugcgugaucgcguggaacagcaacaaccucgacuccaaggucgggggcaacuacaacuaccuguaccgccuguuccgcaagagcaaccucaagcccuucgagcgggacaucuccaccgagaucuaccaggccggcagcacccccugcaacgggguggagggcuucaacugcuacuucccccugcaguccuacggguuccagccgaccaacggcgugggguaccagcccuaccggguggucgugcugagcuucgagcuccugcacgcccccgccacggugugcggccccaagaaguccaccaaccuggucaagaacaagugcgugaacuucaacuucaacggccucaccgggaccggcgugcugaccgagagcaacaagaaguuccugccguuccagcaguucgggcgcgacaucgccgacacgaccgacgcgguccgcgacccccagacccuggagauccucgacaucacccccugcagcuucggcgggguguccgugaucacgccgggcaccaacaccagcaaccaggucgccgugcuguaccagggcgugaacugcaccgagguccccguggccauccacgccgaccagcugacgcccaccuggcggguguacuccaccggcagcaacgucuuccagacccgcgccgggugccucaucggcgcggagcacgugaacaacuccuacgagugcgacauccccaucggggccggcaucugcgccagcuaccagacgcagaccaacuccccgcggcgcgcccggagcguggcgucccagagcgucaucgccuacaccaugucccugggcgccgagaacagcgucgccuacuccaacaacagcaucgccauccccaccaacuucacgaucuccgugaccaccgagauccugcccgugagcaugaccaagacgagcgucgacugcaccauguacaucugcggggacuccaccgagugcagcaaccuccugcugcaguacggcuccuucugcacccagcucaaccgcgcgcugacggggaucgccguggagcaggacaagaacacccaggagguguucgcccaggucaagcagaucuacaagacgcccccgaucaaggacuucggcggguucaacuucagccagauccugcccgaccccuccaagcccagcaagcgguccuucaucgaggaccuccuguucaacaaggugacccuggccgacgccggcuucaucaagcaguacggcgacugccucggggacaucgcggcccgcgaccugaucugcgcccagaaguucaacggccugaccgugcucccgccccugcugaccgacgagaugaucgcccaguacaccagcgcccuccuggcggggaccaucacguccggcuggaccuucggggccggcgccgcccugcagauccccuucgcgaugcagauggccuaccgguucaacggcaucggggucacccagaacgugcucuacgagaaccagaagcugaucgccaaccaguucaacagcgccaucggcaagauccaggacucccugagcuccaccgccagcgcgcucgggaagcugcaggacguggucaaccagaacgcccaggcccugaacacgcucgugaagcagcuguccagcaacuucggcgccaucuccagcgugcugaacgacauccucucccgccuggacccgcccgaggccgaggugcagaucgaccggcugaucaccgggcgccuccagagccugcagaccuacgugacccagcagcugauccgggcggccgagauccgcgccagcgccaaccucgccgcgaccaagauguccgagugcguccugggccagagcaagcggguggacuucugcggcaagggguaccaccugauguccuucccccagagcgccccgcacggcguggucuuccuccacgugacguacguccccgcccaggagaagaacuucaccaccgcccccgcgaucugccacgacgggaaggcccacuucccccgcgagggcguguucguguccaacgggacccacugguucgucacgcagcggaacuucuacgagccgcagaucaucaccaccgacaacaccuucgugagcggcaacugcgacguggucaucggcaucgugaacaacacgguguacgacccccugcagcccgagcuggacuccuucaaggaggagcucgacaaguacuucaagaaccacaccagccccgacgucgaccugggggacaucuccggcaucaacgccagcguggugaacauccagaaggagaucgaccgccugaacgaggucgccaagaaccucaacgagucccugaucgaccugcaggagcucgggaaguacgagcaguacaucaaguggccgugguacaucuggcugggcuucaucgccggccugaucgcgaucgugauggugaccaucaugcucugcugcaugaccagcugcugcuccugccugaaggggugcugcagcugcggcuccugcugcaaguucgacgaggacgacagcgagcccguccugaagggggugaagcuccacuacacgugaggacuaguuauaagacugacuagcccgaugggccucccaacgggcccuccuccccuccuugcaccgagagaucuaaaaaaaaaaaaaaaaaaaaaaaaaaaaaaaaaaaaaaaaaaaaaaaaaaaaaaaaaaaaaaaaaaaaaaaaaaaaaaaaaaaaaaaaaaaaaaaaaaaa

SEQ ID NO: 25946 - RNA, 4011 nt, Artificial Sequence
  SARS-CoV-2/Wuhan/WIV05/2019__EPI_ISL_402128 spike protein mRNA gc (1-1273)(K986P_V987P_D614G_M1229I)
aggagaaagcuuaccauguucguguuccugguccuccugccccuggugagcucccagugcgugaaccucaccacccgcacgcagcugccgcccgccuacaccaacagcuucacccggggcgucuacuaccccgacaagguguuccgcuccagcgugcugcacuccacccaggaccucuuccugcccuucuucagcaacgucacgugguuccacgccauccacguguccgggaccaacggcaccaagcgguucgacaacccggugcugcccuucaacgacggggucuacuucgcgagcaccgagaaguccaacaucauccgcggcuggaucuucgggacgacccucgacagcaagacccagucccugcugaucgugaacaacgccaccaacguggucaucaaggugugcgaguuccaguucugcaacgaccccuuccucggcguguacuaccacaagaacaacaagagcuggauggaguccgaguuccgggucuacagcuccgccaacaacugcacguucgaguacgugagccagcccuuccugauggaccuggagggcaagcaggggaacuucaagaaccuccgcgaguucguguucaagaacaucgacggcuacuucaagaucuacuccaagcacaccccgaucaaccugguccgggaccugccccagggguucagcgcccucgagccccugguggaccugcccaucggcaucaacaucacccgcuuccagacccuccuggcccugcaccgguccuaccucacgccgggggacagcagcuccggcuggaccgcgggcgccgccgccuacuacgugggguaccugcagccccgcaccuuccugcucaaguacaacgagaacggcaccaucacggacgcggucgacugcgcccuggacccccugagcgagaccaagugcacccucaaguccuucaccguggagaaggggaucuaccagacgagcaacuuccgggugcagcccaccgaguccaucguccgcuucccgaacaucaccaaccugugccccuucggcgagguguucaacgccacccgguucgccagcgucuacgccuggaaccgcaagcggaucuccaacugcguggcggacuacagcgugcuguacaacuccgccagcuucuccacguucaagugcuacggcgucagccccaccaagcucaacgaccugugcuucaccaacguguacgccgacuccuucgugauccgcggggacgagguccggcagaucgcccccggccagaccgggaagaucgccgacuacaacuacaagcugccggacgacuucacgggcugcgugaucgcguggaacagcaacaaccucgacuccaaggucgggggcaacuacaacuaccuguaccgccuguuccgcaagagcaaccucaagcccuucgagcgggacaucuccaccgagaucuaccaggccggcagcacccccugcaacgggguggagggcuucaacugcuacuucccccugcaguccuacggguuccagccgaccaacggcgugggguaccagcccuaccggguggucgugcugagcuucgagcuccugcacgcccccgccacggugugcggccccaagaaguccaccaaccuggucaagaacaagugcgugaacuucaacuucaacggccucaccgggaccggcgugcugaccgagagcaacaagaaguuccugccguuccagcaguucgggcgcgacaucgccgacacgaccgacgcgguccgcgacccccagacccuggagauccucgacaucacccccugcagcuucggcgggguguccgugaucacgccgggcaccaacaccagcaaccaggucgccgugcuguaccagggcgugaacugcaccgagguccccguggccauccacgccgaccagcugacgcccaccuggcggguguacuccaccggcagcaacgucuuccagacccgcgccgggugccucaucggcgcggagcacgugaacaacuccuacgagugcgacauccccaucggggccggcaucugcgccagcuaccagacgcagaccaacuccccgcggcgcgcccggagcguggcgucccagagcaucaucgccuacaccaugucccugggcgccgagaacagcgucgccuacuccaacaacagcaucgccauccccaccaacuucacgaucuccgugaccaccgagauccugcccgugagcaugaccaagacgagcgucgacugcaccauguacaucugcggggacuccaccgagugcagcaaccuccugcugcaguacggcuccuucugcacccagcucaaccgcgcgcugacggggaucgccguggagcaggacaagaacacccaggagguguucgcccaggucaagcagaucuacaagacgcccccgaucaaggacuucggcggguucaacuucagccagauccugcccgaccccuccaagcccagcaagcgguccuucaucgaggaccuccuguucaacaaggugacccuggccgacgccggcuucaucaagcaguacggcgacugccucggggacaucgcggcccgcgaccugaucugcgcccagaaguucaacggccugaccgugcucccgccccugcugaccgacgagaugaucgcccaguacaccagcgcccuccuggcggggaccaucacguccggcuggaccuucggggccggcgccgcccugcagauccccuucgcgaugcagauggccuaccgguucaacggcaucggggucacccagaacgugcucuacgagaaccagaagcugaucgccaaccaguucaacagcgccaucggcaagauccaggacucccugagcuccaccgccagcgcgcucgggaagcugcaggacguggucaaccagaacgcccaggcccugaacacgcucgugaagcagcuguccagcaacuucggcgccaucuccagcgugcugaacgacauccucucccgccuggacccgcccgaggccgaggugcagaucgaccggcugaucaccgggcgccuccagagccugcagaccuacgugacccagcagcugauccgggcggccgagauccgcgccagcgccaaccucgccgcgaccaagauguccgagugcguccugggccagagcaagcggguggacuucugcggcaagggguaccaccugauguccuucccccagagcgccccgcacggcguggucuuccuccacgugacguacguccccgcccaggagaagaacuucaccaccgcccccgcgaucugccacgacgggaaggcccacuucccccgcgagggcguguucguguccaacgggacccacugguucgucacgcagcggaacuucuacgagccgcagaucaucaccaccgacaacaccuucgugagcggcaacugcgacguggucaucggcaucgugaacaacacgguguacgacccccugcagcccgagcuggacuccuucaaggaggagcucgacaaguacuucaagaaccacaccagccccgacgucgaccugggggacaucuccggcaucaacgccagcguggugaacauccagaaggagaucgaccgccugaacgaggucgccaagaaccucaacgagucccugaucgaccugcaggagcucgggaaguacgagcaguacaucaaguggccgugguacaucuggcugggcuucaucgccggccugaucgcgaucgugaucgugaccaucaugcucugcugcaugaccagcugcugcuccugccugaaggggugcugcagcugcggcuccugcugcaaguucgacgaggacgacagcgagcccguccugaagggggugaagcuccacuacacgugaggacuaguuauaagacugacuagcccgaugggccucccaacgggcccuccuccccuccuugcaccgagagaucuaaaaaaaaaaaaaaaaaaaaaaaaaaaaaaaaaaaaaaaaaaaaaaaaaaaaaaaaaaaaaaaaaaaaaaaaaaaaaaaaaaaaaaaaaaaaaaaaaaaa

SEQ ID NO: 25947 - RNA, 4005 nt, Artificial Sequence
  SARS-CoV-2/Wuhan/WIV05/2019__EPI_ISL_402128 spike protein mRNA gc (1-1273)(K986P_V987P_H69del_V70del_A222V_Y453F_S477N_D614G_I692V)
aggagaaagcuuaccauguucguguuccugguccuccugccccuggugagcucccagugcgugaaccucaccacccgcacgcagcugccgcccgccuacaccaacagcuucacccggggcgucuacuaccccgacaagguguuccgcuccagcgugcugcacuccacccaggaccucuuccugcccuucuucagcaacgucacgugguuccacgccaucuccgggaccaacggcaccaagcgguucgacaacccggugcugcccuucaacgacggggucuacuucgcgagcaccgagaaguccaacaucauccgcggcuggaucuucgggacgacccucgacagcaagacccagucccugcugaucgugaacaacgccaccaacguggucaucaaggugugcgaguuccaguucugcaacgaccccuuccucggcguguacuaccacaagaacaacaagagcuggauggaguccgaguuccgggucuacagcuccgccaacaacugcacguucgaguacgugagccagcccuuccugauggaccuggagggcaagcaggggaacuucaagaaccuccgcgaguucguguucaagaacaucgacggcuacuucaagaucuacuccaagcacaccccgaucaaccugguccgggaccugccccagggguucagcguccucgagccccugguggaccugcccaucggcaucaacaucacccgcuuccagacccuccuggcccugcaccgguccuaccucacgccgggggacagcagcuccggcuggaccgcgggcgccgccgccuacuacgugggguaccugcagccccgcaccuuccugcucaaguacaacgagaacggcaccaucacggacgcggucgacugcgcccuggacccccugagcgagaccaagugcacccucaaguccuucaccguggagaaggggaucuaccagacgagcaacuuccgggugcagcccaccgaguccaucguccgcuucccgaacaucaccaaccugugccccuucggcgagguguucaacgccacccgguucgccagcgucuacgccuggaaccgcaagcggaucuccaacugcguggcggacuacagcgugcuguacaacuccgccagcuucuccacguucaagugcuacggcgucagccccaccaagcucaacgaccugugcuucaccaacguguacgccgacuccuucgugauccgcggggacgagguccggcagaucgcccccggccagaccgggaagaucgccgacuacaacuacaagcugccggacgacuucacgggcugcgugaucgcguggaacagcaacaaccucgacuccaaggucgggggcaacuacaacuaccuguuccgccuguuccgcaagagcaaccucaagcccuucgagcgggacaucuccaccgagaucuaccaggccggcaacacccccugcaacgggguggagggcuucaacugcuacuucccccugcaguccuacggguuccagccgaccaacggcgugggguaccagcccuaccggguggucgugcugagcuucgagcuccugcacgcccccgccacggugugcggccccaagaaguccaccaaccuggucaagaacaagugcgugaacuucaacuucaacggccucaccgggaccggcgugcugaccgagagcaacaagaaguuccugccguuccagcaguucgggcgcgacaucgccgacacgaccgacgcgguccgcgacccccagacccuggagauccucgacaucacccccugcagcuucggcgggguguccgugaucacgccgggcaccaacaccagcaaccaggucgccgugcuguaccagggcgugaacugcaccgagguccccguggccauccacgccgaccagcugacgcccaccuggcggguguacuccaccggcagcaacgucuuccagacccgcgccgggugccucaucggcgcggagcacgugaacaacuccuacgagugcgacauccccaucggggccggcaucugcgccagcuaccagacgcagaccaacuccccgcggcgcgcccggagcguggcgucccagagcgucaucgccuacaccaugucccugggcgccgagaacagcgucgccuacuccaacaacagcaucgccauccccaccaacuucacgaucuccgugaccaccgagauccugcccgugagcaugaccaagacgagcgucgacugcaccauguacaucugcggggacuccaccgagugcagcaaccuccugcugcaguacggcuccuucugcacccagcucaaccgcgcgcugacggggaucgccguggagcaggacaagaacacccaggagguguucgcccaggucaagcagaucuacaagacgcccccgaucaaggacuucggcggguucaacuucagccagauccugcccgaccccuccaagcccagcaagcgguccuucaucgaggaccuccuguucaacaaggugacccuggccgacgccggcuucaucaagcaguacggcgacugccucggggacaucgcggcccgcgaccugaucugcgcccagaaguucaacggccugaccgugcucccgccccugcugaccgacgagaugaucgcccaguacaccagcgcccuccuggcggggaccaucacguccggcuggaccuucggggccggcgccgcccugcagauccccuucgcgaugcagauggccuaccgguucaacggcaucggggucacccagaacgugcucuacgagaaccagaagcugaucgccaaccaguucaacagcgccaucggcaagauccaggacucccugagcuccaccgccagcgcgcucgggaagcugcaggacguggucaaccagaacgcccaggcccugaacacgcucgugaagcagcuguccagcaacuucggcgccaucuccagcgugcugaacgacauccucucccgccuggacccgcccgaggccgaggugcagaucgaccggcugaucaccgggcgccuccagagccugcagaccuacgugacccagcagcugauccgggcggccgagauccgcgccagcgccaaccucgccgcgaccaagauguccgagugcguccugggccagagcaagcggguggacuucugcggcaagggguaccaccugauguccuucccccagagcgccccgcacggcguggucuuccuccacgugacguacguccccgcccaggagaagaacuucaccaccgcccccgcgaucugccacgacgggaaggcccacuucccccgcgagggcguguucguguccaacgggacccacugguucgucacgcagcggaacuucuacgagccgcagaucaucaccaccgacaacaccuucgugagcggcaacugcgacguggucaucggcaucgugaacaacacgguguacgacccccugcagcccgagcuggacuccuucaaggaggagcucgacaaguacuucaagaaccacaccagccccgacgucgaccugggggacaucuccggcaucaacgccagcguggugaacauccagaaggagaucgaccgccugaacgaggucgccaagaaccucaacgagucccugaucgaccugcaggagcucgggaaguacgagcaguacaucaaguggccgugguacaucuggcugggcuucaucgccggccugaucgcgaucgugauggugaccaucaugcucugcugcaugaccagcugcugcuccugccugaaggggugcugcagcugcggcuccugcugcaaguucgacgaggacgacagcgagcccguccugaagggggugaagcuccacuacacgugaggacuaguuauaagacugacuagcccgaugggccucccaacgggcccuccuccccuccuugcaccgagagaucuaaaaaaaaaaaaaaaaaaaaaaaaaaaaaaaaaaaaaaaaaaaaaaaaaaaaaaaaaaaaaaaaaaaaaaaaaaaaaaaaaaaaaaaaaaaaaaaaaaaa

SEQ ID NO: 25948 - RNA, 4005 nt, Artificial Sequence
  SARS-CoV-2/Wuhan/WIV05/2019__EPI_ISL_402128 spike protein mRNA gc (1-1273)(K986P_V987P_H69del_V70del_Y453F_D614G_I692V_M1229I)
aggagaaagcuuaccauguucguguuccugguccuccugccccuggugagcucccagugcgugaaccucaccacccgcacgcagcugccgcccgccuacaccaacagcuucacccggggcgucuacuaccccgacaagguguuccgcuccagcgugcugcacuccacccaggaccucuuccugcccuucuucagcaacgucacgugguuccacgccaucuccgggaccaacggcaccaagcgguucgacaacccggugcugcccuucaacgacggggucuacuucgcgagcaccgagaaguccaacaucauccgcggcuggaucuucgggacgacccucgacagcaagacccagucccugcugaucgugaacaacgccaccaacguggucaucaaggugugcgaguuccaguucugcaacgaccccuuccucggcguguacuaccacaagaacaacaagagcuggauggaguccgaguuccgggucuacagcuccgccaacaacugcacguucgaguacgugagccagcccuuccugauggaccuggagggcaagcaggggaacuucaagaaccuccgcgaguucguguucaagaacaucgacggcuacuucaagaucuacuccaagcacaccccgaucaaccugguccgggaccugccccagggguucagcgcccucgagccccugguggaccugcccaucggcaucaacaucacccgcuuccagacccuccuggcccugcaccgguccuaccucacgccgggggacagcagcuccggcuggaccgcgggcgccgccgccuacuacgugggguaccugcagccccgcaccuuccugcucaaguacaacgagaacggcaccaucacggacgcggucgacugcgcccuggacccccugagcgagaccaagugcacccucaaguccuucaccguggagaaggggaucuaccagacgagcaacuuccgggugcagcccaccgaguccaucguccgcuucccgaacaucaccaaccugugccccuucggcgagguguucaacgccacccgguucgccagcgucuacgccuggaaccgcaagcggaucuccaacugcguggcggacuacagcgugcuguacaacuccgccagcuucuccacguucaagugcuacggcgucagccccaccaagcucaacgaccugugcuucaccaacguguacgccgacuccuucgugauccgcggggacgagguccggcagaucgcccccggccagaccgggaagaucgccgacuacaacuacaagcugccggacgacuucacgggcugcgugaucgcguggaacagcaacaaccucgacuccaaggucgggggcaacuacaacuaccuguuccgccuguuccgcaagagcaaccucaagcccuucgagcgggacaucuccaccgagaucuaccaggccggcagcacccccugcaacgggguggagggcuucaacugcuacuucccccugcaguccuacggguuccagccgaccaacggcgugggguaccagcccuaccggguggucgugcugagcuucgagcuccugcacgcccccgccacggugugcggccccaagaaguccaccaaccuggucaagaacaagugcgugaacuucaacuucaacggccucaccgggaccggcgugcugaccgagagcaacaagaaguuccugccguuccagcaguucgggcgcgacaucgccgacacgaccgacgcgguccgcgacccccagacccuggagauccucgacaucacccccugcagcuucggcgggguguccgugaucacgccgggcaccaacaccagcaaccaggucgccgugcuguaccagggcgugaacugcaccgagguccccguggccauccacgccgaccagcugacgcccaccuggcggguguacuccaccggcagcaacgucuuccagacccgcgccgggugccucaucggcgcggagcacgugaacaacuccuacgagugcgacauccccaucggggccggcaucugcgccagcuaccagacgcagaccaacuccccgcggcgcgcccggagcguggcgucccagagcgugaucgccuacaccaugucccugggcgccgagaacagcgucgccuacuccaacaacagcaucgccauccccaccaacuucacgaucuccgugaccaccgagauccugcccgugagcaugaccaagacgagcgucgacugcaccauguacaucugcggggacuccaccgagugcagcaaccuccugcugcaguacggcuccuucugcacccagcucaaccgcgcgcugacggggaucgccguggagcaggacaagaacacccaggagguguucgcccaggucaagcagaucuacaagacgcccccgaucaaggacuucggcggguucaacuucagccagauccugcccgaccccuccaagcccagcaagcgguccuucaucgaggaccuccuguucaacaaggugacccuggccgacgccggcuucaucaagcaguacggcgacugccucggggacaucgcggcccgcgaccugaucugcgcccagaaguucaacggccugaccgugcucccgccccugcugaccgacgagaugaucgcccaguacaccagcgcccuccuggcggggaccaucacguccggcuggaccuucggggccggcgccgcccugcagauccccuucgcgaugcagauggccuaccgguucaacggcaucggggucacccagaacgugcucuacgagaaccagaagcugaucgccaaccaguucaacagcgccaucggcaagauccaggacucccugagcuccaccgccagcgcgcucgggaagcugcaggacguggucaaccagaacgcccaggcccugaacacgcucgugaagcagcuguccagcaacuucggcgccaucuccagcgugcugaacgacauccucucccgccuggacccgcccgaggccgaggugcagaucgaccggcugaucaccgggcgccuccagagccugcagaccuacgugacccagcagcugauccgggcggccgagauccgcgccagcgccaaccucgccgcgaccaagauguccgagugcguccugggccagagcaagcggguggacuucugcggcaagggguaccaccugauguccuucccccagagcgccccgcacggcguggucuuccuccacgugacguacguccccgcccaggagaagaacuucaccaccgcccccgcgaucugccacgacgggaaggcccacuucccccgcgagggcguguucguguccaacgggacccacugguucgucacgcagcggaacuucuacgagccgcagaucaucaccaccgacaacaccuucgugagcggcaacugcgacguggucaucggcaucgugaacaacacgguguacgacccccugcagcccgagcuggacuccuucaaggaggagcucgacaaguacuucaagaaccacaccagccccgacgucgaccugggggacaucuccggcaucaacgccagcguggugaacauccagaaggagaucgaccgccugaacgaggucgccaagaaccucaacgagucccugaucgaccugcaggagcucgggaaguacgagcaguacaucaaguggccgugguacaucuggcugggcuucaucgccggccugaucgcgaucgugaucgugaccaucaugcucugcugcaugaccagcugcugcuccugccugaaggggugcugcagcugcggcuccugcugcaaguucgacgaggacgacagcgagcccguccugaagggggugaagcuccacuacacgugaggacuaguuauaagacugacuagcccgaugggccucccaacgggcccuccuccccuccuugcaccgagagaucuaaaaaaaaaaaaaaaaaaaaaaaaaaaaaaaaaaaaaaaaaaaaaaaaaaaaaaaaaaaaaaaaaaaaaaaaaaaaaaaaaaaaaaaaaaaaaaaaaaaa

SEQ ID NO: 25949 - RNA, 4002 nt, Artificial Sequence
  SARS-CoV-2/Wuhan/WIV05/2019__EPI_ISL_402128 spike protein mRNA gc (1-1273)(K986P_V987P_K986P_V987P_H69del_V70del_Y144del_N501Y_A570 D_D614G_P681H_T716I_S982A_D1118H)
aggagaaagcuuaccauguucguguuccugguccuccugccccuggugagcucccagugcgugaaccucaccacccgcacgcagcugccgcccgccuacaccaacagcuucacccggggcgucuacuaccccgacaagguguuccgcuccagcgugcugcacuccacccaggaccucuuccugcccuucuucagcaacgucacgugguuccacgccaucuccgggaccaacggcaccaagcgguucgacaacccggugcugcccuucaacgacggggucuacuucgcgagcaccgagaaguccaacaucauccgcggcuggaucuucgggacgacccucgacagcaagacccagucccugcugaucgugaacaacgccaccaacguggucaucaaggugugcgaguuccaguucugcaacgaccccuuccucggcguguaccacaagaacaacaagagcuggauggaguccgaguuccgggucuacagcuccgccaacaacugcacguucgaguacgugagccagcccuuccugauggaccuggagggcaagcaggggaacuucaagaaccuccgcgaguucguguucaagaacaucgacggcuacuucaagaucuacuccaagcacaccccgaucaaccugguccgggaccugccccagggguucagcgcccucgagccccugguggaccugcccaucggcaucaacaucacccgcuuccagacccuccuggcccugcaccgguccuaccucacgccgggggacagcagcuccggcuggaccgcgggcgccgccgccuacuacgugggguaccugcagccccgcaccuuccugcucaaguacaacgagaacggcaccaucacggacgcggucgacugcgcccuggacccccugagcgagaccaagugcacccucaaguccuucaccguggagaaggggaucuaccagacgagcaacuuccgggugcagcccaccgaguccaucguccgcuucccgaacaucaccaaccugugccccuucggcgagguguucaacgccacccgguucgccagcgucuacgccuggaaccgcaagcggaucuccaacugcguggcggacuacagcgugcuguacaacuccgccagcuucuccacguucaagugcuacggcgucagccccaccaagcucaacgaccugugcuucaccaacguguacgccgacuccuucgugauccgcggggacgagguccggcagaucgcccccggccagaccgggaagaucgccgacuacaacuacaagcugccggacgacuucacgggcugcgugaucgcguggaacagcaacaaccucgacuccaaggucgggggcaacuacaacuaccuguaccgccuguuccgcaagagcaaccucaagcccuucgagcgggacaucuccaccgagaucuaccaggccggcagcacccccugcaacgggguggagggcuucaacugcuacuucccccugcaguccuacggguuccagccgaccuacggcgugggguaccagcccuaccggguggucgugcugagcuucgagcuccugcacgcccccgccacggugugcggccccaagaaguccaccaaccuggucaagaacaagugcgugaacuucaacuucaacggccucaccgggaccggcgugcugaccgagagcaacaagaaguuccugccguuccagcaguucgggcgcgacaucgacgacacgaccgacgcgguccgcgacccccagacccuggagauccucgacaucacccccugcagcuucggcgggguguccgugaucacgccgggcaccaacaccagcaaccaggucgccgugcuguaccagggcgugaacugcaccgagguccccguggccauccacgccgaccagcugacgcccaccuggcggguguacuccaccggcagcaacgucuuccagacccgcgccgggugccucaucggcgcggagcacgugaacaacuccuacgagugcgacauccccaucggggccggcaucugcgccagcuaccagacgcagaccaacucccaccggcgcgcccggagcguggcgucccagagcaucaucgccuacaccaugucccugggcgccgagaacagcgucgccuacuccaacaacagcaucgccauccccaucaacuucacgaucuccgugaccaccgagauccugcccgugagcaugaccaagacgagcgucgacugcaccauguacaucugcggggacuccaccgagugcagcaaccuccugcugcaguacggcuccuucugcacccagcucaaccgcgcgcugacggggaucgccguggagcaggacaagaacacccaggagguguucgcccaggucaagcagaucuacaagacgcccccgaucaaggacuucggcggguucaacuucagccagauccugcccgaccccuccaagcccagcaagcgguccuucaucgaggaccuccuguucaacaaggugacccuggccgacgccggcuucaucaagcaguacggcgacugccucggggacaucgcggcccgcgaccugaucugcgcccagaaguucaacggccugaccgugcucccgccccugcugaccgacgagaugaucgcccaguacaccagcgcccuccuggcggggaccaucacguccggcuggaccuucggggccggcgccgcccugcagauccccuucgcgaugcagauggccuaccgguucaacggcaucggggucacccagaacgugcucuacgagaaccagaagcugaucgccaaccaguucaacagcgccaucggcaagauccaggacucccugagcuccaccgccagcgcgcucgggaagcugcaggacguggucaaccagaacgcccaggcccugaacacgcucgugaagcagcuguccagcaacuucggcgccaucuccagcgugcugaacgacauccucgcccgccuggacccgcccgaggccgaggugcagaucgaccggcugaucaccgggcgccuccagagccugcagaccuacgugacccagcagcugauccgggcggccgagauccgcgccagcgccaaccucgccgcgaccaagauguccgagugcguccugggccagagcaagcggguggacuucugcggcaagggguaccaccugauguccuucccccagagcgccccgcacggcguggucuuccuccacgugacguacguccccgcccaggagaagaacuucaccaccgcccccgcgaucugccacgacgggaaggcccacuucccccgcgagggcguguucguguccaacgggacccacugguucgucacgcagcggaacuucuacgagccgcagaucaucaccacccacaacaccuucgugagcggcaacugcgacguggucaucggcaucgugaacaacacgguguacgacccccugcagcccgagcuggacuccuucaaggaggagcucgacaaguacuucaagaaccacaccagccccgacgucgaccugggggacaucuccggcaucaacgccagcguggugaacauccagaaggagaucgaccgccugaacgaggucgccaagaaccucaacgagucccugaucgaccugcaggagcucgggaaguacgagcaguacaucaaguggccgugguacaucuggcugggcuucaucgccggccugaucgcgaucgugauggugaccaucaugcucugcugcaugaccagcugcugcuccugccugaaggggugcugcagcugcggcuccugcugcaaguucgacgaggacgacagcgagcccguccugaagggggugaagcuccacuacacgugaggacuaguuauaagacugacuagcccgaugggccucccaacgggcccuccuccccuccuugcaccgagagaucuaaaaaaaaaaaaaaaaaaaaaaaaaaaaaaaaaaaaaaaaaaaaaaaaaaaaaaaaaaaaaaaaaaaaaaaaaaaaaaaaaaaaaaaaaaaaaaaaaaaa

SEQ ID NO: 25950 - RNA, 4011 nt, Artificial Sequence
  SARS-CoV-2/Wuhan/WIV05/2019__EPI_ISL_402128 spike protein mRNA gc (1-1273)(K986P_V987P_K986P_V987P_K417N_E484K_N501Y_D614G)
aggagaaagcuuaccauguucguguuccugguccuccugccccuggugagcucccagugcgugaaccucaccacccgcacgcagcugccgcccgccuacaccaacagcuucacccggggcgucuacuaccccgacaagguguuccgcuccagcgugcugcacuccacccaggaccucuuccugcccuucuucagcaacgucacgugguuccacgccauccacguguccgggaccaacggcaccaagcgguucgacaacccggugcugcccuucaacgacggggucuacuucgcgagcaccgagaaguccaacaucauccgcggcuggaucuucgggacgacccucgacagcaagacccagucccugcugaucgugaacaacgccaccaacguggucaucaaggugugcgaguuccaguucugcaacgaccccuuccucggcguguacuaccacaagaacaacaagagcuggauggaguccgaguuccgggucuacagcuccgccaacaacugcacguucgaguacgugagccagcccuuccugauggaccuggagggcaagcaggggaacuucaagaaccuccgcgaguucguguucaagaacaucgacggcuacuucaagaucuacuccaagcacaccccgaucaaccugguccgggaccugccccagggguucagcgcccucgagccccugguggaccugcccaucggcaucaacaucacccgcuuccagacccuccuggcccugcaccgguccuaccucacgccgggggacagcagcuccggcuggaccgcgggcgccgccgccuacuacgugggguaccugcagccccgcaccuuccugcucaaguacaacgagaacggcaccaucacggacgcggucgacugcgcccuggacccccugagcgagaccaagugcacccucaaguccuucaccguggagaaggggaucuaccagacgagcaacuuccgggugcagcccaccgaguccaucguccgcuucccgaacaucaccaaccugugccccuucggcgagguguucaacgccacccgguucgccagcgucuacgccuggaaccgcaagcggaucuccaacugcguggcggacuacagcgugcuguacaacuccgccagcuucuccacguucaagugcuacggcgucagccccaccaagcucaacgaccugugcuucaccaacguguacgccgacuccuucgugauccgcggggacgagguccggcagaucgcccccggccagaccgggaacaucgccgacuacaacuacaagcugccggacgacuucacgggcugcgugaucgcguggaacagcaacaaccucgacuccaaggucgggggcaacuacaacuaccuguaccgccuguuccgcaagagcaaccucaagcccuucgagcgggacaucuccaccgagaucuaccaggccggcagcacccccugcaacggggugaagggcuucaacugcuacuucccccugcaguccuacggguuccagccgaccuacggcgugggguaccagcccuaccggguggucgugcugagcuucgagcuccugcacgcccccgccacggugugcggccccaagaaguccaccaaccuggucaagaacaagugcgugaacuucaacuucaacggccucaccgggaccggcgugcugaccgagagcaacaagaaguuccugccguuccagcaguucgggcgcgacaucgccgacacgaccgacgcgguccgcgacccccagacccuggagauccucgacaucacccccugcagcuucggcgggguguccgugaucacgccgggcaccaacaccagcaaccaggucgccgugcuguaccagggcgugaacugcaccgagguccccguggccauccacgccgaccagcugacgcccaccuggcggguguacuccaccggcagcaacgucuuccagacccgcgccgggugccucaucggcgcggagcacgugaacaacuccuacgagugcgacauccccaucggggccggcaucugcgccagcuaccagacgcagaccaacuccccgcggcgcgcccggagcguggcgucccagagcaucaucgccuacaccaugucccugggcgccgagaacagcgucgccuacuccaacaacagcaucgccauccccaccaacuucacgaucuccgugaccaccgagauccugcccgugagcaugaccaagacgagcgucgacugcaccauguacaucugcggggacuccaccgagugcagcaaccuccugcugcaguacggcuccuucugcacccagcucaaccgcgcgcugacggggaucgccguggagcaggacaagaacacccaggagguguucgcccaggucaagcagaucuacaagacgcccccgaucaaggacuucggcggguucaacuucagccagauccugcccgaccccuccaagcccagcaagcgguccuucaucgaggaccuccuguucaacaaggugacccuggccgacgccggcuucaucaagcaguacggcgacugccucggggacaucgcggcccgcgaccugaucugcgcccagaaguucaacggccugaccgugcucccgccccugcugaccgacgagaugaucgcccaguacaccagcgcccuccuggcggggaccaucacguccggcuggaccuucggggccggcgccgcccugcagauccccuucgcgaugcagauggccuaccgguucaacggcaucggggucacccagaacgugcucuacgagaaccagaagcugaucgccaaccaguucaacagcgccaucggcaagauccaggacucccugagcuccaccgccagcgcgcucgggaagcugcaggacguggucaaccagaacgcccaggcccugaacacgcucgugaagcagcuguccagcaacuucggcgccaucuccagcgugcugaacgacauccucucccgccuggacccgcccgaggccgaggugcagaucgaccggcugaucaccgggcgccuccagagccugcagaccuacgugacccagcagcugauccgggcggccgagauccgcgccagcgccaaccucgccgcgaccaagauguccgagugcguccugggccagagcaagcggguggacuucugcggcaagggguaccaccugauguccuucccccagagcgccccgcacggcguggucuuccuccacgugacguacguccccgcccaggagaagaacuucaccaccgcccccgcgaucugccacgacgggaaggcccacuucccccgcgagggcguguucguguccaacgggacccacugguucgucacgcagcggaacuucuacgagccgcagaucaucaccaccgacaacaccuucgugagcggcaacugcgacguggucaucggcaucgugaacaacacgguguacgacccccugcagcccgagcuggacuccuucaaggaggagcucgacaaguacuucaagaaccacaccagccccgacgucgaccugggggacaucuccggcaucaacgccagcguggugaacauccagaaggagaucgaccgccugaacgaggucgccaagaaccucaacgagucccugaucgaccugcaggagcucgggaaguacgagcaguacaucaaguggccgugguacaucuggcugggcuucaucgccggccugaucgcgaucgugauggugaccaucaugcucugcugcaugaccagcugcugcuccugccugaaggggugcugcagcugcggcuccugcugcaaguucgacgaggacgacagcgagcccguccugaagggggugaagcuccacuacacgugaggacuaguuauaagacugacuagcccgaugggccucccaacgggcccuccuccccuccuugcaccgagagaucuaaaaaaaaaaaaaaaaaaaaaaaaaaaaaaaaaaaaaaaaaaaaaaaaaaaaaaaaaaaaaaaaaaaaaaaaaaaaaaaaaaaaaaaaaaaaaaaaaaaa

SEQ ID NO: 25951 - RNA, 4002 nt, Artificial Sequence
  SARS-CoV-2/Wuhan/WIV05/2019__EPI_ISL_402128 spike protein mRNA gc (1-1273)(K986P_V987P_K986P_V987P_L18F_D80A_D215G_L242del_A243del_ L244del_R246I_K417N_E484K_N501Y_D614G_A701V)
aggagaaagcuuaccauguucguguuccugguccuccugccccuggugagcucccagugcgugaacuucaccacccgcacgcagcugccgcccgccuacaccaacagcuucacccggggcgucuacuaccccgacaagguguuccgcuccagcgugcugcacuccacccaggaccucuuccugcccuucuucagcaacgucacgugguuccacgccauccacguguccgggaccaacggcaccaagcgguucgccaacccggugcugcccuucaacgacggggucuacuucgcgagcaccgagaaguccaacaucauccgcggcuggaucuucgggacgacccucgacagcaagacccagucccugcugaucgugaacaacgccaccaacguggucaucaaggugugcgaguuccaguucugcaacgaccccuuccucggcguguacuaccacaagaacaacaagagcuggauggaguccgaguuccgggucuacagcuccgccaacaacugcacguucgaguacgugagccagcccuuccugauggaccuggagggcaagcaggggaacuucaagaaccuccgcgaguucguguucaagaacaucgacggcuacuucaagaucuacuccaagcacaccccgaucaaccugguccggggccugccccagggguucagcgcccucgagccccugguggaccugcccaucggcaucaacaucacccgcuuccagacccuccacaucuccuaccucacgccgggggacagcagcuccggcuggaccgcgggcgccgccgccuacuacgugggguaccugcagccccgcaccuuccugcucaaguacaacgagaacggcaccaucacggacgcggucgacugcgcccuggacccccugagcgagaccaagugcacccucaaguccuucaccguggagaaggggaucuaccagacgagcaacuuccgggugcagcccaccgaguccaucguccgcuucccgaacaucaccaaccugugccccuucggcgagguguucaacgccacccgguucgccagcgucuacgccuggaaccgcaagcggaucuccaacugcguggcggacuacagcgugcuguacaacuccgccagcuucuccacguucaagugcuacggcgucagccccaccaagcucaacgaccugugcuucaccaacguguacgccgacuccuucgugauccgcggggacgagguccggcagaucgcccccggccagaccgggaacaucgccgacuacaacuacaagcugccggacgacuucacgggcugcgugaucgcguggaacagcaacaaccucgacuccaaggucgggggcaacuacaacuaccuguaccgccuguuccgcaagagcaaccucaagcccuucgagcgggacaucuccaccgagaucuaccaggccggcagcacccccugcaacggggugaagggcuucaacugcuacuucccccugcaguccuacggguuccagccgaccuacggcgugggguaccagcccuaccggguggucgugcugagcuucgagcuccugcacgcccccgccacggugugcggccccaagaaguccaccaaccuggucaagaacaagugcgugaacuucaacuucaacggccucaccgggaccggcgugcugaccgagagcaacaagaaguuccugccguuccagcaguucgggcgcgacaucgccgacacgaccgacgcgguccgcgacccccagacccuggagauccucgacaucacccccugcagcuucggcgggguguccgugaucacgccgggcaccaacaccagcaaccaggucgccgugcuguaccagggcgugaacugcaccgagguccccguggccauccacgccgaccagcugacgcccaccuggcggguguacuccaccggcagcaacgucuuccagacccgcgccgggugccucaucggcgcggagcacgugaacaacuccuacgagugcgacauccccaucggggccggcaucugcgccagcuaccagacgcagaccaacuccccgcggcgcgcccggagcguggcgucccagagcaucaucgccuacaccaugucccugggcguggagaacagcgucgccuacuccaacaacagcaucgccauccccaccaacuucacgaucuccgugaccaccgagauccugcccgugagcaugaccaagacgagcgucgacugcaccauguacaucugcggggacuccaccgagugcagcaaccuccugcugcaguacggcuccuucugcacccagcucaaccgcgcgcugacggggaucgccguggagcaggacaagaacacccaggagguguucgcccaggucaagcagaucuacaagacgcccccgaucaaggacuucggcggguucaacuucagccagauccugcccgaccccuccaagcccagcaagcgguccuucaucgaggaccuccuguucaacaaggugacccuggccgacgccggcuucaucaagcaguacggcgacugccucggggacaucgcggcccgcgaccugaucugcgcccagaaguucaacggccugaccgugcucccgccccugcugaccgacgagaugaucgcccaguacaccagcgcccuccuggcggggaccaucacguccggcuggaccuucggggccggcgccgcccugcagauccccuucgcgaugcagauggccuaccgguucaacggcaucggggucacccagaacgugcucuacgagaaccagaagcugaucgccaaccaguucaacagcgccaucggcaagauccaggacucccugagcuccaccgccagcgcgcucgggaagcugcaggacguggucaaccagaacgcccaggcccugaacacgcucgugaagcagcuguccagcaacuucggcgccaucuccagcgugcugaacgacauccucucccgccuggacccgcccgaggccgaggugcagaucgaccggcugaucaccgggcgccuccagagccugcagaccuacgugacccagcagcugauccgggcggccgagauccgcgccagcgccaaccucgccgcgaccaagauguccgagugcguccugggccagagcaagcggguggacuucugcggcaagggguaccaccugauguccuucccccagagcgccccgcacggcguggucuuccuccacgugacguacguccccgcccaggagaagaacuucaccaccgcccccgcgaucugccacgacgggaaggcccacuucccccgcgagggcguguucguguccaacgggacccacugguucgucacgcagcggaacuucuacgagccgcagaucaucaccaccgacaacaccuucgugagcggcaacugcgacguggucaucggcaucgugaacaacacgguguacgacccccugcagcccgagcuggacuccuucaaggaggagcucgacaaguacuucaagaaccacaccagccccgacgucgaccugggggacaucuccggcaucaacgccagcguggugaacauccagaaggagaucgaccgccugaacgaggucgccaagaaccucaacgagucccugaucgaccugcaggagcucgggaaguacgagcaguacaucaaguggccgugguacaucuggcugggcuucaucgccggccugaucgcgaucgugauggugaccaucaugcucugcugcaugaccagcugcugcuccugccugaaggggugcugcagcugcggcuccugcugcaaguucgacgaggacgacagcgagcccguccugaagggggugaagcuccacuacacgugaggacuaguuauaagacugacuagcccgaugggccucccaacgggcccuccuccccuccuugcaccgagagaucuaaaaaaaaaaaaaaaaaaaaaaaaaaaaaaaaaaaaaaaaaaaaaaaaaaaaaaaaaaaaaaaaaaaaaaaaaaaaaaaaaaaaaaaaaaaaaaaaaaaa

SEQ ID NO: 25952 - RNA, 4011 nt, Artificial Sequence
  SARS-CoV-2/Wuhan/WIV05/2019__EPI_ISL_402128 spike protein mRNA gc (1-1273)(K986P_V987P_K986P_V987P_E484K_D614G)
aggagaaagcuuaccauguucguguuccugguccuccugccccuggugagcucccagugcgugaaccucaccacccgcacgcagcugccgcccgccuacaccaacagcuucacccggggcgucuacuaccccgacaagguguuccgcuccagcgugcugcacuccacccaggaccucuuccugcccuucuucagcaacgucacgugguuccacgccauccacguguccgggaccaacggcaccaagcgguucgacaacccggugcugcccuucaacgacggggucuacuucgcgagcaccgagaaguccaacaucauccgcggcuggaucuucgggacgacccucgacagcaagacccagucccugcugaucgugaacaacgccaccaacguggucaucaaggugugcgaguuccaguucugcaacgaccccuuccucggcguguacuaccacaagaacaacaagagcuggauggaguccgaguuccgggucuacagcuccgccaacaacugcacguucgaguacgugagccagcccuuccugauggaccuggagggcaagcaggggaacuucaagaaccuccgcgaguucguguucaagaacaucgacggcuacuucaagaucuacuccaagcacaccccgaucaaccugguccgggaccugccccagggguucagcgcccucgagccccugguggaccugcccaucggcaucaacaucacccgcuuccagacccuccuggcccugcaccgguccuaccucacgccgggggacagcagcuccggcuggaccgcgggcgccgccgccuacuacgugggguaccugcagccccgcaccuuccugcucaaguacaacgagaacggcaccaucacggacgcggucgacugcgcccuggacccccugagcgagaccaagugcacccucaaguccuucaccguggagaaggggaucuaccagacgagcaacuuccgggugcagcccaccgaguccaucguccgcuucccgaacaucaccaaccugugccccuucggcgagguguucaacgccacccgguucgccagcgucuacgccuggaaccgcaagcggaucuccaacugcguggcggacuacagcgugcuguacaacuccgccagcuucuccacguucaagugcuacggcgucagccccaccaagcucaacgaccugugcuucaccaacguguacgccgacuccuucgugauccgcggggacgagguccggcagaucgcccccggccagaccgggaagaucgccgacuacaacuacaagcugccggacgacuucacgggcugcgugaucgcguggaacagcaacaaccucgacuccaaggucgggggcaacuacaacuaccuguaccgccuguuccgcaagagcaaccucaagcccuucgagcgggacaucuccaccgagaucuaccaggccggcagcacccccugcaacggggugaagggcuucaacugcuacuucccccugcaguccuacggguuccagccgaccaacggcgugggguaccagcccuaccggguggucgugcugagcuucgagcuccugcacgcccccgccacggugugcggccccaagaaguccaccaaccuggucaagaacaagugcgugaacuucaacuucaacggccucaccgggaccggcgugcugaccgagagcaacaagaaguuccugccguuccagcaguucgggcgcgacaucgccgacacgaccgacgcgguccgcgacccccagacccuggagauccucgacaucacccccugcagcuucggcgggguguccgugaucacgccgggcaccaacaccagcaaccaggucgccgugcuguaccagggcgugaacugcaccgagguccccguggccauccacgccgaccagcugacgcccaccuggcggguguacuccaccggcagcaacgucuuccagacccgcgccgggugccucaucggcgcggagcacgugaacaacuccuacgagugcgacauccccaucggggccggcaucugcgccagcuaccagacgcagaccaacuccccgcggcgcgcccggagcguggcgucccagagcaucaucgccuacaccaugucccugggcgccgagaacagcgucgccuacuccaacaacagcaucgccauccccaccaacuucacgaucuccgugaccaccgagauccugcccgugagcaugaccaagacgagcgucgacugcaccauguacaucugcggggacuccaccgagugcagcaaccuccugcugcaguacggcuccuucugcacccagcucaaccgcgcgcugacggggaucgccguggagcaggacaagaacacccaggagguguucgcccaggucaagcagaucuacaagacgcccccgaucaaggacuucggcggguucaacuucagccagauccugcccgaccccuccaagcccagcaagcgguccuucaucgaggaccuccuguucaacaaggugacccuggccgacgccggcuucaucaagcaguacggcgacugccucggggacaucgcggcccgcgaccugaucugcgcccagaaguucaacggccugaccgugcucccgccccugcugaccgacgagaugaucgcccaguacaccagcgcccuccuggcggggaccaucacguccggcuggaccuucggggccggcgccgcccugcagauccccuucgcgaugcagauggccuaccgguucaacggcaucggggucacccagaacgugcucuacgagaaccagaagcugaucgccaaccaguucaacagcgccaucggcaagauccaggacucccugagcuccaccgccagcgcgcucgggaagcugcaggacguggucaaccagaacgcccaggcccugaacacgcucgugaagcagcuguccagcaacuucggcgccaucuccagcgugcugaacgacauccucucccgccuggacccgcccgaggccgaggugcagaucgaccggcugaucaccgggcgccuccagagccugcagaccuacgugacccagcagcugauccgggcggccgagauccgcgccagcgccaaccucgccgcgaccaagauguccgagugcguccugggccagagcaagcggguggacuucugcggcaagggguaccaccugauguccuucccccagagcgccccgcacggcguggucuuccuccacgugacguacguccccgcccaggagaagaacuucaccaccgcccccgcgaucugccacgacgggaaggcccacuucccccgcgagggcguguucguguccaacgggacccacugguucgucacgcagcggaacuucuacgagccgcagaucaucaccaccgacaacaccuucgugagcggcaacugcgacguggucaucggcaucgugaacaacacgguguacgacccccugcagcccgagcuggacuccuucaaggaggagcucgacaaguacuucaagaaccacaccagccccgacgucgaccugggggacaucuccggcaucaacgccagcguggugaacauccagaaggagaucgaccgccugaacgaggucgccaagaaccucaacgagucccugaucgaccugcaggagcucgggaaguacgagcaguacaucaaguggccgugguacaucuggcugggcuucaucgccggccugaucgcgaucgugauggugaccaucaugcucugcugcaugaccagcugcugcuccugccugaaggggugcugcagcugcggcuccugcugcaaguucgacgaggacgacagcgagcccguccugaagggggugaagcuccacuacacgugaggacuaguuauaagacugacuagcccgaugggccucccaacgggcccuccuccccuccuugcaccgagagaucuaaaaaaaaaaaaaaaaaaaaaaaaaaaaaaaaaaaaaaaaaaaaaaaaaaaaaaaaaaaaaaaaaaaaaaaaaaaaaaaaaaaaaaaaaaaaaaaaaaaa

SEQ ID NO: 25953 - RNA, 4011 nt, Artificial Sequence
  SARS-CoV-2/Wuhan/WIV05/2019__EPI_ISL_402128 spike protein mRNA gc (1-1273)(K986P_V987P_K986P_V987P_L18F_T20N_P26S_D138Y_R190S_K417T _E484K_N501Y_D614G_H655Y_T1027I)
aggagaaagcuuaccauguucguguuccugguccuccugccccuggugagcucccagugcgugaacuucaccaaccgcacgcagcugccgagcgccuacaccaacagcuucacccggggcgucuacuaccccgacaagguguuccgcuccagcgugcugcacuccacccaggaccucuuccugcccuucuucagcaacgucacgugguuccacgccauccacguguccgggaccaacggcaccaagcgguucgacaacccggugcugcccuucaacgacggggucuacuucgcgagcaccgagaaguccaacaucauccgcggcuggaucuucgggacgacccucgacagcaagacccagucccugcugaucgugaacaacgccaccaacguggucaucaaggugugcgaguuccaguucugcaacuaccccuuccucggcguguacuaccacaagaacaacaagagcuggauggaguccgaguuccgggucuacagcuccgccaacaacugcacguucgaguacgugagccagcccuuccugauggaccuggagggcaagcaggggaacuucaagaaccucagcgaguucguguucaagaacaucgacggcuacuucaagaucuacuccaagcacaccccgaucaaccugguccgggaccugccccagggguucagcgcccucgagccccugguggaccugcccaucggcaucaacaucacccgcuuccagacccuccuggcccugcaccgguccuaccucacgccgggggacagcagcuccggcuggaccgcgggcgccgccgccuacuacgugggguaccugcagccccgcaccuuccugcucaaguacaacgagaacggcaccaucacggacgcggucgacugcgcccuggacccccugagcgagaccaagugcacccucaaguccuucaccguggagaaggggaucuaccagacgagcaacuuccgggugcagcccaccgaguccaucguccgcuucccgaacaucaccaaccugugccccuucggcgagguguucaacgccacccgguucgccagcgucuacgccuggaaccgcaagcggaucuccaacugcguggcggacuacagcgugcuguacaacuccgccagcuucuccacguucaagugcuacggcgucagccccaccaagcucaacgaccugugcuucaccaacguguacgccgacuccuucgugauccgcggggacgagguccggcagaucgcccccggccagaccgggaccaucgccgacuacaacuacaagcugccggacgacuucacgggcugcgugaucgcguggaacagcaacaaccucgacuccaaggucgggggcaacuacaacuaccuguaccgccuguuccgcaagagcaaccucaagcccuucgagcgggacaucuccaccgagaucuaccaggccggcagcacccccugcaacggggugaagggcuucaacugcuacuucccccugcaguccuacggguuccagccgaccuacggcgugggguaccagcccuaccggguggucgugcugagcuucgagcuccugcacgcccccgccacggugugcggccccaagaaguccaccaaccuggucaagaacaagugcgugaacuucaacuucaacggccucaccgggaccggcgugcugaccgagagcaacaagaaguuccugccguuccagcaguucgggcgcgacaucgccgacacgaccgacgcgguccgcgacccccagacccuggagauccucgacaucacccccugcagcuucggcgggguguccgugaucacgccgggcaccaacaccagcaaccaggucgccgugcuguaccagggcgugaacugcaccgagguccccguggccauccacgccgaccagcugacgcccaccuggcggguguacuccaccggcagcaacgucuuccagacccgcgccgggugccucaucggcgcggaguacgugaacaacuccuacgagugcgacauccccaucggggccggcaucugcgccagcuaccagacgcagaccaacuccccgcggcgcgcccggagcguggcgucccagagcaucaucgccuacaccaugucccugggcgccgagaacagcgucgccuacuccaacaacagcaucgccauccccaccaacuucacgaucuccgugaccaccgagauccugcccgugagcaugaccaagacgagcgucgacugcaccauguacaucugcggggacuccaccgagugcagcaaccuccugcugcaguacggcuccuucugcacccagcucaaccgcgcgcugacggggaucgccguggagcaggacaagaacacccaggagguguucgcccaggucaagcagaucuacaagacgcccccgaucaaggacuucggcggguucaacuucagccagauccugcccgaccccuccaagcccagcaagcgguccuucaucgaggaccuccuguucaacaaggugacccuggccgacgccggcuucaucaagcaguacggcgacugccucggggacaucgcggcccgcgaccugaucugcgcccagaaguucaacggccugaccgugcucccgccccugcugaccgacgagaugaucgcccaguacaccagcgcccuccuggcggggaccaucacguccggcuggaccuucggggccggcgccgcccugcagauccccuucgcgaugcagauggccuaccgguucaacggcaucggggucacccagaacgugcucuacgagaaccagaagcugaucgccaaccaguucaacagcgccaucggcaagauccaggacucccugagcuccaccgccagcgcgcucgggaagcugcaggacguggucaaccagaacgcccaggcccugaacacgcucgugaagcagcuguccagcaacuucggcgccaucuccagcgugcugaacgacauccucucccgccuggacccgcccgaggccgaggugcagaucgaccggcugaucaccgggcgccuccagagccugcagaccuacgugacccagcagcugauccgggcggccgagauccgcgccagcgccaaccucgccgcgaucaagauguccgagugcguccugggccagagcaagcggguggacuucugcggcaagggguaccaccugauguccuucccccagagcgccccgcacggcguggucuuccuccacgugacguacguccccgcccaggagaagaacuucaccaccgcccccgcgaucugccacgacgggaaggcccacuucccccgcgagggcguguucguguccaacgggacccacugguucgucacgcagcggaacuucuacgagccgcagaucaucaccaccgacaacaccuucgugagcggcaacugcgacguggucaucggcaucgugaacaacacgguguacgacccccugcagcccgagcuggacuccuucaaggaggagcucgacaaguacuucaagaaccacaccagccccgacgucgaccugggggacaucuccggcaucaacgccagcguggugaacauccagaaggagaucgaccgccugaacgaggucgccaagaaccucaacgagucccugaucgaccugcaggagcucgggaaguacgagcaguacaucaaguggccgugguacaucuggcugggcuucaucgccggccugaucgcgaucgugauggugaccaucaugcucugcugcaugaccagcugcugcuccugccugaaggggugcugcagcugcggcuccugcugcaaguucgacgaggacgacagcgagcccguccugaagggggugaagcuccacuacacgugaggacuaguuauaagacugacuagcccgaugggccucccaacgggcccuccuccccuccuugcaccgagagaucuaaaaaaaaaaaaaaaaaaaaaaaaaaaaaaaaaaaaaaaaaaaaaaaaaaaaaaaaaaaaaaaaaaaaaaaaaaaaaaaaaaaaaaaaaaaaaaaaaaaa

SEQ ID NO: 25954 - RNA, 4011 nt, Artificial Sequence
  SARS-CoV-2/Wuhan/WIV05/2019__EPI_ISL_402128 spike protein mRNA gc (1-1273)(K986P_V987P_K986P_V987P_S13I_W152C_L452R_D614G)
aggagaaagcuuaccauguucguguuccugguccuccugccccuggugagcauccagugcgugaaccucaccacccgcacgcagcugccgcccgccuacaccaacagcuucacccggggcgucuacuaccccgacaagguguuccgcuccagcgugcugcacuccacccaggaccucuuccugcccuucuucagcaacgucacgugguuccacgccauccacguguccgggaccaacggcaccaagcgguucgacaacccggugcugcccuucaacgacggggucuacuucgcgagcaccgagaaguccaacaucauccgcggcuggaucuucgggacgacccucgacagcaagacccagucccugcugaucgugaacaacgccaccaacguggucaucaaggugugcgaguuccaguucugcaacgaccccuuccucggcguguacuaccacaagaacaacaagagcugcauggaguccgaguuccgggucuacagcuccgccaacaacugcacguucgaguacgugagccagcccuuccugauggaccuggagggcaagcaggggaacuucaagaaccuccgcgaguucguguucaagaacaucgacggcuacuucaagaucuacuccaagcacaccccgaucaaccugguccgggaccugccccagggguucagcgcccucgagccccugguggaccugcccaucggcaucaacaucacccgcuuccagacccuccuggcccugcaccgguccuaccucacgccgggggacagcagcuccggcuggaccgcgggcgccgccgccuacuacgugggguaccugcagccccgcaccuuccugcucaaguacaacgagaacggcaccaucacggacgcggucgacugcgcccuggacccccugagcgagaccaagugcacccucaaguccuucaccguggagaaggggaucuaccagacgagcaacuuccgggugcagcccaccgaguccaucguccgcuucccgaacaucaccaaccugugccccuucggcgagguguucaacgccacccgguucgccagcgucuacgccuggaaccgcaagcggaucuccaacugcguggcggacuacagcgugcuguacaacuccgccagcuucuccacguucaagugcuacggcgucagccccaccaagcucaacgaccugugcuucaccaacguguacgccgacuccuucgugauccgcggggacgagguccggcagaucgcccccggccagaccgggaagaucgccgacuacaacuacaagcugccggacgacuucacgggcugcgugaucgcguggaacagcaacaaccucgacuccaaggucgggggcaacuacaacuaccgcuaccgccuguuccgcaagagcaaccucaagcccuucgagcgggacaucuccaccgagaucuaccaggccggcagcacccccugcaacgggguggagggcuucaacugcuacuucccccugcaguccuacggguuccagccgaccaacggcgugggguaccagcccuaccggguggucgugcugagcuucgagcuccugcacgcccccgccacggugugcggccccaagaaguccaccaaccuggucaagaacaagugcgugaacuucaacuucaacggccucaccgggaccggcgugcugaccgagagcaacaagaaguuccugccguuccagcaguucgggcgcgacaucgccgacacgaccgacgcgguccgcgacccccagacccuggagauccucgacaucacccccugcagcuucggcgggguguccgugaucacgccgggcaccaacaccagcaaccaggucgccgugcuguaccagggcgugaacugcaccgagguccccguggccauccacgccgaccagcugacgcccaccuggcggguguacuccaccggcagcaacgucuuccagacccgcgccgggugccucaucggcgcggagcacgugaacaacuccuacgagugcgacauccccaucggggccggcaucugcgccagcuaccagacgcagaccaacuccccgcggcgcgcccggagcguggcgucccagagcaucaucgccuacaccaugucccugggcgccgagaacagcgucgccuacuccaacaacagcaucgccauccccaccaacuucacgaucuccgugaccaccgagauccugcccgugagcaugaccaagacgagcgucgacugcaccauguacaucugcggggacuccaccgagugcagcaaccuccugcugcaguacggcuccuucugcacccagcucaaccgcgcgcugacggggaucgccguggagcaggacaagaacacccaggagguguucgcccaggucaagcagaucuacaagacgcccccgaucaaggacuucggcggguucaacuucagccagauccugcccgaccccuccaagcccagcaagcgguccuucaucgaggaccuccuguucaacaaggugacccuggccgacgccggcuucaucaagcaguacggcgacugccucggggacaucgcggcccgcgaccugaucugcgcccagaaguucaacggccugaccgugcucccgccccugcugaccgacgagaugaucgcccaguacaccagcgcccuccuggcggggaccaucacguccggcuggaccuucggggccggcgccgcccugcagauccccuucgcgaugcagauggccuaccgguucaacggcaucggggucacccagaacgugcucuacgagaaccagaagcugaucgccaaccaguucaacagcgccaucggcaagauccaggacucccugagcuccaccgccagcgcgcucgggaagcugcaggacguggucaaccagaacgcccaggcccugaacacgcucgugaagcagcuguccagcaacuucggcgccaucuccagcgugcugaacgacauccucucccgccuggacccgcccgaggccgaggugcagaucgaccggcugaucaccgggcgccuccagagccugcagaccuacgugacccagcagcugauccgggcggccgagauccgcgccagcgccaaccucgccgcgaccaagauguccgagugcguccugggccagagcaagcggguggacuucugcggcaagggguaccaccugauguccuucccccagagcgccccgcacggcguggucuuccuccacgugacguacguccccgcccaggagaagaacuucaccaccgcccccgcgaucugccacgacgggaaggcccacuucccccgcgagggcguguucguguccaacgggacccacugguucgucacgcagcggaacuucuacgagccgcagaucaucaccaccgacaacaccuucgugagcggcaacugcgacguggucaucggcaucgugaacaacacgguguacgacccccugcagcccgagcuggacuccuucaaggaggagcucgacaaguacuucaagaaccacaccagccccgacgucgaccugggggacaucuccggcaucaacgccagcguggugaacauccagaaggagaucgaccgccugaacgaggucgccaagaaccucaacgagucccugaucgaccugcaggagcucgggaaguacgagcaguacaucaaguggccgugguacaucuggcugggcuucaucgccggccugaucgcgaucgugauggugaccaucaugcucugcugcaugaccagcugcugcuccugccugaaggggugcugcagcugcggcuccugcugcaaguucgacgaggacgacagcgagcccguccugaagggggugaagcuccacuacacgugaggacuaguuauaagacugacuagcccgaugggccucccaacgggcccuccuccccuccuugcaccgagagaucuaaaaaaaaaaaaaaaaaaaaaaaaaaaaaaaaaaaaaaaaaaaaaaaaaaaaaaaaaaaaaaaaaaaaaaaaaaaaaaaaaaaaaaaaaaaaaaaaaaaa

SEQ ID NO: 25955 - RNA, 4011 nt, Artificial Sequence
  SARS-CoV-2/Wuhan/WIV05/2019__EPI_ISL_402128 spike protein mRNA gc (1-1273)(K986P_V987P)
aggagaaagcuuaccauguucguguuccugguccuccugccccuggugagcucccagugcgugaaccucaccacccgcacgcagcugccgcccgccuacaccaacagcuucacccggggcgucuacuaccccgacaagguguuccgcuccagcgugcugcacuccacccaggaccucuuccugcccuucuucagcaacgucacgugguuccacgccauccacguguccgggaccaacggcaccaagcgguucgacaacccggugcugcccuucaacgacggggucuacuucgcgagcaccgagaaguccaacaucauccgcggcuggaucuucgggacgacccucgacagcaagacccagucccugcugaucgugaacaacgccaccaacguggucaucaaggugugcgaguuccaguucugcaacgaccccuuccucggcguguacuaccacaagaacaacaagagcuggauggaguccgaguuccgggucuacagcuccgccaacaacugcacguucgaguacgugagccagcccuuccugauggaccuggagggcaagcaggggaacuucaagaaccuccgcgaguucguguucaagaacaucgacggcuacuucaagaucuacuccaagcacaccccgaucaaccugguccgggaccugccccagggguucagcgcccucgagccccugguggaccugcccaucggcaucaacaucacccgcuuccagacccuccuggcccugcaccgguccuaccucacgccgggggacagcagcuccggcuggaccgcgggcgccgccgccuacuacgugggguaccugcagccccgcaccuuccugcucaaguacaacgagaacggcaccaucacggacgcggucgacugcgcccuggacccccugagcgagaccaagugcacccucaaguccuucaccguggagaaggggaucuaccagacgagcaacuuccgggugcagcccaccgaguccaucguccgcuucccgaacaucaccaaccugugccccuucggcgagguguucaacgccacccgguucgccagcgucuacgccuggaaccgcaagcggaucuccaacugcguggcggacuacagcgugcuguacaacuccgccagcuucuccacguucaagugcuacggcgucagccccaccaagcucaacgaccugugcuucaccaacguguacgccgacuccuucgugauccgcggggacgagguccggcagaucgcccccggccagaccgggaagaucgccgacuacaacuacaagcugccggacgacuucacgggcugcgugaucgcguggaacagcaacaaccucgacuccaaggucgggggcaacuacaacuaccuguaccgccuguuccgcaagagcaaccucaagcccuucgagcgggacaucuccaccgagaucuaccaggccggcagcacccccugcaacgggguggagggcuucaacugcuacuucccccugcaguccuacggguuccagccgaccaacggcgugggguaccagcccuaccggguggucgugcugagcuucgagcuccugcacgcccccgccacggugugcggccccaagaaguccaccaaccuggucaagaacaagugcgugaacuucaacuucaacggccucaccgggaccggcgugcugaccgagagcaacaagaaguuccugccguuccagcaguucgggcgcgacaucgccgacacgaccgacgcgguccgcgacccccagacccuggagauccucgacaucacccccugcagcuucggcgggguguccgugaucacgccgggcaccaacaccagcaaccaggucgccgugcuguaccaggacgugaacugcaccgagguccccguggccauccacgccgaccagcugacgcccaccuggcggguguacuccaccggcagcaacgucuuccagacccgcgccgggugccucaucggcgcggagcacgugaacaacuccuacgagugcgacauccccaucggggccggcaucugcgccagcuaccagacgcagaccaacuccccgcggcgcgcccggagcguggcgucccagagcaucaucgccuacaccaugucccugggcgccgagaacagcgucgccuacuccaacaacagcaucgccauccccaccaacuucacgaucuccgugaccaccgagauccugcccgugagcaugaccaagacgagcgucgacugcaccauguacaucugcggggacuccaccgagugcagcaaccuccugcugcaguacggcuccuucugcacccagcucaaccgcgcgcugacggggaucgccguggagcaggacaagaacacccaggagguguucgcccaggucaagcagaucuacaagacgcccccgaucaaggacuucggcggguucaacuucagccagauccugcccgaccccuccaagcccagcaagcgguccuucaucgaggaccuccuguucaacaaggugacccuggccgacgccggcuucaucaagcaguacggcgacugccucggggacaucgcggcccgcgaccugaucugcgcccagaaguucaacggccugaccgugcucccgccccugcugaccgacgagaugaucgcccaguacaccagcgcccuccuggcggggaccaucacguccggcuggaccuucggggccggcgccgcccugcagauccccuucgcgaugcagauggccuaccgguucaacggcaucggggucacccagaacgugcucuacgagaaccagaagcugaucgccaaccaguucaacagcgccaucggcaagauccaggacucccugagcuccaccgccagcgcgcucgggaagcugcaggacguggucaaccagaacgcccaggcccugaacacgcucgugaagcagcuguccagcaacuucggcgccaucuccagcgugcugaacgacauccucucccgccuggacccgcccgaggccgagguccagaucgaccggcugaucaccgggcgccuccagagccugcagaccuacgugacccagcagcugauccgggcggccgagauccgcgccagcgccaaccucgccgcgaccaagauguccgagugcgugcugggccagagcaagcgggucgacuucugcggcaagggguaccaccugauguccuucccccagagcgcgccccacggcgugguguuccuccacgucacguacgugcccgcccaggagaagaacuucaccaccgccccggccaucugccacgacgggaaggcccacuucccccgcgagggcgucuucguguccaacgggacccacugguucgugacgcagcggaacuucuacgagccccagaucaucaccaccgacaacaccuucgucagcggcaacugcgacguggugaucggcaucgucaacaacacgguguacgacccccugcagccggagcuggacuccuucaaggaggagcucgacaaguacuucaagaaccacaccagccccgacguggaccugggggacaucuccggcaucaacgccagcgucgugaacauccagaaggagaucgaccgccugaacgagguggccaagaaccucaacgagucccugaucgaccugcaggagcucgggaaguacgagcaguacaucaaguggcccugguacaucuggcugggcuucaucgccggccugaucgcgaucgucauggugaccaucaugcucugcugcaugaccagcugcugcuccugccugaaggggugcugcagcugcggcuccugcugcaaguucgacgaggacgacagcgagccggugcugaagggggucaagcuccacuacacgugaggacuaguuauaagacugacuagcccgaugggccucccaacgggcccuccuccccuccuugcaccgagagaucuaaaaaaaaaaaaaaaaaaaaaaaaaaaaaaaaaaaaaaaaaaaaaaaaaaaaaaaaaaaaaaaaaaaaaaaaaaaaaaaaaaaaaaaaaaaaaaaaaaaa

SEQ ID NO: 25956 - RNA, 4011 nt, Artificial Sequence
  SARS-CoV-2/Wuhan/WIV05/2019__EPI_ISL_402128 spike protein mRNA gc (1-1273)(K986P_V987P_ D614G)
aggagaaagcuuaccauguucguguuccugguccuccugccccuggugagcucccagugcgugaaccucaccacccgcacgcagcugccgcccgccuacaccaacagcuucacccggggcgucuacuaccccgacaagguguuccgcuccagcgugcugcacuccacccaggaccucuuccugcccuucuucagcaacgucacgugguuccacgccauccacguguccgggaccaacggcaccaagcgguucgacaacccggugcugcccuucaacgacggggucuacuucgcgagcaccgagaaguccaacaucauccgcggcuggaucuucgggacgacccucgacagcaagacccagucccugcugaucgugaacaacgccaccaacguggucaucaaggugugcgaguuccaguucugcaacgaccccuuccucggcguguacuaccacaagaacaacaagagcuggauggaguccgaguuccgggucuacagcuccgccaacaacugcacguucgaguacgugagccagcccuuccugauggaccuggagggcaagcaggggaacuucaagaaccuccgcgaguucguguucaagaacaucgacggcuacuucaagaucuacuccaagcacaccccgaucaaccugguccgggaccugccccagggguucagcgcccucgagccccugguggaccugcccaucggcaucaacaucacccgcuuccagacccuccuggcccugcaccgguccuaccucacgccgggggacagcagcuccggcuggaccgcgggcgccgccgccuacuacgugggguaccugcagccccgcaccuuccugcucaaguacaacgagaacggcaccaucacggacgcggucgacugcgcccuggacccccugagcgagaccaagugcacccucaaguccuucaccguggagaaggggaucuaccagacgagcaacuuccgggugcagcccaccgaguccaucguccgcuucccgaacaucaccaaccugugccccuucggcgagguguucaacgccacccgguucgccagcgucuacgccuggaaccgcaagcggaucuccaacugcguggcggacuacagcgugcuguacaacuccgccagcuucuccacguucaagugcuacggcgucagccccaccaagcucaacgaccugugcuucaccaacguguacgccgacuccuucgugauccgcggggacgagguccggcagaucgcccccggccagaccgggaagaucgccgacuacaacuacaagcugccggacgacuucacgggcugcgugaucgcguggaacagcaacaaccucgacuccaaggucgggggcaacuacaacuaccuguaccgccuguuccgcaagagcaaccucaagcccuucgagcgggacaucuccaccgagaucuaccaggccggcagcacccccugcaacgggguggagggcuucaacugcuacuucccccugcaguccuacggguuccagccgaccaacggcgugggguaccagcccuaccggguggucgugcugagcuucgagcuccugcacgcccccgccacggugugcggccccaagaaguccaccaaccuggucaagaacaagugcgugaacuucaacuucaacggccucaccgggaccggcgugcugaccgagagcaacaagaaguuccugccguuccagcaguucgggcgcgacaucgccgacacgaccgacgcgguccgcgacccccagacccuggagauccucgacaucacccccugcagcuucggcgggguguccgugaucacgccgggcaccaacaccagcaaccaggucgccgugcuguaccagggcgugaacugcaccgagguccccguggccauccacgccgaccagcugacgcccaccuggcggguguacuccaccgggagcaacgucuuccagacccgcgccggcugccucaucggggcggagcacgugaacaacuccuacgagugcgacauccccaucggcgccggcaucugcgccagcuaccagacgcagaccaacuccccgcggcgcgcccggagcguggcgucccagagcaucaucgccuacaccaugucccugggggccgagaacagcgucgccuacuccaacaacagcaucgccauccccaccaacuucacgaucuccgugaccaccgagauccugcccgugagcaugaccaagacgagcgucgacugcaccauguacaucugcggcgacuccaccgagugcagcaaccuccugcugcaguacggguccuucugcacccagcucaaccgcgcgcugacgggcaucgccguggagcaggacaagaacacccaggagguguucgcccaggucaagcagaucuacaagacgcccccgaucaaggacuucgggggcuucaacuucagccagauccugcccgaccccuccaagcccagcaagcgguccuucaucgaggaccuccuguucaacaaggugacccuggccgacgccggcuucaucaagcaguacggggacugccucggcgacaucgcggcccgcgaccugaucugcgcccagaaguucaacgggcugaccgugcucccgccccugcugaccgacgagaugaucgcccaguacaccagcgcccuccuggcgggcaccaucacguccggguggaccuucggcgccggcgccgcccugcagauccccuucgcgaugcagauggccuaccgguucaacgggaucggcgucacccagaacgugcucuacgagaaccagaagcugaucgccaaccaguucaacagcgccaucgggaagauccaggacucccugagcuccaccgccagcgcgcucggcaagcugcaggacguggucaaccagaacgcccaggcccugaacacgcucgugaagcagcuguccagcaacuucggggccaucuccagcgugcugaacgacauccucucccgccuggacccgcccgaggccgagguccagaucgaccggcugaucaccggccgccuccagagccugcagaccuacgugacccagcagcugauccgggcggccgagauccgcgccagcgccaaccucgccgcgaccaagauguccgagugcgugcugggccagagcaagcgggucgacuucugcgggaagggcuaccaccugauguccuucccccagagcgcgccccacggggugguguuccuccacgucacguacgugcccgcccaggagaagaacuucaccaccgccccggccaucugccacgacggcaaggcccacuucccccgcgagggggucuucguguccaacggcacccacugguucgugacgcagcggaacuucuacgagccccagaucaucaccaccgacaacaccuucgucagcggcaacugcgacguggugaucgggaucgucaacaacacgguguacgacccccugcagccggagcuggacuccuucaaggaggagcucgacaaguacuucaagaaccacaccagccccgacguggaccugggcgacaucuccgggaucaacgccagcgucgugaacauccagaaggagaucgaccgccugaacgagguggccaagaaccucaacgagucccugaucgaccugcaggagcucggcaaguacgagcaguacaucaaguggcccugguacaucuggcugggcuucaucgccgggcugaucgcgaucgucauggugaccaucaugcucugcugcaugaccagcugcugcuccugccugaagggcugcugcagcugcggguccugcugcaaguucgacgaggacgacagcgagccggugcugaagggcgucaagcuccacuacacgugaggacuaguuauaagacugacuagcccgaugggccucccaacgggcccuccuccccuccuugcaccgagagaucuaaaaaaaaaaaaaaaaaaaaaaaaaaaaaaaaaaaaaaaaaaaaaaaaaaaaaaaaaaaaaaaaaaaaaaaaaaaaaaaaaaaaaaaaaaaaaaaaaaaa

SEQ ID NO: 25957 - RNA, 4011 nt, Artificial Sequence
  SARS-CoV-2/Wuhan/WIV05/2019__EPI_ISL_402128 spike protein mRNA gc (1-1273)(K986P_V987P_A222V_D614G)
aggagaaagcuuaccauguucguguuccugguccuccugccccuggugagcucccagugcgugaaccucaccacccgcacgcagcugccgcccgccuacaccaacagcuucacccggggcgucuacuaccccgacaagguguuccgcuccagcgugcugcacuccacccaggaccucuuccugcccuucuucagcaacgucacgugguuccacgccauccacguguccgggaccaacggcaccaagcgguucgacaacccggugcugcccuucaacgacggggucuacuucgcgagcaccgagaaguccaacaucauccgcggcuggaucuucgggacgacccucgacagcaagacccagucccugcugaucgugaacaacgccaccaacguggucaucaaggugugcgaguuccaguucugcaacgaccccuuccucggcguguacuaccacaagaacaacaagagcuggauggaguccgaguuccgggucuacagcuccgccaacaacugcacguucgaguacgugagccagcccuuccugauggaccuggagggcaagcaggggaacuucaagaaccuccgcgaguucguguucaagaacaucgacggcuacuucaagaucuacuccaagcacaccccgaucaaccugguccgggaccugccccagggguucagcgugcucgagccccugguggaccugcccaucggcaucaacaucacccgcuuccagacccuccuggcccugcaccgguccuaccucacgccgggggacagcagcuccggcuggaccgccggcgcggccgccuacuacgucggguaccugcagccccgcaccuuccugcucaaguacaacgagaacggcaccaucacggacgccguggacugcgcgcuggacccccugagcgagaccaagugcacccucaaguccuucaccguggagaaggggaucuaccagacgagcaacuuccggguccagcccaccgaguccaucgugcgcuucccgaacaucaccaaccugugccccuucggcgaggucuucaacgccacccgguucgccagcguguacgccuggaaccgcaagcggaucuccaacugcguggccgacuacagcguccuguacaacuccgcgagcuucuccacguucaagugcuacggcgugagccccaccaagcucaacgaccugugcuucaccaacguguacgccgacuccuucgucauccgcggggacgaggugcggcagaucgcccccggccagaccgggaagaucgccgacuacaacuacaagcugccggacgacuucacgggcugcgugaucgccuggaacagcaacaaccucgacuccaaggucgggggcaacuacaacuaccuguaccgccuguuccgcaagagcaaccucaagcccuucgagcgggacaucuccaccgagaucuaccaggcgggcagcacccccugcaacgggguggagggcuucaacugcuacuucccccugcaguccuacggguuccagccgaccaacggcgugggguaccagcccuaccgggucguggugcugagcuucgagcuccugcacgcccccgccacggucugcggccccaagaaguccaccaaccuggugaagaacaagugcgugaacuucaacuucaacggccucaccgggaccggcguccugaccgagagcaacaagaaguuccugccguuccagcaguucgggcgcgacaucgccgacacgaccgacgccgugcgcgacccccagacccuggagauccucgacaucacccccugcagcuucggcgggguguccgucaucacgccgggcaccaacaccagcaaccagguggcggugcuguaccagggcgucaacugcaccgaggugcccguggccauccacgccgaccagcugacgcccaccuggcgggucuacuccaccgggagcaacguguuccagacccgcgccggcugccucaucggggccgagcacgugaacaacuccuacgagugcgacauccccaucggcgcgggcaucugcgccagcuaccagacgcagaccaacuccccgcggcgcgcccggagcgucgccucccagagcaucaucgcguacaccaugucccugggggccgagaacagcguggccuacuccaacaacagcaucgccauccccaccaacuucacgaucuccgugaccaccgagauccugcccgucagcaugaccaagacgagcguggacugcaccauguacaucugcggcgacuccaccgagugcagcaaccuccugcugcaguacggguccuucugcacccagcucaaccgcgcccugacgggcaucgcgguggagcaggacaagaacacccaggaggucuucgcccaggugaagcagaucuacaagacgcccccgaucaaggacuucgggggcuucaacuucagccagauccugcccgaccccuccaagcccagcaagcgguccuucaucgaggaccuccuguucaacaaggugacccuggccgacgccggcuucaucaagcaguacggggacugccucggcgacaucgccgcgcgcgaccugaucugcgcccagaaguucaacgggcugaccguccucccgccccugcugaccgacgagaugaucgcccaguacaccagcgcccuccuggccggcaccaucacguccggguggaccuucggcgcgggcgccgcccugcagauccccuucgccaugcagauggcguaccgguucaacgggaucggcgugacccagaacgugcucuacgagaaccagaagcugaucgccaaccaguucaacagcgccaucgggaagauccaggacucccugagcuccaccgccagcgcccucggcaagcugcaggacgucgugaaccagaacgcgcaggcccugaacacgcucgugaagcagcuguccagcaacuucggggccaucuccagcguccugaacgacauccucucccgccuggacccgcccgaggccgaggugcagaucgaccggcugaucaccggccgccuccagagccugcagaccuacgugacccagcagcugauccgggccgcggagauccgcgccagcgccaaccucgccgccaccaagauguccgagugcguccugggccagagcaagcggguggacuucugcgggaagggcuaccaccugauguccuucccccagagcgcgccccacgggguggucuuccuccacgugacguacguccccgcccaggagaagaacuucaccaccgccccggccaucugccacgacggcaaggcgcacuucccccgcgaggggguguucguguccaacggcacccacugguucgucacgcagcggaacuucuacgagccccagaucaucaccaccgacaacaccuucgugagcggcaacugcgacguggucaucgggaucgugaacaacacgguguacgacccccugcagccggagcuggacuccuucaaggaggagcucgacaaguacuucaagaaccacaccagccccgacgucgaccugggcgacaucuccgggaucaacgccagcguggugaacauccagaaggagaucgaccgccugaacgaggucgccaagaaccucaacgagucccugaucgaccugcaggagcucggcaaguacgagcaguacaucaaguggcccugguacaucuggcugggcuucaucgccgggcugaucgccaucgugauggugaccaucaugcucugcugcaugaccagcugcugcuccugccugaagggcugcugcagcugcggguccugcugcaaguucgacgaggacgacagcgagccgguccugaagggcgugaagcuccacuacacgugaggacuaguuauaagacugacuagcccgaugggccucccaacgggcccuccuccccuccuugcaccgagagaucuaaaaaaaaaaaaaaaaaaaaaaaaaaaaaaaaaaaaaaaaaaaaaaaaaaaaaaaaaaaaaaaaaaaaaaaaaaaaaaaaaaaaaaaaaaaaaaaaaaaa

SEQ ID NO: 25958 - RNA, 4011 nt, Artificial Sequence
  SARS-CoV-2/Wuhan/WIV05/2019__EPI_ISL_402128 spike protein mRNA gc (1-1273)(K986P_V987P_N439K_D614G)
aggagaaagcuuaccauguucguguuccugguccuccugccccuggugagcucccagugcgugaaccucaccacccgcacgcagcugccgcccgccuacaccaacagcuucacccggggcgucuacuaccccgacaagguguuccgcuccagcgugcugcacuccacccaggaccucuuccugcccuucuucagcaacgucacgugguuccacgccauccacguguccgggaccaacggcaccaagcgguucgacaacccggugcugcccuucaacgacggggucuacuucgcgagcaccgagaaguccaacaucauccgcggcuggaucuucgggacgacccucgacagcaagacccagucccugcugaucgugaacaacgccaccaacguggucaucaaggugugcgaguuccaguucugcaacgaccccuuccucggcguguacuaccacaagaacaacaagagcuggauggaguccgaguuccgggucuacagcuccgccaacaacugcacguucgaguacgugagccagcccuuccugauggaccuggagggcaagcaggggaacuucaagaaccuccgcgaguucguguucaagaacaucgacggcuacuucaagaucuacuccaagcacaccccgaucaaccugguccgggaccugccccagggguucagcgcccucgagccccugguggaccugcccaucggcaucaacaucacccgcuuccagacccuccuggcccugcaccgguccuaccucacgccgggggacagcagcuccggcuggaccgcgggcgccgccgccuacuacgugggguaccugcagccccgcaccuuccugcucaaguacaacgagaacggcaccaucacggacgcggucgacugcgcccuggacccccugagcgagaccaagugcacccucaaguccuucaccguggagaaggggaucuaccagacgagcaacuuccgggugcagcccaccgaguccaucguccgcuucccgaacaucaccaaccugugccccuucggcgagguguucaacgccacccgguucgccagcgucuacgccuggaaccgcaagcggaucuccaacugcguggcggacuacagcgugcuguacaacuccgccagcuucuccacguucaagugcuacggcgucagccccaccaagcucaacgaccugugcuucaccaacguguacgccgacuccuucgugauccgcggggacgagguccggcagaucgcccccggccagaccgggaagaucgccgacuacaacuacaagcugccggacgacuucacgggcugcgugaucgcguggaacagcaagaaccucgacuccaaggucgggggcaacuacaacuaccuguaccgccuguuccgcaagagcaaccucaagcccuucgagcgggacaucuccaccgagaucuaccaggccggcagcacccccugcaacgggguggagggcuucaacugcuacuucccccugcaguccuacggguuccagccgaccaacggcgugggguaccagcccuaccggguggucgugcugagcuucgagcuccugcacgcccccgccacggugugcggccccaagaaguccaccaaccuggucaagaacaagugcgugaacuucaacuucaacggccucaccgggaccggcgugcugaccgagagcaacaagaaguuccugccguuccagcaguucgggcgcgacaucgccgacacgaccgacgcgguccgcgacccccagacccuggagauccucgacaucacccccugcagcuucggcgggguguccgugaucacgccgggcaccaacaccagcaaccaggucgccgugcuguaccagggcgugaacugcaccgagguccccguggccauccacgccgaccagcugacgcccaccuggcggguguacuccaccgggagcaacgucuuccagacccgcgccggcugccucaucggggcggagcacgugaacaacuccuacgagugcgacauccccaucggcgccggcaucugcgccagcuaccagacgcagaccaacuccccgcggcgcgcccggagcguggcgucccagagcaucaucgccuacaccaugucccugggggccgagaacagcgucgccuacuccaacaacagcaucgccauccccaccaacuucacgaucuccgugaccaccgagauccugcccgugagcaugaccaagacgagcgucgacugcaccauguacaucugcggcgacuccaccgagugcagcaaccuccugcugcaguacggguccuucugcacccagcucaaccgcgcgcugacgggcaucgccguggagcaggacaagaacacccaggagguguucgcccaggucaagcagaucuacaagacgcccccgaucaaggacuucgggggcuucaacuucagccagauccugcccgaccccuccaagcccagcaagcgguccuucaucgaggaccuccuguucaacaaggugacccuggccgacgccggcuucaucaagcaguacggggacugccucggcgacaucgcggcccgcgaccugaucugcgcccagaaguucaacgggcugaccgugcucccgccccugcugaccgacgagaugaucgcccaguacaccagcgcccuccuggcgggcaccaucacguccggguggaccuucggcgccggcgccgcccugcagauccccuucgcgaugcagauggccuaccgguucaacgggaucggcgucacccagaacgugcucuacgagaaccagaagcugaucgccaaccaguucaacagcgccaucgggaagauccaggacucccugagcuccaccgccagcgcgcucggcaagcugcaggacguggucaaccagaacgcccaggcccugaacacgcucgugaagcagcuguccagcaacuucggggccaucuccagcgugcugaacgacauccucucccgccuggacccgcccgaggccgagguccagaucgaccggcugaucaccggccgccuccagagccugcagaccuacgugacccagcagcugauccgggcggccgagauccgcgccagcgccaaccucgccgcgaccaagauguccgagugcgugcugggccagagcaagcgggucgacuucugcgggaagggcuaccaccugauguccuucccccagagcgcgccccacggggugguguuccuccacgucacguacgugcccgcccaggagaagaacuucaccaccgccccggccaucugccacgacggcaaggcccacuucccccgcgagggggucuucguguccaacggcacccacugguucgugacgcagcggaacuucuacgagccccagaucaucaccaccgacaacaccuucgucagcggcaacugcgacguggugaucgggaucgucaacaacacgguguacgacccccugcagccggagcuggacuccuucaaggaggagcucgacaaguacuucaagaaccacaccagccccgacguggaccugggcgacaucuccgggaucaacgccagcgucgugaacauccagaaggagaucgaccgccugaacgagguggccaagaaccucaacgagucccugaucgaccugcaggagcucggcaaguacgagcaguacaucaaguggcccugguacaucuggcugggcuucaucgccgggcugaucgcgaucgucauggugaccaucaugcucugcugcaugaccagcugcugcuccugccugaagggcugcugcagcugcggguccugcugcaaguucgacgaggacgacagcgagccggugcugaagggcgucaagcuccacuacacgugaggacuaguuauaagacugacuagcccgaugggccucccaacgggcccuccuccccuccuugcaccgagagaucuaaaaaaaaaaaaaaaaaaaaaaaaaaaaaaaaaaaaaaaaaaaaaaaaaaaaaaaaaaaaaaaaaaaaaaaaaaaaaaaaaaaaaaaaaaaaaaaaaaaa

SEQ ID NO: 25959 - RNA, 4011 nt, Artificial Sequence
  SARS-CoV-2/Wuhan/WIV05/2019__EPI_ISL_402128 spike protein mRNA gc (1-1273)(K986P_V987P_S477N_D614G)
aggagaaagcuuaccauguucguguuccugguccuccugccccuggugagcucccagugcgugaaccucaccacccgcacgcagcugccgcccgccuacaccaacagcuucacccggggcgucuacuaccccgacaagguguuccgcuccagcgugcugcacuccacccaggaccucuuccugcccuucuucagcaacgucacgugguuccacgccauccacguguccgggaccaacggcaccaagcgguucgacaacccggugcugcccuucaacgacggggucuacuucgcgagcaccgagaaguccaacaucauccgcggcuggaucuucgggacgacccucgacagcaagacccagucccugcugaucgugaacaacgccaccaacguggucaucaaggugugcgaguuccaguucugcaacgaccccuuccucggcguguacuaccacaagaacaacaagagcuggauggaguccgaguuccgggucuacagcuccgccaacaacugcacguucgaguacgugagccagcccuuccugauggaccuggagggcaagcaggggaacuucaagaaccuccgcgaguucguguucaagaacaucgacggcuacuucaagaucuacuccaagcacaccccgaucaaccugguccgggaccugccccagggguucagcgcccucgagccccugguggaccugcccaucggcaucaacaucacccgcuuccagacccuccuggcccugcaccgguccuaccucacgccgggggacagcagcuccggcuggaccgcgggcgccgccgccuacuacgugggguaccugcagccccgcaccuuccugcucaaguacaacgagaacggcaccaucacggacgcggucgacugcgcccuggacccccugagcgagaccaagugcacccucaaguccuucaccguggagaaggggaucuaccagacgagcaacuuccgggugcagcccaccgaguccaucguccgcuucccgaacaucaccaaccugugccccuucggcgagguguucaacgccacccgguucgccagcgucuacgccuggaaccgcaagcggaucuccaacugcguggcggacuacagcgugcuguacaacuccgccagcuucuccacguucaagugcuacggcgucagccccaccaagcucaacgaccugugcuucaccaacguguacgccgacuccuucgugauccgcggggacgagguccggcagaucgcccccggccagaccgggaagaucgccgacuacaacuacaagcugccggacgacuucacgggcugcgugaucgcguggaacagcaacaaccucgacuccaaggucgggggcaacuacaacuaccuguaccgccuguuccgcaagagcaaccucaagcccuucgagcgggacaucuccaccgagaucuaccaggccggcaacacccccugcaacgggguggagggcuucaacugcuacuucccccugcagagcuacggguuccagccgaccaacggcgugggguaccagcccuaccggguggucgugcuguccuucgagcuccugcacgcccccgccacggugugcggccccaagaaguccaccaaccuggucaagaacaagugcgugaacuucaacuucaacggccucaccgggaccggcgugcugaccgagagcaacaagaaguuccugccguuccagcaguucgggcgcgacaucgccgacacgaccgacgcgguccgcgacccccagacccuggagauccucgacaucacccccugcagcuucggcggggugagcgugaucacgccgggcaccaacaccuccaaccaggucgccgugcuguaccagggcgugaacugcaccgagguccccguggccauccacgccgaccagcugacgcccaccuggcggguguacagcaccggguccaacgucuuccagacccgcgccggcugccucaucggggcggagcacgugaacaacagcuacgagugcgacauccccaucggcgccggcaucugcgccuccuaccagacgcagaccaacagcccgcggcgcgcccgguccguggcgagccaguccaucaucgccuacaccaugagccugggggccgagaacuccgucgccuacagcaacaacuccaucgccauccccaccaacuucacgaucagcgugaccaccgagauccugcccguguccaugaccaagacgagcgucgacugcaccauguacaucugcggcgacagcaccgagugcuccaaccuccugcugcaguacgggagcuucugcacccagcucaaccgcgcgcugacgggcaucgccguggagcaggacaagaacacccaggagguguucgcccaggucaagcagaucuacaagacgcccccgaucaaggacuucgggggcuucaacuucucccagauccugcccgaccccagcaagcccuccaagcggagcuucaucgaggaccuccuguucaacaaggugacccuggccgacgccggcuucaucaagcaguacggggacugccucggcgacaucgcggcccgcgaccugaucugcgcccagaaguucaacgggcugaccgugcucccgccccugcugaccgacgagaugaucgcccaguacaccuccgcccuccuggcgggcaccaucacgagcggguggaccuucggcgccggcgccgcccugcagauccccuucgcgaugcagauggccuaccgguucaacgggaucggcgucacccagaacgugcucuacgagaaccagaagcugaucgccaaccaguucaacuccgccaucgggaagauccaggacagccuguccagcaccgccuccgcgcucggcaagcugcaggacguggucaaccagaacgcccaggcccugaacacgcucgugaagcagcugagcuccaacuucggggccaucagcuccgugcugaacgacauccucagccgccuggacccgcccgaggccgagguccagaucgaccggcugaucaccggccgccuccagucccugcagaccuacgugacccagcagcugauccgggcggccgagauccgcgccagcgccaaccucgccgcgaccaagaugagcgagugcgugcugggccaguccaagcgggucgacuucugcgggaagggcuaccaccugaugagcuucccccaguccgcgccccacggggugguguuccuccacgucacguacgugcccgcccaggagaagaacuucaccaccgccccggccaucugccacgacggcaaggcccacuucccccgcgagggggucuucgugagcaacggcacccacugguucgugacgcagcggaacuucuacgagccccagaucaucaccaccgacaacaccuucgucuccggcaacugcgacguggugaucgggaucgucaacaacacgguguacgacccccugcagccggagcuggacagcuucaaggaggagcucgacaaguacuucaagaaccacaccucccccgacguggaccugggcgacaucagcgggaucaacgccuccgucgugaacauccagaaggagaucgaccgccugaacgagguggccaagaaccucaacgagagccugaucgaccugcaggagcucggcaaguacgagcaguacaucaaguggcccugguacaucuggcugggcuucaucgccgggcugaucgcgaucgucauggugaccaucaugcucugcugcaugaccuccugcugcagcugccugaagggcugcugcuccugcgggagcugcugcaaguucgacgaggacgacuccgagccggugcugaagggcgucaagcuccacuacacgugaggacuaguuauaagacugacuagcccgaugggccucccaacgggcccuccuccccuccuugcaccgagagaucuaaaaaaaaaaaaaaaaaaaaaaaaaaaaaaaaaaaaaaaaaaaaaaaaaaaaaaaaaaaaaaaaaaaaaaaaaaaaaaaaaaaaaaaaaaaaaaaaaaaa

SEQ ID NO: 25960 - RNA, 4011 nt, Artificial Sequence
  SARS-CoV-2/Wuhan/WIV05/2019__EPI_ISL_402128 spike protein mRNA gc (1-1273)(K986P_V987P_N501Y_D614G)
aggagaaagcuuaccauguucguguuccugguccuccugccccuggugagcucccagugcgugaaccucaccacccgcacgcagcugccgcccgccuacaccaacagcuucacccggggcgucuacuaccccgacaagguguuccgcuccagcgugcugcacuccacccaggaccucuuccugcccuucuucagcaacgucacgugguuccacgccauccacguguccgggaccaacggcaccaagcgguucgacaacccggugcugcccuucaacgacggggucuacuucgcgagcaccgagaaguccaacaucauccgcggcuggaucuucgggacgacccucgacagcaagacccagucccugcugaucgugaacaacgccaccaacguggucaucaaggugugcgaguuccaguucugcaacgaccccuuccucggcguguacuaccacaagaacaacaagagcuggauggaguccgaguuccgggucuacagcuccgccaacaacugcacguucgaguacgugagccagcccuuccugauggaccuggagggcaagcaggggaacuucaagaaccuccgcgaguucguguucaagaacaucgacggcuacuucaagaucuacuccaagcacaccccgaucaaccugguccgggaccugccccagggguucagcgcccucgagccccugguggaccugcccaucggcaucaacaucacccgcuuccagacccuccuggcccugcaccgguccuaccucacgccgggggacagcagcuccggcuggaccgcgggcgccgccgccuacuacgugggguaccugcagccccgcaccuuccugcucaaguacaacgagaacggcaccaucacggacgcggucgacugcgcccuggacccccugagcgagaccaagugcacccucaaguccuucaccguggagaaggggaucuaccagacgagcaacuuccgggugcagcccaccgaguccaucguccgcuucccgaacaucaccaaccugugccccuucggcgagguguucaacgccacccgguucgccagcgucuacgccuggaaccgcaagcggaucuccaacugcguggcggacuacagcgugcuguacaacuccgccagcuucuccacguucaagugcuacggcgucagccccaccaagcucaacgaccugugcuucaccaacguguacgccgacuccuucgugauccgcggggacgagguccggcagaucgcccccggccagaccgggaagaucgccgacuacaacuacaagcugccggacgacuucacgggcugcgugaucgcguggaacagcaacaaccucgacuccaaggucgggggcaacuacaacuaccuguaccgccuguuccgcaagagcaaccucaagcccuucgagcgggacaucuccaccgagaucuaccaggccggcagcacccccugcaacgggguggagggcuucaacugcuacuucccccugcaguccuacggguuccagccgaccuacggcgugggguaccagcccuaccggguggucgugcugagcuucgagcuccugcacgcccccgccacggugugcggccccaagaaguccaccaaccuggucaagaacaagugcgugaacuucaacuucaacggccucaccgggaccggcgugcugaccgagagcaacaagaaguuccugccguuccagcaguucgggcgcgacaucgccgacacgaccgacgcgguccgcgacccccagacccuggagauccucgacaucacccccugcagcuucggcgggguguccgugaucacgccgggcaccaacaccagcaaccaggucgccgugcuguaccagggcgugaacugcaccgagguccccguggccauccacgccgaccagcugacgcccaccuggcggguguacuccaccgggagcaacgucuuccagacccgcgccggcugccucaucggggcggagcacgugaacaacuccuacgagugcgacauccccaucggcgccggcaucugcgccagcuaccagacgcagaccaacuccccgcggcgcgcccggagcguggcgucccagagcaucaucgccuacaccaugucccugggggccgagaacagcgucgccuacuccaacaacagcaucgccauccccaccaacuucacgaucuccgugaccaccgagauccugcccgugagcaugaccaagacgagcgucgacugcaccauguacaucugcggcgacuccaccgagugcagcaaccuccugcugcaguacggguccuucugcacccagcucaaccgcgcgcugacgggcaucgccguggagcaggacaagaacacccaggagguguucgcccaggucaagcagaucuacaagacgcccccgaucaaggacuucgggggcuucaacuucagccagauccugcccgaccccuccaagcccagcaagcgguccuucaucgaggaccuccuguucaacaaggugacccuggccgacgccggcuucaucaagcaguacggggacugccucggcgacaucgcggcccgcgaccugaucugcgcccagaaguucaacgggcugaccgugcucccgccccugcugaccgacgagaugaucgcccaguacaccagcgcccuccuggcgggcaccaucacguccggguggaccuucggcgccggcgccgcccugcagauccccuucgcgaugcagauggccuaccgguucaacgggaucggcgucacccagaacgugcucuacgagaaccagaagcugaucgccaaccaguucaacagcgccaucgggaagauccaggacucccugagcuccaccgccagcgcgcucggcaagcugcaggacguggucaaccagaacgcccaggcccugaacacgcucgugaagcagcuguccagcaacuucggggccaucuccagcgugcugaacgacauccucucccgccuggacccgcccgaggccgagguccagaucgaccggcugaucaccggccgccuccagagccugcagaccuacgugacccagcagcugauccgggcggccgagauccgcgccagcgccaaccucgccgcgaccaagauguccgagugcgugcugggccagagcaagcgggucgacuucugcgggaagggcuaccaccugauguccuucccccagagcgcgccccacggggugguguuccuccacgucacguacgugcccgcccaggagaagaacuucaccaccgccccggccaucugccacgacggcaaggcccacuucccccgcgagggggucuucguguccaacggcacccacugguucgugacgcagcggaacuucuacgagccccagaucaucaccaccgacaacaccuucgucagcggcaacugcgacguggugaucgggaucgucaacaacacgguguacgacccccugcagccggagcuggacuccuucaaggaggagcucgacaaguacuucaagaaccacaccagccccgacguggaccugggcgacaucuccgggaucaacgccagcgucgugaacauccagaaggagaucgaccgccugaacgagguggccaagaaccucaacgagucccugaucgaccugcaggagcucggcaaguacgagcaguacaucaaguggcccugguacaucuggcugggcuucaucgccgggcugaucgcgaucgucauggugaccaucaugcucugcugcaugaccagcugcugcuccugccugaagggcugcugcagcugcggguccugcugcaaguucgacgaggacgacagcgagccggugcugaagggcgucaagcuccacuacacgugaggacuaguuauaagacugacuagcccgaugggccucccaacgggcccuccuccccuccuugcaccgagagaucuaaaaaaaaaaaaaaaaaaaaaaaaaaaaaaaaaaaaaaaaaaaaaaaaaaaaaaaaaaaaaaaaaaaaaaaaaaaaaaaaaaaaaaaaaaaaaaaaaaaa

SEQ ID NO: 25961 - RNA, 4005 nt, Artificial Sequence
  SARS-CoV-2/Wuhan/WIV05/2019__EPI_ISL_402128 spike protein mRNA gc (1-1273)(K986P_V987P_H69del_V70del_D614G)
aggagaaagcuuaccauguucguguuccugguccuccugccccuggugagcucccagugcgugaaccucaccacccgcacgcagcugccgcccgccuacaccaacagcuucacccggggcgucuacuaccccgacaagguguuccgcuccagcgugcugcacuccacccaggaccucuuccugcccuucuucagcaacgucacgugguuccacgccaucuccgggaccaacggcaccaagcgguucgacaacccggugcugcccuucaacgacgggguguacuucgcgagcaccgagaaguccaacaucauccgcggcuggaucuucgggacgacccucgacagcaagacccagucccugcugaucgucaacaacgccaccaacguggugaucaaggucugcgaguuccaguucugcaacgaccccuuccucggcguguacuaccacaagaacaacaagagcuggauggaguccgaguuccggguguacagcuccgccaacaacugcacguucgaguacgucagccagcccuuccugauggaccuggagggcaagcaggggaacuucaagaaccuccgcgaguucguguucaagaacaucgacggcuacuucaagaucuacuccaagcacaccccgaucaaccuggugcgggaccugccccagggguucagcgcccucgagccccuggucgaccugcccaucggcaucaacaucacccgcuuccagacccuccuggcccugcaccgguccuaccucacgccgggggacagcagcuccggcuggaccgcgggcgccgccgccuacuacgugggguaccugcagccccgcaccuuccugcucaaguacaacgagaacggcaccaucacggacgcgguggacugcgcccuggacccccugagcgagaccaagugcacccucaaguccuucaccgucgagaaggggaucuaccagacgagcaacuuccgggugcagcccaccgaguccaucgugcgcuucccgaacaucaccaaccugugccccuucggcgaggucuucaacgccacccgguucgccagcguguacgccuggaaccgcaagcggaucuccaacugcgucgcggacuacagcgugcuguacaacuccgccagcuucuccacguucaagugcuacggcgugagccccaccaagcucaacgaccugugcuucaccaacgucuacgccgacuccuucgugauccgcggggacgaggugcggcagaucgcccccggccagaccgggaagaucgccgacuacaacuacaagcugccggacgacuucacgggcugcgucaucgcguggaacagcaacaaccucgacuccaaggucgggggcaacuacaacuaccuguaccgccuguuccgcaagagcaaccucaagcccuucgagcgggacaucuccaccgagaucuaccaggccggcagcacccccugcaacgggguggagggcuucaacugcuacuucccccugcaguccuacggguuccagccgaccaacggcgugggguaccagcccuaccggguggugguccugagcuucgagcuccugcacgcccccgccacggugugcggccccaagaaguccaccaaccuggugaagaacaagugcgucaacuucaacuucaacggccucaccgggaccggcgugcugaccgagagcaacaagaaguuccugccguuccagcaguucgggcgcgacaucgccgacacgaccgacgcggugcgcgacccccagacccuggagauccucgacaucacccccugcagcuucggcggggucuccgugaucacgccgggcaccaacaccagcaaccagguggccguccuguaccagggcgugaacugcaccgaggugcccgucgccauccacgccgaccagcugacgcccaccuggcggguguacuccaccgggagcaacguguuccagacccgcgccggcugccucaucggggcggagcacgucaacaacuccuacgagugcgacauccccaucggcgccggcaucugcgccagcuaccagacgcagaccaacuccccgcggcgcgcccggagcguggcgucccagagcaucaucgccuacaccaugucccugggggccgagaacagcguggccuacuccaacaacagcaucgccauccccaccaacuucacgaucuccgucaccaccgagauccugcccgugagcaugaccaagacgagcguggacugcaccauguacaucugcggcgacuccaccgagugcagcaaccuccugcugcaguacggguccuucugcacccagcucaaccgcgcgcugacgggcaucgccgucgagcaggacaagaacacccaggagguguucgcccaggugaagcagaucuacaagacgcccccgaucaaggacuucgggggcuucaacuucagccagauccugcccgaccccuccaagcccagcaagcgguccuucaucgaggaccuccuguucaacaaggucacccuggccgacgccggcuucaucaagcaguacggggacugccucggcgacaucgcggcccgcgaccugaucugcgcccagaaguucaacgggcugaccgugcucccgccccugcugaccgacgagaugaucgcccaguacaccagcgcccuccuggcgggcaccaucacguccggguggaccuucggcgccggcgccgcccugcagauccccuucgcgaugcagauggccuaccgguucaacgggaucggcgugacccagaacguccucuacgagaaccagaagcugaucgccaaccaguucaacagcgccaucgggaagauccaggacucccugagcuccaccgccagcgcgcucggcaagcugcaggacguggugaaccagaacgcccaggcccugaacacgcucgucaagcagcuguccagcaacuucggggccaucuccagcgugcugaacgacauccucucccgccuggacccgcccgaggccgaggugcagaucgaccggcugaucaccggccgccuccagagccugcagaccuacgucacccagcagcugauccgggcggccgagauccgcgccagcgccaaccucgccgcgaccaagauguccgagugcgugcugggccagagcaagcggguggacuucugcgggaagggcuaccaccugauguccuucccccagagcgcgccccacggggucguguuccuccacgugacguacguccccgcccaggagaagaacuucaccaccgccccggccaucugccacgacggcaaggcccacuucccccgcgaggggguguucgucuccaacggcacccacugguucgugacgcagcggaacuucuacgagccccagaucaucaccaccgacaacaccuucgugagcggcaacugcgacgucgugaucgggaucgugaacaacacggucuacgacccccugcagccggagcuggacuccuucaaggaggagcucgacaaguacuucaagaaccacaccagccccgacguggaccugggcgacaucuccgggaucaacgccagcguggucaacauccagaaggagaucgaccgccugaacgagguggccaagaaccucaacgagucccugaucgaccugcaggagcucggcaaguacgagcaguacaucaaguggcccugguacaucuggcugggcuucaucgccgggcugaucgcgaucgugauggucaccaucaugcucugcugcaugaccagcugcugcuccugccugaagggcugcugcagcugcggguccugcugcaaguucgacgaggacgacagcgagccggugcugaagggcgugaagcuccacuacacgugaggacuaguuauaagacugacuagcccgaugggccucccaacgggcccuccuccccuccuugcaccgagagaucuaaaaaaaaaaaaaaaaaaaaaaaaaaaaaaaaaaaaaaaaaaaaaaaaaaaaaaaaaaaaaaaaaaaaaaaaaaaaaaaaaaaaaaaaaaaaaaaaaaaa

SEQ ID NO: 25962 - RNA, 4011 nt, Artificial Sequence
  SARS-CoV-2/Wuhan/WIV05/2019__EPI_ISL_402128 spike protein mRNA gc (1-1273)(K986P_V987P_Y453F_D614G)
aggagaaagcuuaccauguucguguuccugguccuccugccccuggugagcucccagugcgugaaccucaccacccgcacgcagcugccgcccgccuacaccaacagcuucacccggggcgucuacuaccccgacaagguguuccgcuccagcgugcugcacuccacccaggaccucuuccugcccuucuucagcaacgucacgugguuccacgccauccacguguccgggaccaacggcaccaagcgguucgacaacccggugcugcccuucaacgacggggucuacuucgcgagcaccgagaaguccaacaucauccgcggcuggaucuucgggacgacccucgacagcaagacccagucccugcugaucgugaacaacgccaccaacguggucaucaaggugugcgaguuccaguucugcaacgaccccuuccucggcguguacuaccacaagaacaacaagagcuggauggaguccgaguuccgggucuacagcuccgccaacaacugcacguucgaguacgugagccagcccuuccugauggaccuggagggcaagcaggggaacuucaagaaccuccgcgaguucguguucaagaacaucgacggcuacuucaagaucuacuccaagcacaccccgaucaaccugguccgggaccugccccagggguucagcgcccucgagccccugguggaccugcccaucggcaucaacaucacccgcuuccagacccuccuggcccugcaccgguccuaccucacgccgggggacagcagcuccggcuggaccgcgggcgccgccgccuacuacgugggguaccugcagccccgcaccuuccugcucaaguacaacgagaacggcaccaucacggacgcggucgacugcgcccuggacccccugagcgagaccaagugcacccucaaguccuucaccguggagaaggggaucuaccagacgagcaacuuccgggugcagcccaccgaguccaucguccgcuucccgaacaucaccaaccugugccccuucggcgagguguucaacgccacccgguucgccagcgucuacgccuggaaccgcaagcggaucuccaacugcguggcggacuacagcgugcuguacaacuccgccagcuucuccacguucaagugcuacggcgucagccccaccaagcucaacgaccugugcuucaccaacguguacgccgacuccuucgugauccgcggggacgagguccggcagaucgcccccggccagaccgggaagaucgccgacuacaacuacaagcugccggacgacuucacgggcugcgugaucgcguggaacagcaacaaccucgacuccaaggucgggggcaacuacaacuaccuguuccgccuguuccgcaagagcaaccucaagcccuucgagcgggacaucuccaccgagaucuaccaggccggcagcacccccugcaacgggguggagggcuucaacugcuacuucccccugcaguccuacggguuccagccgaccaacggcgugggguaccagcccuaccggguggucgugcugagcuucgagcuccugcacgcccccgccacggugugcggccccaagaaguccaccaaccuggucaagaacaagugcgugaacuucaacuucaacggccucaccgggaccggcgugcugaccgagagcaacaagaaguuccugccguuccagcaguucgggcgcgacaucgccgacacgaccgacgcgguccgcgacccccagacccuggagauccucgacaucacccccugcagcuucggcgggguguccgugaucacgccgggcaccaacaccagcaaccaggucgccgugcuguaccagggcgugaacugcaccgagguccccguggccauccacgccgaccagcugacgcccaccuggcggguguacuccaccgggagcaacgucuuccagacccgcgccggcugccucaucggggcggagcacgugaacaacuccuacgagugcgacauccccaucggcgccggcaucugcgccagcuaccagacgcagaccaacuccccgcggcgcgcccggagcguggcgucccagagcaucaucgccuacaccaugucccugggggccgagaacagcgucgccuacuccaacaacagcaucgccauccccaccaacuucacgaucuccgugaccaccgagauccugcccgugagcaugaccaagacgagcgucgacugcaccauguacaucugcggcgacuccaccgagugcagcaaccuccugcugcaguacggguccuucugcacccagcucaaccgcgcgcugacgggcaucgccguggagcaggacaagaacacccaggagguguucgcccaggucaagcagaucuacaagacgcccccgaucaaggacuucgggggcuucaacuucagccagauccugcccgaccccuccaagcccagcaagcgguccuucaucgaggaccuccuguucaacaaggugacccuggccgacgccggcuucaucaagcaguacggggacugccucggcgacaucgcggcccgcgaccugaucugcgcccagaaguucaacgggcugaccgugcucccgccccugcugaccgacgagaugaucgcccaguacaccagcgcccuccuggcgggcaccaucacguccggguggaccuucggcgccggcgccgcccugcagauccccuucgcgaugcagauggccuaccgguucaacgggaucggcgucacccagaacgugcucuacgagaaccagaagcugaucgccaaccaguucaacagcgccaucgggaagauccaggacucccugagcuccaccgccagcgcgcucggcaagcugcaggacguggucaaccagaacgcccaggcccugaacacgcucgugaagcagcuguccagcaacuucggggccaucuccagcgugcugaacgacauccucucccgccuggacccgcccgaggccgagguccagaucgaccggcugaucaccggccgccuccagagccugcagaccuacgugacccagcagcugauccgggcggccgagauccgcgccagcgccaaccucgccgcgaccaagauguccgagugcgugcugggccagagcaagcgggucgacuucugcgggaagggcuaccaccugauguccuucccccagagcgcgccccacggggugguguuccuccacgucacguacgugcccgcccaggagaagaacuucaccaccgccccggccaucugccacgacggcaaggcccacuucccccgcgagggggucuucguguccaacggcacccacugguucgugacgcagcggaacuucuacgagccccagaucaucaccaccgacaacaccuucgucagcggcaacugcgacguggugaucgggaucgucaacaacacgguguacgacccccugcagccggagcuggacuccuucaaggaggagcucgacaaguacuucaagaaccacaccagccccgacguggaccugggcgacaucuccgggaucaacgccagcgucgugaacauccagaaggagaucgaccgccugaacgagguggccaagaaccucaacgagucccugaucgaccugcaggagcucggcaaguacgagcaguacaucaaguggcccugguacaucuggcugggcuucaucgccgggcugaucgcgaucgucauggugaccaucaugcucugcugcaugaccagcugcugcuccugccugaagggcugcugcagcugcggguccugcugcaaguucgacgaggacgacagcgagccggugcugaagggcgucaagcuccacuacacgugaggacuaguuauaagacugacuagcccgaugggccucccaacgggcccuccuccccuccuugcaccgagagaucuaaaaaaaaaaaaaaaaaaaaaaaaaaaaaaaaaaaaaaaaaaaaaaaaaaaaaaaaaaaaaaaaaaaaaaaaaaaaaaaaaaaaaaaaaaaaaaaaaaaa

SEQ ID NO: 25963 - RNA, 4011 nt, Artificial Sequence
  SARS-CoV-2/Wuhan/WIV05/2019__EPI_ISL_402128 spike protein mRNA gc (1-1273)(K986P_V987P_D614G_I692V)
aggagaaagcuuaccauguucguguuccugguccuccugccccuggugagcucccagugcgugaaccucaccacccgcacgcagcugccgcccgccuacaccaacagcuucacccggggcgucuacuaccccgacaagguguuccgcuccagcgugcugcacuccacccaggaccucuuccugcccuucuucagcaacgucacgugguuccacgccauccacguguccgggaccaacggcaccaagcgguucgacaacccggugcugcccuucaacgacggggucuacuucgcgagcaccgagaaguccaacaucauccgcggcuggaucuucgggacgacccucgacagcaagacccagucccugcugaucgugaacaacgccaccaacguggucaucaaggugugcgaguuccaguucugcaacgaccccuuccucggcguguacuaccacaagaacaacaagagcuggauggaguccgaguuccgggucuacagcuccgccaacaacugcacguucgaguacgugagccagcccuuccugauggaccuggagggcaagcaggggaacuucaagaaccuccgcgaguucguguucaagaacaucgacggcuacuucaagaucuacuccaagcacaccccgaucaaccugguccgggaccugccccagggguucagcgcccucgagccccugguggaccugcccaucggcaucaacaucacccgcuuccagacccuccuggcccugcaccgguccuaccucacgccgggggacagcagcuccggcuggaccgcgggcgccgccgccuacuacgugggguaccugcagccccgcaccuuccugcucaaguacaacgagaacggcaccaucacggacgcggucgacugcgcccuggacccccugagcgagaccaagugcacccucaaguccuucaccguggagaaggggaucuaccagacgagcaacuuccgggugcagcccaccgaguccaucguccgcuucccgaacaucaccaaccugugccccuucggcgagguguucaacgccacccgguucgccagcgucuacgccuggaaccgcaagcggaucuccaacugcguggcggacuacagcgugcuguacaacuccgccagcuucuccacguucaagugcuacggcgucagccccaccaagcucaacgaccugugcuucaccaacguguacgccgacuccuucgugauccgcggggacgagguccggcagaucgcccccggccagaccgggaagaucgccgacuacaacuacaagcugccggacgacuucacgggcugcgugaucgcguggaacagcaacaaccucgacuccaaggucgggggcaacuacaacuaccuguaccgccuguuccgcaagagcaaccucaagcccuucgagcgggacaucuccaccgagaucuaccaggccggcagcacccccugcaacgggguggagggcuucaacugcuacuucccccugcaguccuacggguuccagccgaccaacggcgugggguaccagcccuaccggguggucgugcugagcuucgagcuccugcacgcccccgccacggugugcggccccaagaaguccaccaaccuggucaagaacaagugcgugaacuucaacuucaacggccucaccgggaccggcgugcugaccgagagcaacaagaaguuccugccguuccagcaguucgggcgcgacaucgccgacacgaccgacgcgguccgcgacccccagacccuggagauccucgacaucacccccugcagcuucggcgggguguccgugaucacgccgggcaccaacaccagcaaccaggucgccgugcuguaccagggcgugaacugcaccgagguccccguggccauccacgccgaccagcugacgcccaccuggcggguguacuccaccgggagcaacgucuuccagacccgcgccggcugccucaucggggcggagcacgugaacaacuccuacgagugcgacauccccaucggcgccggcaucugcgccagcuaccagacgcagaccaacuccccgcggcgcgcccggagcguggcgucccagagcgucaucgccuacaccaugucccugggggccgagaacagcguggccuacuccaacaacagcaucgccauccccaccaacuucacgaucuccgugaccaccgagauccugcccgucagcaugaccaagacgagcguggacugcaccauguacaucugcggcgacuccaccgagugcagcaaccuccugcugcaguacggguccuucugcacccagcucaaccgcgcgcugacgggcaucgccguggagcaggacaagaacacccaggaggucuucgcccaggugaagcagaucuacaagacgcccccgaucaaggacuucgggggcuucaacuucagccagauccugcccgaccccuccaagcccagcaagcgguccuucaucgaggaccuccuguucaacaaggugacccuggccgacgccggcuucaucaagcaguacggggacugccucggcgacaucgcggcccgcgaccugaucugcgcccagaaguucaacgggcugaccguccucccgccccugcugaccgacgagaugaucgcccaguacaccagcgcccuccuggcgggcaccaucacguccggguggaccuucggcgccggcgccgcccugcagauccccuucgcgaugcagauggccuaccgguucaacgggaucggcgugacccagaacgugcucuacgagaaccagaagcugaucgccaaccaguucaacagcgccaucgggaagauccaggacucccugagcuccaccgccagcgcgcucggcaagcugcaggacgucgugaaccagaacgcccaggcccugaacacgcucgugaagcagcuguccagcaacuucggggccaucuccagcguccugaacgacauccucucccgccuggacccgcccgaggccgaggugcagaucgaccggcugaucaccggccgccuccagagccugcagaccuacgugacccagcagcugauccgggcggccgagauccgcgccagcgccaaccucgccgcgaccaagauguccgagugcguccugggccagagcaagcggguggacuucugcgggaagggcuaccaccugauguccuucccccagagcgcgccccacgggguggucuuccuccacgugacguacguccccgcccaggagaagaacuucaccaccgccccggccaucugccacgacggcaaggcccacuucccccgcgaggggguguucguguccaacggcacccacugguucgucacgcagcggaacuucuacgagccccagaucaucaccaccgacaacaccuucgugagcggcaacugcgacguggucaucgggaucgugaacaacacgguguacgacccccugcagccggagcuggacuccuucaaggaggagcucgacaaguacuucaagaaccacaccagccccgacgucgaccugggcgacaucuccgggaucaacgccagcguggugaacauccagaaggagaucgaccgccugaacgaggucgccaagaaccucaacgagucccugaucgaccugcaggagcucggcaaguacgagcaguacaucaaguggcccugguacaucuggcugggcuucaucgccgggcugaucgcgaucgugauggugaccaucaugcucugcugcaugaccagcugcugcuccugccugaagggcugcugcagcugcggguccugcugcaaguucgacgaggacgacagcgagccgguccugaagggcgugaagcuccacuacacgugaggacuaguuauaagacugacuagcccgaugggccucccaacgggcccuccuccccuccuugcaccgagagaucuaaaaaaaaaaaaaaaaaaaaaaaaaaaaaaaaaaaaaaaaaaaaaaaaaaaaaaaaaaaaaaaaaaaaaaaaaaaaaaaaaaaaaaaaaaaaaaaaaaaa

SEQ ID NO: 25964 - RNA, 4011 nt, Artificial Sequence
  SARS-CoV-2/Wuhan/WIV05/2019__EPI_ISL_402128 spike protein mRNA gc (1-1273)(K986P_V987P_D614G_M1229I)
aggagaaagcuuaccauguucguguuccugguccuccugccccuggugagcucccagugcgugaaccucaccacccgcacgcagcugccgcccgccuacaccaacagcuucacccggggcgucuacuaccccgacaagguguuccgcuccagcgugcugcacuccacccaggaccucuuccugcccuucuucagcaacgucacgugguuccacgccauccacguguccgggaccaacggcaccaagcgguucgacaacccggugcugcccuucaacgacggggucuacuucgcgagcaccgagaaguccaacaucauccgcggcuggaucuucgggacgacccucgacagcaagacccagucccugcugaucgugaacaacgccaccaacguggucaucaaggugugcgaguuccaguucugcaacgaccccuuccucggcguguacuaccacaagaacaacaagagcuggauggaguccgaguuccgggucuacagcuccgccaacaacugcacguucgaguacgugagccagcccuuccugauggaccuggagggcaagcaggggaacuucaagaaccuccgcgaguucguguucaagaacaucgacggcuacuucaagaucuacuccaagcacaccccgaucaaccugguccgggaccugccccagggguucagcgcccucgagccccugguggaccugcccaucggcaucaacaucacccgcuuccagacccuccuggcccugcaccgguccuaccucacgccgggggacagcagcuccggcuggaccgcgggcgccgccgccuacuacgugggguaccugcagccccgcaccuuccugcucaaguacaacgagaacggcaccaucacggacgcggucgacugcgcccuggacccccugagcgagaccaagugcacccucaaguccuucaccguggagaaggggaucuaccagacgagcaacuuccgggugcagcccaccgaguccaucguccgcuucccgaacaucaccaaccugugccccuucggcgagguguucaacgccacccgguucgccagcgucuacgccuggaaccgcaagcggaucuccaacugcguggcggacuacagcgugcuguacaacuccgccagcuucuccacguucaagugcuacggcgucagccccaccaagcucaacgaccugugcuucaccaacguguacgccgacuccuucgugauccgcggggacgagguccggcagaucgcccccggccagaccgggaagaucgccgacuacaacuacaagcugccggacgacuucacgggcugcgugaucgcguggaacagcaacaaccucgacuccaaggucgggggcaacuacaacuaccuguaccgccuguuccgcaagagcaaccucaagcccuucgagcgggacaucuccaccgagaucuaccaggccggcagcacccccugcaacgggguggagggcuucaacugcuacuucccccugcaguccuacggguuccagccgaccaacggcgugggguaccagcccuaccggguggucgugcugagcuucgagcuccugcacgcccccgccacggugugcggccccaagaaguccaccaaccuggucaagaacaagugcgugaacuucaacuucaacggccucaccgggaccggcgugcugaccgagagcaacaagaaguuccugccguuccagcaguucgggcgcgacaucgccgacacgaccgacgcgguccgcgacccccagacccuggagauccucgacaucacccccugcagcuucggcgggguguccgugaucacgccgggcaccaacaccagcaaccaggucgccgugcuguaccagggcgugaacugcaccgagguccccguggccauccacgccgaccagcugacgcccaccuggcggguguacuccaccgggagcaacgucuuccagacccgcgccggcugccucaucggggcggagcacgugaacaacuccuacgagugcgacauccccaucggcgccggcaucugcgccagcuaccagacgcagaccaacuccccgcggcgcgcccggagcguggcgucccagagcaucaucgccuacaccaugucccugggggccgagaacagcgucgccuacuccaacaacagcaucgccauccccaccaacuucacgaucuccgugaccaccgagauccugcccgugagcaugaccaagacgagcgucgacugcaccauguacaucugcggcgacuccaccgagugcagcaaccuccugcugcaguacggguccuucugcacccagcucaaccgcgcgcugacgggcaucgccguggagcaggacaagaacacccaggagguguucgcccaggucaagcagaucuacaagacgcccccgaucaaggacuucgggggcuucaacuucagccagauccugcccgaccccuccaagcccagcaagcgguccuucaucgaggaccuccuguucaacaaggugacccuggccgacgccggcuucaucaagcaguacggggacugccucggcgacaucgcggcccgcgaccugaucugcgcccagaaguucaacgggcugaccgugcucccgccccugcugaccgacgagaugaucgcccaguacaccagcgcccuccuggcgggcaccaucacguccggguggaccuucggcgccggcgccgcccugcagauccccuucgcgaugcagauggccuaccgguucaacgggaucggcgucacccagaacgugcucuacgagaaccagaagcugaucgccaaccaguucaacagcgccaucgggaagauccaggacucccugagcuccaccgccagcgcgcucggcaagcugcaggacguggucaaccagaacgcccaggcccugaacacgcucgugaagcagcuguccagcaacuucggggccaucuccagcgugcugaacgacauccucucccgccuggacccgcccgaggccgagguccagaucgaccggcugaucaccggccgccuccagagccugcagaccuacgugacccagcagcugauccgggcggccgagauccgcgccagcgccaaccucgccgcgaccaagauguccgagugcgugcugggccagagcaagcgggucgacuucugcgggaagggcuaccaccugauguccuucccccagagcgcgccccacggggugguguuccuccacgucacguacgugcccgcccaggagaagaacuucaccaccgccccggccaucugccacgacggcaaggcccacuucccccgcgagggggucuucguguccaacggcacccacugguucgugacgcagcggaacuucuacgagccccagaucaucaccaccgacaacaccuucgucagcggcaacugcgacguggugaucgggaucgucaacaacacgguguacgacccccugcagccggagcuggacuccuucaaggaggagcucgacaaguacuucaagaaccacaccagccccgacguggaccugggcgacaucuccgggaucaacgccagcgucgugaacauccagaaggagaucgaccgccugaacgagguggccaagaaccucaacgagucccugaucgaccugcaggagcucggcaaguacgagcaguacaucaaguggcccugguacaucuggcugggcuucaucgccgggcugaucgcgaucgucaucgugaccaucaugcucugcugcaugaccagcugcugcuccugccugaagggcugcugcagcugcggguccugcugcaaguucgacgaggacgacagcgagccggugcugaagggcgucaagcuccacuacacgugaggacuaguuauaagacugacuagcccgaugggccucccaacgggcccuccuccccuccuugcaccgagagaucuaaaaaaaaaaaaaaaaaaaaaaaaaaaaaaaaaaaaaaaaaaaaaaaaaaaaaaaaaaaaaaaaaaaaaaaaaaaaaaaaaaaaaaaaaaaaaaaaaaaa

SEQ ID NO: 25965 - RNA, 4005 nt, Artificial Sequence
  SARS-CoV-2/Wuhan/WIV05/2019__EPI_ISL_402128 spike protein mRNA gc (1-1273)(K986P_V987P_H69del_V70del_A222V_Y453F_S477N_D614G_I692V)
aggagaaagcuuaccauguucguguuccugguccuccugccccuggugagcucccagugcgugaaccucaccacccgcacgcagcugccgcccgccuacaccaacagcuucacccggggcgucuacuaccccgacaagguguuccgcuccagcgugcugcacuccacccaggaccucuuccugcccuucuucagcaacgucacgugguuccacgccaucuccgggaccaacggcaccaagcgguucgacaacccggugcugcccuucaacgacgggguguacuucgcgagcaccgagaaguccaacaucauccgcggcuggaucuucgggacgacccucgacagcaagacccagucccugcugaucgucaacaacgccaccaacguggugaucaaggucugcgaguuccaguucugcaacgaccccuuccucggcguguacuaccacaagaacaacaagagcuggauggaguccgaguuccggguguacagcuccgccaacaacugcacguucgaguacgucagccagcccuuccugauggaccuggagggcaagcaggggaacuucaagaaccuccgcgaguucguguucaagaacaucgacggcuacuucaagaucuacuccaagcacaccccgaucaaccuggugcgggaccugccccagggguucagcguccucgagccccugguggaccugcccaucggcaucaacaucacccgcuuccagacccuccuggcccugcaccgguccuaccucacgccgggggacagcagcuccggcuggaccgccggcgcggccgccuacuacgugggguaccugcagccccgcaccuuccugcucaaguacaacgagaacggcaccaucacggacgccgucgacugcgcgcuggacccccugagcgagaccaagugcacccucaaguccuucaccguggagaaggggaucuaccagacgagcaacuuccgggugcagcccaccgaguccaucguccgcuucccgaacaucaccaaccugugccccuucggcgagguguucaacgccacccgguucgccagcgucuacgccuggaaccgcaagcggaucuccaacugcguggccgacuacagcgugcuguacaacuccgcgagcuucuccacguucaagugcuacggcgucagccccaccaagcucaacgaccugugcuucaccaacguguacgccgacuccuucgugauccgcggggacgagguccggcagaucgcccccggccagaccgggaagaucgccgacuacaacuacaagcugccggacgacuucacgggcugcgugaucgccuggaacagcaacaaccucgacuccaaggucgggggcaacuacaacuaccuguuccgccuguuccgcaagagcaaccucaagcccuucgagcgggacaucuccaccgagaucuaccaggcgggcaacacccccugcaacgggguggagggcuucaacugcuacuucccccugcagagcuacggguuccagccgaccaacggcgugggguaccagcccuaccggguggucgugcuguccuucgagcuccugcacgcccccgccacggugugcggccccaagaaguccaccaaccuggucaagaacaagugcgugaacuucaacuucaacggccucaccgggaccggcgugcugaccgagagcaacaagaaguuccugccguuccagcaguucgggcgcgacaucgccgacacgaccgacgccguccgcgacccccagacccuggagauccucgacaucacccccugcagcuucggcggggugagcgugaucacgccgggcaccaacaccuccaaccaggucgcggugcuguaccagggcgugaacugcaccgagguccccguggccauccacgccgaccagcugacgcccaccuggcggguguacagcaccggguccaacgucuuccagacccgcgccggcugccucaucggggccgagcacgugaacaacagcuacgagugcgacauccccaucggcgcgggcaucugcgccuccuaccagacgcagaccaacagcccgcggcgcgcccgguccguggccagccaguccgucaucgcguacaccaugagccugggggccgagaacuccguggccuacagcaacaacuccaucgccauccccaccaacuucacgaucagcgugaccaccgagauccugcccgucuccaugaccaagacgagcguggacugcaccauguacaucugcggcgacagcaccgagugcuccaaccuccugcugcaguacgggagcuucugcacccagcucaaccgcgcccugacgggcaucgcgguggagcaggacaagaacacccaggaggucuucgcccaggugaagcagaucuacaagacgcccccgaucaaggacuucgggggcuucaacuucucccagauccugcccgaccccagcaagcccuccaagcggagcuucaucgaggaccuccuguucaacaaggugacccuggccgacgccggcuucaucaagcaguacggggacugccucggcgacaucgccgcgcgcgaccugaucugcgcccagaaguucaacgggcugaccguccucccgccccugcugaccgacgagaugaucgcccaguacaccuccgcccuccuggccggcaccaucacgagcggguggaccuucggcgcgggcgccgcccugcagauccccuucgccaugcagauggcguaccgguucaacgggaucggcgugacccagaacgugcucuacgagaaccagaagcugaucgccaaccaguucaacuccgccaucgggaagauccaggacagccuguccagcaccgccuccgcccucggcaagcugcaggacgucgugaaccagaacgcgcaggcccugaacacgcucgugaagcagcugagcuccaacuucggggccaucagcuccguccugaacgacauccucagccgccuggacccgcccgaggccgaggugcagaucgaccggcugaucaccggccgccuccagucccugcagaccuacgugacccagcagcugauccgggccgcggagauccgcgccagcgccaaccucgccgccaccaagaugagcgagugcguccugggccaguccaagcggguggacuucugcgggaagggcuaccaccugaugagcuucccccaguccgcgccccacgggguggucuuccuccacgugacguacguccccgcccaggagaagaacuucaccaccgccccggccaucugccacgacggcaaggcgcacuucccccgcgaggggguguucgugagcaacggcacccacugguucgucacgcagcggaacuucuacgagccccagaucaucaccaccgacaacaccuucguguccggcaacugcgacguggucaucgggaucgugaacaacacgguguacgacccccugcagccggagcuggacagcuucaaggaggagcucgacaaguacuucaagaaccacaccucccccgacgucgaccugggcgacaucagcgggaucaacgccuccguggugaacauccagaaggagaucgaccgccugaacgaggucgccaagaaccucaacgagagccugaucgaccugcaggagcucggcaaguacgagcaguacaucaaguggcccugguacaucuggcugggcuucaucgccgggcugaucgccaucgugauggugaccaucaugcucugcugcaugaccuccugcugcagcugccugaagggcugcugcuccugcgggagcugcugcaaguucgacgaggacgacuccgagccgguccugaagggcgugaagcuccacuacacgugaggacuaguuauaagacugacuagcccgaugggccucccaacgggcccuccuccccuccuugcaccgagagaucuaaaaaaaaaaaaaaaaaaaaaaaaaaaaaaaaaaaaaaaaaaaaaaaaaaaaaaaaaaaaaaaaaaaaaaaaaaaaaaaaaaaaaaaaaaaaaaaaaaaa

SEQ ID NO: 25966 - RNA, 4005 nt, Artificial Sequence
  SARS-CoV-2/Wuhan/WIV05/2019__EPI_ISL_402128 spike protein mRNA gc (1-1273)(K986P_V987P_H69del_V70del_Y453F_D614G_I692V_M1229I)
aggagaaagcuuaccauguucguguuccugguccuccugccccuggugagcucccagugcgugaaccucaccacccgcacgcagcugccgcccgccuacaccaacagcuucacccggggcgucuacuaccccgacaagguguuccgcuccagcgugcugcacuccacccaggaccucuuccugcccuucuucagcaacgucacgugguuccacgccaucuccgggaccaacggcaccaagcgguucgacaacccggugcugcccuucaacgacgggguguacuucgcgagcaccgagaaguccaacaucauccgcggcuggaucuucgggacgacccucgacagcaagacccagucccugcugaucgucaacaacgccaccaacguggugaucaaggucugcgaguuccaguucugcaacgaccccuuccucggcguguacuaccacaagaacaacaagagcuggauggaguccgaguuccggguguacagcuccgccaacaacugcacguucgaguacgucagccagcccuuccugauggaccuggagggcaagcaggggaacuucaagaaccuccgcgaguucguguucaagaacaucgacggcuacuucaagaucuacuccaagcacaccccgaucaaccuggugcgggaccugccccagggguucagcgcccucgagccccuggucgaccugcccaucggcaucaacaucacccgcuuccagacccuccuggcccugcaccgguccuaccucacgccgggggacagcagcuccggcuggaccgcgggcgccgccgccuacuacgugggguaccugcagccccgcaccuuccugcucaaguacaacgagaacggcaccaucacggacgcgguggacugcgcccuggacccccugagcgagaccaagugcacccucaaguccuucaccgucgagaaggggaucuaccagacgagcaacuuccgggugcagcccaccgaguccaucgugcgcuucccgaacaucaccaaccugugccccuucggcgaggucuucaacgccacccgguucgccagcguguacgccuggaaccgcaagcggaucuccaacugcgucgcggacuacagcgugcuguacaacuccgccagcuucuccacguucaagugcuacggcgugagccccaccaagcucaacgaccugugcuucaccaacgucuacgccgacuccuucgugauccgcggggacgaggugcggcagaucgcccccggccagaccgggaagaucgccgacuacaacuacaagcugccggacgacuucacgggcugcgucaucgcguggaacagcaacaaccucgacuccaaggucgggggcaacuacaacuaccuguuccgccuguuccgcaagagcaaccucaagcccuucgagcgggacaucuccaccgagaucuaccaggccggcagcacccccugcaacgggguggagggcuucaacugcuacuucccccugcaguccuacggguuccagccgaccaacggcgugggguaccagcccuaccggguggugguccugagcuucgagcuccugcacgcccccgccacggugugcggccccaagaaguccaccaaccuggugaagaacaagugcgucaacuucaacuucaacggccucaccgggaccggcgugcugaccgagagcaacaagaaguuccugccguuccagcaguucgggcgcgacaucgccgacacgaccgacgcggugcgcgacccccagacccuggagauccucgacaucacccccugcagcuucggcggggucuccgugaucacgccgggcaccaacaccagcaaccagguggccguccuguaccagggcgugaacugcaccgaggugcccgucgccauccacgccgaccagcugacgcccaccuggcggguguacuccaccgggagcaacguguuccagacccgcgccggcugccucaucggggcggagcacgucaacaacuccuacgagugcgacauccccaucggcgccggcaucugcgccagcuaccagacgcagaccaacuccccgcggcgcgcccggagcguggcgucccagagcgugaucgccuacaccaugucccugggggccgagaacagcgucgccuacuccaacaacagcaucgccauccccaccaacuucacgaucuccgugaccaccgagauccugcccgugagcaugaccaagacgagcgucgacugcaccauguacaucugcggcgacuccaccgagugcagcaaccuccugcugcaguacggguccuucugcacccagcucaaccgcgcgcugacgggcaucgccguggagcaggacaagaacacccaggagguguucgcccaggucaagcagaucuacaagacgcccccgaucaaggacuucgggggcuucaacuucagccagauccugcccgaccccuccaagcccagcaagcgguccuucaucgaggaccuccuguucaacaaggugacccuggccgacgccggcuucaucaagcaguacggggacugccucggcgacaucgcggcccgcgaccugaucugcgcccagaaguucaacgggcugaccgugcucccgccccugcugaccgacgagaugaucgcccaguacaccagcgcccuccuggcgggcaccaucacguccggguggaccuucggcgccggcgccgcccugcagauccccuucgcgaugcagauggccuaccgguucaacgggaucggcgucacccagaacgugcucuacgagaaccagaagcugaucgccaaccaguucaacagcgccaucgggaagauccaggacucccugagcuccaccgccagcgcgcucggcaagcugcaggacguggucaaccagaacgcccaggcccugaacacgcucgugaagcagcuguccagcaacuucggggccaucuccagcgugcugaacgacauccucucccgccuggacccgcccgaggccgagguccagaucgaccggcugaucaccggccgccuccagagccugcagaccuacgugacccagcagcugauccgggcggccgagauccgcgccagcgccaaccucgccgcgaccaagauguccgagugcgugcugggccagagcaagcgggucgacuucugcgggaagggcuaccaccugauguccuucccccagagcgcgccccacggggugguguuccuccacgucacguacgugcccgcccaggagaagaacuucaccaccgccccggccaucugccacgacggcaaggcccacuucccccgcgagggggucuucguguccaacggcacccacugguucgugacgcagcggaacuucuacgagccccagaucaucaccaccgacaacaccuucgucagcggcaacugcgacguggugaucgggaucgucaacaacacgguguacgacccccugcagccggagcuggacuccuucaaggaggagcucgacaaguacuucaagaaccacaccagccccgacguggaccugggcgacaucuccgggaucaacgccagcgucgugaacauccagaaggagaucgaccgccugaacgagguggccaagaaccucaacgagucccugaucgaccugcaggagcucggcaaguacgagcaguacaucaaguggcccugguacaucuggcugggcuucaucgccgggcugaucgcgaucgucaucgugaccaucaugcucugcugcaugaccagcugcugcuccugccugaagggcugcugcagcugcggguccugcugcaaguucgacgaggacgacagcgagccggugcugaagggcgucaagcuccacuacacgugaggacuaguuauaagacugacuagcccgaugggccucccaacgggcccuccuccccuccuugcaccgagagaucuaaaaaaaaaaaaaaaaaaaaaaaaaaaaaaaaaaaaaaaaaaaaaaaaaaaaaaaaaaaaaaaaaaaaaaaaaaaaaaaaaaaaaaaaaaaaaaaaaaaa

SEQ ID NO: 25967 - RNA, 4002 nt, Artificial Sequence
  SARS-CoV-2/Wuhan/WIV05/2019__EPI_ISL_402128 spike protein mRNA gc (1-1273)(K986P_V987P_K986P_V987P_H69del_V70del_Y144del_N501Y_A570 D_D614G_P681H_T716I_S982A_D1118H)
aggagaaagcuuaccauguucguguuccugguccuccugccccuggugagcucccagugcgugaaccucaccacccgcacgcagcugccgcccgccuacaccaacagcuucacccggggcgucuacuaccccgacaagguguuccgcuccagcgugcugcacuccacccaggaccucuuccugcccuucuucagcaacgucacgugguuccacgccaucuccgggaccaacggcaccaagcgguucgacaacccggugcugcccuucaacgacgggguguacuucgcgagcaccgagaaguccaacaucauccgcggcuggaucuucgggacgacccucgacagcaagacccagucccugcugaucgucaacaacgccaccaacguggugaucaaggucugcgaguuccaguucugcaacgaccccuuccucggcguguaccacaagaacaacaagagcuggauggaguccgaguuccggguguacagcuccgccaacaacugcacguucgaguacgucagccagcccuuccugauggaccuggagggcaagcaggggaacuucaagaaccuccgcgaguucguguucaagaacaucgacggcuacuucaagaucuacuccaagcacaccccgaucaaccuggugcgggaccugccccagggguucagcgcccucgagccccuggucgaccugcccaucggcaucaacaucacccgcuuccagacccuccuggcccugcaccgguccuaccucacgccgggggacagcagcuccggcuggaccgcgggcgccgccgccuacuacgugggguaccugcagccccgcaccuuccugcucaaguacaacgagaacggcaccaucacggacgcgguggacugcgcccuggacccccugagcgagaccaagugcacccucaaguccuucaccgucgagaaggggaucuaccagacgagcaacuuccgggugcagcccaccgaguccaucgugcgcuucccgaacaucaccaaccugugccccuucggcgaggucuucaacgccacccgguucgccagcguguacgccuggaaccgcaagcggaucuccaacugcgucgcggacuacagcgugcuguacaacuccgccagcuucuccacguucaagugcuacggcgugagccccaccaagcucaacgaccugugcuucaccaacgucuacgccgacuccuucgugauccgcggggacgaggugcggcagaucgcccccggccagaccgggaagaucgccgacuacaacuacaagcugccggacgacuucacgggcugcgucaucgcguggaacagcaacaaccucgacuccaaggucgggggcaacuacaacuaccuguaccgccuguuccgcaagagcaaccucaagcccuucgagcgggacaucuccaccgagaucuaccaggccggcagcacccccugcaacgggguggagggcuucaacugcuacuucccccugcaguccuacggguuccagccgaccuacggcgugggguaccagcccuaccggguggugguccugagcuucgagcuccugcacgcccccgccacggugugcggccccaagaaguccaccaaccuggugaagaacaagugcgucaacuucaacuucaacggccucaccgggaccggcgugcugaccgagagcaacaagaaguuccugccguuccagcaguucgggcgcgacaucgacgacacgaccgacgccgugcgcgacccccagacccuggagauccucgacaucacccccugcagcuucggcggggucuccgugaucacgccgggcaccaacaccagcaaccagguggcgguccuguaccagggcgugaacugcaccgaggugcccgucgccauccacgccgaccagcugacgcccaccuggcggguguacuccaccgggagcaacguguuccagacccgcgccggcugccucaucggggccgagcacgucaacaacuccuacgagugcgacauccccaucggcgcgggcaucugcgccagcuaccagacgcagaccaacucccaccggcgcgcccggagcguggccucccagagcaucaucgcguacaccaugucccugggggccgagaacagcguggccuacuccaacaacagcaucgccaucccgaucaacuucaccaucuccgucacgaccgagauccugcccgugagcaugaccaagaccagcguggacugcacgauguacaucugcggcgacuccaccgagugcagcaaccuccugcugcaguacggguccuucugcacccagcucaaccgcgcccugaccggcaucgcggucgagcaggacaagaacacgcaggagguguucgcccaggugaagcagaucuacaagaccccgcccaucaaggacuucgggggcuucaacuucagccagauccugcccgaccccuccaagcccagcaagcgguccuucaucgaggaccuccuguucaacaaggucacccuggccgacgccggcuucaucaagcaguacggggacugccucggcgacaucgccgcgcgcgaccugaucugcgcccagaaguucaacgggcugaccgugcugcccccgcuccugacggacgagaugaucgcccaguacaccagcgcccuccuggccggcaccaucaccuccggguggacguucggcgcgggcgccgcccugcagauccccuucgccaugcagauggcguaccgguucaacgggaucggcgugacccagaacguccucuacgagaaccagaagcugaucgccaaccaguucaacagcgccaucgggaagauccaggacucccugagcuccaccgccagcgcccucggcaagcugcaggacguggugaaccagaacgcgcaggcccugaacacccucgucaagcagcuguccagcaacuucggggccaucuccagcgugcugaacgacauccucgcccgccuggacccgcccgaggccgaggugcagaucgaccggcugaucacgggccgccuccagucccugcagaccuacgucacccagcagcugauccgggcggccgagauccgcgccagcgccaaccucgccgcgaccaagaugagcgagugcgugcugggccaguccaagcggguggacuucugcgggaagggcuaccaccugaugagcuucccccaguccgcgccccacggggucguguuccuccacgugaccuacguccccgcccaggagaagaacuucacgaccgcccccgccaucugccacgacggcaaggcccacuucccgcgcgaggggguguucgucagcaacggcacccacugguucgugacccagcggaacuucuacgagccccagaucaucacgacccacaacaccuucguguccggcaacugcgacgucgugaucgggaucgugaacaacaccgucuacgacccccugcagcccgagcuggacagcuucaaggaggagcucgacaaguacuucaagaaccacacguccccggacguggaccugggcgacaucagcgggaucaacgccuccguggucaacauccagaaggagaucgaccgccugaacgagguggccaagaaccucaacgagagccugaucgaccugcaggagcucggcaaguacgagcaguacaucaaguggcccugguacaucuggcugggcuucaucgccgggcugaucgcgaucgugauggucaccaucaugcucugcugcaugaccuccugcugcagcugccugaagggcugcugcuccugcgggagcugcugcaaguucgacgaggacgacuccgagcccgugcugaagggcgugaagcuccacuacaccugaggacuaguuauaagacugacuagcccgaugggccucccaacgggcccuccuccccuccuugcaccgagagaucuaaaaaaaaaaaaaaaaaaaaaaaaaaaaaaaaaaaaaaaaaaaaaaaaaaaaaaaaaaaaaaaaaaaaaaaaaaaaaaaaaaaaaaaaaaaaaaaaaaaa

SEQ ID NO: 25968 - RNA, 4011 nt, Artificial Sequence
  SARS-CoV-2/Wuhan/WIV05/2019__EPI_ISL_402128 spike protein mRNA gc (1-1273)(K986P_V987P_K986P_V987P_K417N_E484K_N501Y_D614G)
aggagaaagcuuaccauguucguguuccugguccuccugccccuggugagcucccagugcgugaaccucaccacccgcacgcagcugccgcccgccuacaccaacagcuucacccggggcgucuacuaccccgacaagguguuccgcuccagcgugcugcacuccacccaggaccucuuccugcccuucuucagcaacgucacgugguuccacgccauccacguguccgggaccaacggcaccaagcgguucgacaacccggugcugcccuucaacgacggggucuacuucgcgagcaccgagaaguccaacaucauccgcggcuggaucuucgggacgacccucgacagcaagacccagucccugcugaucgugaacaacgccaccaacguggucaucaaggugugcgaguuccaguucugcaacgaccccuuccucggcguguacuaccacaagaacaacaagagcuggauggaguccgaguuccgggucuacagcuccgccaacaacugcacguucgaguacgugagccagcccuuccugauggaccuggagggcaagcaggggaacuucaagaaccuccgcgaguucguguucaagaacaucgacggcuacuucaagaucuacuccaagcacaccccgaucaaccugguccgggaccugccccagggguucagcgcccucgagccccugguggaccugcccaucggcaucaacaucacccgcuuccagacccuccuggcccugcaccgguccuaccucacgccgggggacagcagcuccggcuggaccgcgggcgccgccgccuacuacgugggguaccugcagccccgcaccuuccugcucaaguacaacgagaacggcaccaucacggacgcggucgacugcgcccuggacccccugagcgagaccaagugcacccucaaguccuucaccguggagaaggggaucuaccagacgagcaacuuccgggugcagcccaccgaguccaucguccgcuucccgaacaucaccaaccugugccccuucggcgagguguucaacgccacccgguucgccagcgucuacgccuggaaccgcaagcggaucuccaacugcguggcggacuacagcgugcuguacaacuccgccagcuucuccacguucaagugcuacggcgucagccccaccaagcucaacgaccugugcuucaccaacguguacgccgacuccuucgugauccgcggggacgagguccggcagaucgcccccggccagaccgggaacaucgccgacuacaacuacaagcugccggacgacuucacgggcugcgugaucgcguggaacagcaacaaccucgacuccaaggucgggggcaacuacaacuaccuguaccgccuguuccgcaagagcaaccucaagcccuucgagcgggacaucuccaccgagaucuaccaggccggcagcacccccugcaacggggugaagggcuucaacugcuacuucccccugcaguccuacggguuccagccgaccuacggcgugggguaccagcccuaccggguggucgugcugagcuucgagcuccugcacgcccccgccacggugugcggccccaagaaguccaccaaccuggucaagaacaagugcgugaacuucaacuucaacggccucaccgggaccggcgugcugaccgagagcaacaagaaguuccugccguuccagcaguucgggcgcgacaucgccgacacgaccgacgcgguccgcgacccccagacccuggagauccucgacaucacccccugcagcuucggcgggguguccgugaucacgccgggcaccaacaccagcaaccaggucgccgugcuguaccagggcgugaacugcaccgagguccccguggccauccacgccgaccagcugacgcccaccuggcggguguacuccaccgggagcaacgucuuccagacccgcgccggcugccucaucggggcggagcacgugaacaacuccuacgagugcgacauccccaucggcgccggcaucugcgccagcuaccagacgcagaccaacuccccgcggcgcgcccggagcguggcgucccagagcaucaucgccuacaccaugucccugggggccgagaacagcgucgccuacuccaacaacagcaucgccauccccaccaacuucacgaucuccgugaccaccgagauccugcccgugagcaugaccaagacgagcgucgacugcaccauguacaucugcggcgacuccaccgagugcagcaaccuccugcugcaguacggguccuucugcacccagcucaaccgcgcgcugacgggcaucgccguggagcaggacaagaacacccaggagguguucgcccaggucaagcagaucuacaagacgcccccgaucaaggacuucgggggcuucaacuucagccagauccugcccgaccccuccaagcccagcaagcgguccuucaucgaggaccuccuguucaacaaggugacccuggccgacgccggcuucaucaagcaguacggggacugccucggcgacaucgcggcccgcgaccugaucugcgcccagaaguucaacgggcugaccgugcucccgccccugcugaccgacgagaugaucgcccaguacaccagcgcccuccuggcgggcaccaucacguccggguggaccuucggcgccggcgccgcccugcagauccccuucgcgaugcagauggccuaccgguucaacgggaucggcgucacccagaacgugcucuacgagaaccagaagcugaucgccaaccaguucaacagcgccaucgggaagauccaggacucccugagcuccaccgccagcgcgcucggcaagcugcaggacguggucaaccagaacgcccaggcccugaacacgcucgugaagcagcuguccagcaacuucggggccaucuccagcgugcugaacgacauccucucccgccuggacccgcccgaggccgagguccagaucgaccggcugaucaccggccgccuccagagccugcagaccuacgugacccagcagcugauccgggcggccgagauccgcgccagcgccaaccucgccgcgaccaagauguccgagugcgugcugggccagagcaagcgggucgacuucugcgggaagggcuaccaccugauguccuucccccagagcgcgccccacggggugguguuccuccacgucacguacgugcccgcccaggagaagaacuucaccaccgccccggccaucugccacgacggcaaggcccacuucccccgcgagggggucuucguguccaacggcacccacugguucgugacgcagcggaacuucuacgagccccagaucaucaccaccgacaacaccuucgucagcggcaacugcgacguggugaucgggaucgucaacaacacgguguacgacccccugcagccggagcuggacuccuucaaggaggagcucgacaaguacuucaagaaccacaccagccccgacguggaccugggcgacaucuccgggaucaacgccagcgucgugaacauccagaaggagaucgaccgccugaacgagguggccaagaaccucaacgagucccugaucgaccugcaggagcucggcaaguacgagcaguacaucaaguggcccugguacaucuggcugggcuucaucgccgggcugaucgcgaucgucauggugaccaucaugcucugcugcaugaccagcugcugcuccugccugaagggcugcugcagcugcggguccugcugcaaguucgacgaggacgacagcgagccggugcugaagggcgucaagcuccacuacacgugaggacuaguuauaagacugacuagcccgaugggccucccaacgggcccuccuccccuccuugcaccgagagaucuaaaaaaaaaaaaaaaaaaaaaaaaaaaaaaaaaaaaaaaaaaaaaaaaaaaaaaaaaaaaaaaaaaaaaaaaaaaaaaaaaaaaaaaaaaaaaaaaaaaa

SEQ ID NO: 25969 - RNA, 4002 nt, Artificial Sequence
  SARS-CoV-2/Wuhan/WIV05/2019__EPI_ISL_402128 spike protein mRNA gc (1-1273)(K986P_V987P_K986P_V987P_L18F_D80A_D215G_L242del_A243del_ L244del_R246I_K417N_E484K_N501Y_D614G_A701V)
aggagaaagcuuaccauguucguguuccugguccuccugccccuggugagcucccagugcgugaacuucaccacccgcacgcagcucccgcccgccuacaccaacagcuucacccggggcgucuacuaccccgacaagguguuccgcuccagcgugcugcacuccacccaggaccuguuccuccccuucuucagcaacgucacgugguuccacgccauccacguguccgggaccaacggcaccaagcgguucgcgaacccggugcugcccuucaacgacggggucuacuucgccagcaccgagaaguccaacaucauccgcggcuggaucuucgggacgacccuggacagcaagacccagucccuccugaucgugaacaacgccaccaacguggucaucaaggugugcgaguuccaguucugcaacgaccccuuccugggcguguacuaccacaagaacaacaagagcuggauggaguccgaguuccgggucuacagcuccgccaacaacugcacguucgaguacgugagccagcccuuccucauggaccuggagggcaagcaggggaacuucaagaaccugcgcgaguucguguucaagaacaucgacggcuacuucaagaucuacuccaagcacaccccgaucaaccucguccgggggcugccccagggcuucagcgcccuggagccccucguggaccugcccaucgggaucaacaucacccgcuuccagacccugcacaucuccuaccucacgccgggcgacagcagcuccggcuggaccgcgggggccgccgccuacuacgugggcuaccugcagccccggaccuuccugcucaaguacaacgagaacgggaccaucacggacgcggucgacugcgcccuggacccccugagcgagaccaagugcacccucaaguccuucaccguggagaagggcaucuaccagacgagcaacuuccgcgugcagcccaccgaguccaucguccgguucccgaacaucaccaaccugugccccuucggcgagguguucaacgccacccgcuucgccagcgucuacgccuggaaccggaagcgcaucuccaacugcguggcggacuacagcgugcuguacaacuccgccagcuucuccacguucaagugcuacggggucagccccaccaagcucaacgaccugugcuucaccaacguguacgccgacuccuucgugauccggggcgacgagguccgccagaucgcccccgggcagaccggcaacaucgccgacuacaacuacaagcugccggacgacuucacggggugcgugaucgcguggaacagcaacaaccucgacuccaaggugggcggcaacuacaacuaccuguaccggcuguuccgcaagagcaaccucaagcccuucgagcgggacaucuccaccgagaucuaccaggccgggagcacccccugcaacggcgucaagggguucaacugcuacuucccccugcaguccuacggcuuccagccgaccuacggggugggcuaccagcccuaccgcguggucgugcugagcuucgagcuccugcacgcccccgccacggugugcggccccaagaaguccaccaaccuggucaagaacaagugcgugaacuucaacuucaacgggcucaccggcaccggggugcugaccgagagcaacaagaaguuccugccguuccagcaguucggccgggacaucgccgacacgaccgacgcgguccgcgacccccagacccucgagauccuggacaucacccccugcagcuucgggggcguguccgugaucacgccgggcaccaacaccagcaaccaggucgccgugcuguaccagggggugaacugcaccgagguccccguggccauccacgccgaccagcugacgcccaccuggcgcguguacuccaccggcagcaacgucuuccagacccgggccgggugccucaucggcgcggagcacgugaacaacuccuacgagugcgacauccccaucggcgccgggaucugcgccagcuaccagacgcagaccaacuccccgcgccgggcccgcagcguggcgucccagagcaucaucgccuacaccaugucccugggcgucgagaacagcguggccuacuccaacaacagcaucgccauccccaccaacuucacgaucuccgugaccaccgagauccugcccgucagcaugaccaagacgagcguggacugcaccauguacaucugcggggacuccaccgagugcagcaaccuccugcugcaguacggcuccuucugcacccagcucaaccgggcccugacggggaucgcgguggagcaggacaagaacacccaggaggucuucgcccaggugaagcagaucuacaagacgcccccgaucaaggacuucggcggcuucaacuucagccagauccugcccgaccccuccaagcccagcaagcgcuccuucaucgaggaccuccuguucaacaaggugacccuggccgacgccggguucaucaagcaguacggcgacugccucggggacaucgccgcgcgggaccugaucugcgcccagaaguucaacggccugaccguccucccgccccugcugaccgacgagaugaucgcccaguacaccagcgcccuccuggccgggaccaucacguccggcuggaccuucggcgcgggggccgcccugcagauccccuucgccaugcagauggcguaccgcuucaacggcaucggggugacccagaacgugcucuacgagaaccagaagcugaucgccaaccaguucaacagcgccaucggcaagauccaggacucccugagcuccaccgccagcgcccucgggaagcugcaggacgucgugaaccagaacgcgcaggcccugaacacgcucgugaagcagcuguccagcaacuucggcgccaucuccagcguccugaacgacauccucucccggcuggacccgcccgaggccgaggugcagaucgaccgccugaucaccggccggcuccagagccugcagaccuacgugacccagcagcugauccgcgccgcggagauccgggccagcgccaaccucgccgccaccaagauguccgagugcguccuggggcagagcaagcgcguggacuucugcggcaagggguaccaccugauguccuucccccagagcgcgccccacggcguggucuuccuccacgugacguacguccccgcccaggagaagaacuucaccaccgccccggccaucugccacgacgggaaggcgcacuucccccgggagggcguguucguguccaacggcacccacugguucgucacgcagcgcaacuucuacgagccccagaucaucaccaccgacaacaccuucgugagcgggaacugcgacguggucaucggcaucgugaacaacacgguguacgacccccugcagccggagcuggacuccuucaaggaggagcucgacaaguacuucaagaaccacaccagccccgacgucgaccugggggacaucuccggcaucaacgccagcguggugaacauccagaaggagaucgaccggcugaacgaggucgccaagaaccucaacgagucccugaucgaccugcaggagcucggcaaguacgagcaguacaucaaguggcccugguacaucuggcugggguucaucgccggccugaucgccaucgugauggugaccaucaugcucugcugcaugaccagcugcugcuccugccugaaggggugcugcagcugcggcuccugcugcaaguucgacgaggacgacagcgagccgguccugaagggggugaagcuccacuacacgugaggacuaguuauaagacugacuagcccgaugggccucccaacgggcccuccuccccuccuugcaccgagagaucuaaaaaaaaaaaaaaaaaaaaaaaaaaaaaaaaaaaaaaaaaaaaaaaaaaaaaaaaaaaaaaaaaaaaaaaaaaaaaaaaaaaaaaaaaaaaaaaaaaaa

SEQ ID NO: 25970 - RNA, 4011 nt, Artificial Sequence
  SARS-CoV-2/Wuhan/WIV05/2019__EPI_ISL_402128 spike protein mRNA gc (1-1273)(K986P_V987P_K986P_V987P_E484K_D614G)
aggagaaagcuuaccauguucguguuccugguccuccugccccuggugagcucccagugcgugaaccucaccacccgcacgcagcugccgcccgccuacaccaacagcuucacccggggcgucuacuaccccgacaagguguuccgcuccagcgugcugcacuccacccaggaccucuuccugcccuucuucagcaacgucacgugguuccacgccauccacguguccgggaccaacggcaccaagcgguucgacaacccggugcugcccuucaacgacggggucuacuucgcgagcaccgagaaguccaacaucauccgcggcuggaucuucgggacgacccucgacagcaagacccagucccugcugaucgugaacaacgccaccaacguggucaucaaggugugcgaguuccaguucugcaacgaccccuuccucggcguguacuaccacaagaacaacaagagcuggauggaguccgaguuccgggucuacagcuccgccaacaacugcacguucgaguacgugagccagcccuuccugauggaccuggagggcaagcaggggaacuucaagaaccuccgcgaguucguguucaagaacaucgacggcuacuucaagaucuacuccaagcacaccccgaucaaccugguccgggaccugccccagggguucagcgcccucgagccccugguggaccugcccaucggcaucaacaucacccgcuuccagacccuccuggcccugcaccgguccuaccucacgccgggggacagcagcuccggcuggaccgcgggcgccgccgccuacuacgugggguaccugcagccccgcaccuuccugcucaaguacaacgagaacggcaccaucacggacgcggucgacugcgcccuggacccccugagcgagaccaagugcacccucaaguccuucaccguggagaaggggaucuaccagacgagcaacuuccgggugcagcccaccgaguccaucguccgcuucccgaacaucaccaaccugugccccuucggcgagguguucaacgccacccgguucgccagcgucuacgccuggaaccgcaagcggaucuccaacugcguggcggacuacagcgugcuguacaacuccgccagcuucuccacguucaagugcuacggcgucagccccaccaagcucaacgaccugugcuucaccaacguguacgccgacuccuucgugauccgcggggacgagguccggcagaucgcccccggccagaccgggaagaucgccgacuacaacuacaagcugccggacgacuucacgggcugcgugaucgcguggaacagcaacaaccucgacuccaaggucgggggcaacuacaacuaccuguaccgccuguuccgcaagagcaaccucaagcccuucgagcgggacaucuccaccgagaucuaccaggccggcagcacccccugcaacggggugaagggcuucaacugcuacuucccccugcaguccuacggguuccagccgaccaacggcgugggguaccagcccuaccggguggucgugcugagcuucgagcuccugcacgcccccgccacggugugcggccccaagaaguccaccaaccuggucaagaacaagugcgugaacuucaacuucaacggccucaccgggaccggcgugcugaccgagagcaacaagaaguuccugccguuccagcaguucgggcgcgacaucgccgacacgaccgacgcgguccgcgacccccagacccuggagauccucgacaucacccccugcagcuucggcgggguguccgugaucacgccgggcaccaacaccagcaaccaggucgccgugcuguaccagggcgugaacugcaccgagguccccguggccauccacgccgaccagcugacgcccaccuggcggguguacuccaccgggagcaacgucuuccagacccgcgccggcugccucaucggggcggagcacgugaacaacuccuacgagugcgacauccccaucggcgccggcaucugcgccagcuaccagacgcagaccaacuccccgcggcgcgcccggagcguggcgucccagagcaucaucgccuacaccaugucccugggggccgagaacagcgucgccuacuccaacaacagcaucgccauccccaccaacuucacgaucuccgugaccaccgagauccugcccgugagcaugaccaagacgagcgucgacugcaccauguacaucugcggcgacuccaccgagugcagcaaccuccugcugcaguacggguccuucugcacccagcucaaccgcgcgcugacgggcaucgccguggagcaggacaagaacacccaggagguguucgcccaggucaagcagaucuacaagacgcccccgaucaaggacuucgggggcuucaacuucagccagauccugcccgaccccuccaagcccagcaagcgguccuucaucgaggaccuccuguucaacaaggugacccuggccgacgccggcuucaucaagcaguacggggacugccucggcgacaucgcggcccgcgaccugaucugcgcccagaaguucaacgggcugaccgugcucccgccccugcugaccgacgagaugaucgcccaguacaccagcgcccuccuggcgggcaccaucacguccggguggaccuucggcgccggcgccgcccugcagauccccuucgcgaugcagauggccuaccgguucaacgggaucggcgucacccagaacgugcucuacgagaaccagaagcugaucgccaaccaguucaacagcgccaucgggaagauccaggacucccugagcuccaccgccagcgcgcucggcaagcugcaggacguggucaaccagaacgcccaggcccugaacacgcucgugaagcagcuguccagcaacuucggggccaucuccagcgugcugaacgacauccucucccgccuggacccgcccgaggccgagguccagaucgaccggcugaucaccggccgccuccagagccugcagaccuacgugacccagcagcugauccgggcggccgagauccgcgccagcgccaaccucgccgcgaccaagauguccgagugcgugcugggccagagcaagcgggucgacuucugcgggaagggcuaccaccugauguccuucccccagagcgcgccccacggggugguguuccuccacgucacguacgugcccgcccaggagaagaacuucaccaccgccccggccaucugccacgacggcaaggcccacuucccccgcgagggggucuucguguccaacggcacccacugguucgugacgcagcggaacuucuacgagccccagaucaucaccaccgacaacaccuucgucagcggcaacugcgacguggugaucgggaucgucaacaacacgguguacgacccccugcagccggagcuggacuccuucaaggaggagcucgacaaguacuucaagaaccacaccagccccgacguggaccugggcgacaucuccgggaucaacgccagcgucgugaacauccagaaggagaucgaccgccugaacgagguggccaagaaccucaacgagucccugaucgaccugcaggagcucggcaaguacgagcaguacaucaaguggcccugguacaucuggcugggcuucaucgccgggcugaucgcgaucgucauggugaccaucaugcucugcugcaugaccagcugcugcuccugccugaagggcugcugcagcugcggguccugcugcaaguucgacgaggacgacagcgagccggugcugaagggcgucaagcuccacuacacgugaggacuaguuauaagacugacuagcccgaugggccucccaacgggcccuccuccccuccuugcaccgagagaucuaaaaaaaaaaaaaaaaaaaaaaaaaaaaaaaaaaaaaaaaaaaaaaaaaaaaaaaaaaaaaaaaaaaaaaaaaaaaaaaaaaaaaaaaaaaaaaaaaaaa

SEQ ID NO: 25971 - RNA, 4011 nt, Artificial Sequence
  SARS-CoV-2/Wuhan/WIV05/2019__EPI_ISL_402128 spike protein mRNA gc (1-1273)(K986P_V987P_K986P_V987P_L18F_T20N_P26S_D138Y_R190S_K417T _E484K_N501Y_D614G_H655Y_T1027I)
aggagaaagcuuaccauguucguguuccugguccuccugccccuggugagcucccagugcgugaacuucaccaaccgcacccagcucccgagcgccuacacgaacuccuucacccggggcgucuacuaccccgacaagguguuccgcagcuccgugcugcacagcacccaggaccuguuccuccccuucuucuccaacgucaccugguuccacgccauccacgugagcgggacgaacggcaccaagcgguucgacaaccccgugcugccguucaacgacggggucuacuucgcguccaccgagaaguccaacaucauccgcggcuggaucuucgggaccacgcuggacuccaagacccagagccuccugaucgugaacaacgccaccaacguggucaucaaggugugcgaguuccaguucugcaacuaccccuuccugggcguguacuaccacaagaacaacaaguccuggauggagagcgaguuccgggucuacuccagcgccaacaacugcaccuucgaguacgugucccagcccuuccucauggaccuggagggcaagcaggggaacuucaagaaccugagcgaguucguguucaagaacaucgacggcuacuucaagaucuacuccaagcacacgcccaucaaccucguccgcgaccugccgcagggguucagcgcccuggagccccucguggaccugcccaucggcaucaacaucacccgguuccagacccugcucgcccugcaccgcagcuaccugacccccggggacuccagcuccggcuggacggcgggcgccgccgccuacuacgugggguaccuccagccgcggaccuuccugcugaaguacaacgagaacggcaccaucaccgacgcggucgacugcgcccucgacccccugagcgagacgaagugcacccugaaguccuucaccguggagaaggggaucuaccagaccagcaacuuccgcgugcagcccacggaguccaucguccgguuccccaacaucaccaaccucugcccguucggcgagguguucaacgccacccgcuucgccagcgucuacgccuggaaccggaagcgcaucuccaacugcguggcggacuacagcgugcuguacaacuccgccagcuucuccaccuucaagugcuacggcgucagccccacgaagcugaacgaccucugcuucaccaacguguacgccgacuccuucgugauccgcggggacgagguccggcagaucgcccccggccagaccgggaccaucgccgacuacaacuacaagcugcccgacgacuucacgggcugcgugaucgcguggaacagcaacaaccuggacuccaaggucgggggcaacuacaacuaccucuaccggcuguuccgcaagagcaaccugaagccguucgagcgggacaucuccaccgagaucuaccaggccggcagcacccccugcaacggggugaagggcuucaacugcuacuucccccuccagagcuacggguuccagcccaccuacggcgugggguaccagccguaccgcguggucgugcuguccuucgagcugcuccacgcccccgccacggugugcggccccaagaaguccaccaaccuggucaagaacaagugcgugaacuucaacuucaacggccugaccgggaccggcgugcucaccgagagcaacaagaaguuccugcccuuccagcaguucgggcgggacaucgccgacacgaccgacgcgguccgcgacccgcagacccuggagauccuggacaucacccccugcagcuucggcgggguguccgugaucacgcccggcaccaacaccagcaaccaggucgccgugcucuaccagggcgugaacugcaccgaggucccgguggccauccacgccgaccagcugacgcccaccuggcgcguguacuccaccgggagcaacgucuuccagacccgggccggcugccugaucggggcggaguacgugaacaacuccuacgagugcgacauccccaucggcgccggcaucugcgccagcuaccagacgcagaccaacagcccccgccgggcccgcagcguggcgucccagagcaucaucgccuacaccaugucccucggggccgagaacagcgucgccuacuccaacaacagcaucgccaucccgaccaacuucacgaucagcgugaccaccgagauccugcccguguccaugaccaagacgagcgucgacugcaccauguacaucugcggcgacuccaccgagugcagcaaccugcuccugcaguacggguccuucugcacccagcugaaccgggcgcucacgggcaucgccguggagcaggacaagaacacccaggagguguucgcccaggucaagcagaucuacaagaccccgcccaucaaggacuucgggggcuucaacuucagccagauccugcccgaccccuccaagcccagcaagcgcuccuucaucgaggaccuccuguucaacaaggugacccuggccgacgccggcuucaucaagcaguacggggacugccugggcgacaucgcggcccgggaccucaucugcgcccagaaguucaacgggcugacggugcugcccccgcuccugaccgacgagaugaucgcccaguacaccagcgcccugcucgcgggcaccaucacguccggguggaccuucggcgccggcgccgcccugcagauccccuucgcgaugcagauggccuaccgcuucaacgggaucggcgucacccagaacgugcuguacgagaaccagaagcucaucgccaaccaguucaacagcgccaucgggaagauccaggacucccugagcuccaccgccagcgcgcugggcaagcuccaggacguggucaaccagaacgcccaggcccugaacacgcuggugaagcagcucuccagcaacuucggggccaucuccagcgugcugaacgacauccugagccggcucgacccgcccgaggccgagguccagaucgaccgccugaucaccggccggcugcagucccuccagaccuacgugacccagcagcugauccgcgcggccgagauccgggccagcgccaaccuggccgcgaucaagauguccgagugcgugcucggccagagcaagcgcgucgacuucugcgggaagggcuaccaccugauguccuucccccagagcgcgccccacggggugguguuccugcacgucaccuacgugcccgcccaggagaagaacuucacgaccgcccccgccaucugccacgacggcaaggcccacuucccgcgggagggggucuucguguccaacggcacccacugguucgugacccagcgcaacuucuacgagccccagaucaucacgaccgacaacaccuucgucagcggcaacugcgacguggugaucgggaucgucaacaacaccguguacgacccccuccagcccgagcuggacuccuucaaggaggagcuggacaaguacuucaagaaccacacgagcccggacguggaccucggcgacaucuccgggaucaacgccagcgucgugaacauccagaaggagaucgaccggcugaacgagguggccaagaaccugaacgagucccucaucgaccugcaggagcugggcaaguacgagcaguacaucaaguggcccugguacaucuggcucggcuucaucgccgggcugaucgcgaucgucauggugaccaucaugcugugcugcaugaccagcugcugcuccugccucaagggcugcugcagcugcggguccugcugcaaguucgacgaggacgacagcgagcccgugcugaagggcgucaagcugcacuacaccugaggacuaguuauaagacugacuagcccgaugggccucccaacgggcccuccuccccuccuugcaccgagagaucuaaaaaaaaaaaaaaaaaaaaaaaaaaaaaaaaaaaaaaaaaaaaaaaaaaaaaaaaaaaaaaaaaaaaaaaaaaaaaaaaaaaaaaaaaaaaaaaaaaaa

SEQ ID NO: 25972 - RNA, 4011 nt, Artificial Sequence
  SARS-CoV-2/Wuhan/WIV05/2019__EPI_ISL_402128 spike protein mRNA gc (1-1273)(K986P_V987P_K986P_V987P_S13I_W152C_L452R_D614G)
aggagaaagcuuaccauguucguguuccugguccuccugccccuggugagcauccagugcgugaaccucaccacccgcacgcagcugccgcccgccuacaccaacuccuucacccggggcgucuacuaccccgacaagguguuccgcagcuccgugcugcacagcacccaggaccucuuccugcccuucuucuccaacgucacgugguuccacgccauccacgugagcgggaccaacggcaccaagcgguucgacaacccggugcugcccuucaacgacggggucuacuucgcguccaccgagaaguccaacaucauccgcggcuggaucuucgggacgacccucgacagcaagacccagagccugcugaucgugaacaacgccaccaacguggucaucaaggugugcgaguuccaguucugcaacgaccccuuccucggcguguacuaccacaagaacaacaaguccugcauggagagcgaguuccgggucuacuccagcgccaacaacugcacguucgaguacgugucccagcccuuccugauggaccuggagggcaagcaggggaacuucaagaaccuccgcgaguucguguucaagaacaucgacggcuacuucaagaucuacagcaagcacaccccgaucaaccugguccgggaccugccccagggguucuccgcccucgagccccugguggaccugcccaucggcaucaacaucacccgcuuccagacccuccuggcccugcaccggagcuaccucacgccgggggacuccagcagcggcuggaccgcgggcgccgccgccuacuacgugggguaccugcagccccgcaccuuccugcucaaguacaacgagaacggcaccaucacggacgcggucgacugcgcccuggacccccuguccgagaccaagugcacccucaagagcuucaccguggagaaggggaucuaccagacguccaacuuccgggugcagcccaccgagagcaucguccgcuucccgaacaucaccaaccugugccccuucggcgagguguucaacgccacccgguucgccuccgucuacgccuggaaccgcaagcggaucagcaacugcguggcggacuacuccgugcuguacaacagcgccuccuucagcacguucaagugcuacggcgucucccccaccaagcucaacgaccugugcuucaccaacguguacgccgacagcuucgugauccgcggggacgagguccggcagaucgcccccggccagaccgggaagaucgccgacuacaacuacaagcugccggacgacuucacgggcugcgugaucgcguggaacuccaacaaccucgacagcaaggucgggggcaacuacaacuaccgcuaccggcuguuccgcaaguccaaccugaagcccuucgagcgggacaucagcaccgagaucuaccaggccggcuccacccccugcaacgggguggagggcuucaacugcuacuucccccuccagagcuacggguuccagccgaccaacggcgugggguaccagcccuaccgcguggucgugcuguccuucgagcugcuccacgcccccgccacggugugcggccccaagaaguccaccaaccuggucaagaacaagugcgugaacuucaacuucaacggccugaccgggaccggcgugcucaccgagagcaacaagaaguuccugccguuccagcaguucgggcgcgacaucgccgacacgaccgacgcgguccgggacccccagacccuggagauccuggacaucacccccugcagcuucggcggggugagcgugaucacgccgggcaccaacaccuccaaccaggucgccgugcucuaccagggcgugaacugcaccgagguccccguggccauccacgccgaccagcugacgcccaccuggcgcguguacagcaccggguccaacgucuuccagacccgggccggcugccugaucggggcggagcacgugaacaacagcuacgagugcgacauccccaucggcgccggcaucugcgccuccuaccagacgcagaccaacagcccgcgccgggcccgcuccguggcgagccaguccaucaucgccuacaccaugagccucggggccgagaacuccgucgccuacagcaacaacuccaucgccauccccaccaacuucacgaucagcgugaccaccgagauccugcccguguccaugaccaagacgagcgucgacugcaccauguacaucugcggcgacagcaccgagugcuccaaccugcuccugcaguacgggagcuucugcacccagcugaaccgggcgcucacgggcaucgccguggagcaggacaagaacacccaggagguguucgcccaggucaagcagaucuacaagacgcccccgaucaaggacuucgggggcuucaacuucucccagauccugcccgaccccagcaagcccuccaagcgcagcuucaucgaggaccuccuguucaacaaggugacccuggccgacgccggcuucaucaagcaguacggggacugccugggcgacaucgcggcccgggaccucaucugcgcccagaaguucaacgggcugaccgugcugccgccccuccugaccgacgagaugaucgcccaguacaccuccgcccugcucgcgggcaccaucacgagcggguggaccuucggcgccggcgccgcccugcagauccccuucgcgaugcagauggccuaccgcuucaacgggaucggcgucacccagaacgugcuguacgagaaccagaagcucaucgccaaccaguucaacuccgccaucgggaagauccaggacagccuguccagcaccgccuccgcgcugggcaagcuccaggacguggucaaccagaacgcccaggcccugaacacgcuggugaagcagcucagcuccaacuucggggccaucagcuccgugcugaacgacauccugagccggcucgacccgcccgaggccgagguccagaucgaccgccugaucaccggccggcugcagucccuccagaccuacgugacccagcagcugauccgcgcggccgagauccgggccagcgccaaccuggccgcgaccaagaugagcgagugcgugcucggccaguccaagcgcgucgacuucugcgggaagggcuaccaccugaugagcuucccccaguccgcgccccacggggugguguuccugcacgucacguacgugcccgcccaggagaagaacuucaccaccgccccggccaucugccacgacggcaaggcccacuucccccgggagggggucuucgugagcaacggcacccacugguucgugacgcagcgcaacuucuacgagccccagaucaucaccaccgacaacaccuucgucuccggcaacugcgacguggugaucgggaucgucaacaacacgguguacgacccccuccagccggagcuggacagcuucaaggaggagcuggacaaguacuucaagaaccacaccucccccgacguggaccucggcgacaucagcgggaucaacgccuccgucgugaacauccagaaggagaucgaccggcugaacgagguggccaagaaccugaacgagagccucaucgaccugcaggagcugggcaaguacgagcaguacaucaaguggcccugguacaucuggcucggcuucaucgccgggcugaucgcgaucgucauggugaccaucaugcugugcugcaugaccuccugcugcagcugccucaagggcugcugcuccugcgggagcugcugcaaguucgacgaggacgacuccgagccggugcugaagggcgucaagcugcacuacacgugaggacuaguuauaagacugacuagcccgaugggccucccaacgggcccuccuccccuccuugcaccgagagaucuaaaaaaaaaaaaaaaaaaaaaaaaaaaaaaaaaaaaaaaaaaaaaaaaaaaaaaaaaaaaaaaaaaaaaaaaaaaaaaaaaaaaaaaaaaaaaaaaaaaa

SEQ ID NO: 25973 - RNA, 4011 nt, Artificial Sequence
  SARS-CoV-2/Wuhan/WIV05/2019__EPI_ISL_402128 spike protein mRNA gc (1-1273)(K986P_V987P)
aggagaaagcuuaccauguucguguuccuggugcugcugccccuggugagcagccagugcgugaaccugaccacccggacccagcugccaccagccuacaccaacagcuucacccggggcgucuacuaccccgacaagguguuccggagcagcguccugcacagcacccaggaccuguuccugcccuucuucagcaacgugaccugguuccacgccauccacgugagcggcaccaacggcaccaagcgguucgacaaccccgugcugcccuucaacgacggcguguacuucgccagcaccgagaagagcaacaucauccggggcuggaucuucggcaccacccuggacagcaagacccagagccugcugaucgugaauaacgccaccaacguggugaucaaggugugcgaguuccaguucugcaacgaccccuuccugggcguguacuaccacaagaacaacaagagcuggauggagagcgaguuccggguguacagcagcgccaacaacugcaccuucgaguacgugagccagcccuuccugauggaccuggagggcaagcagggcaacuucaagaaccugcgggaguucguguucaagaacaucgacggcuacuucaagaucuacagcaagcacaccccaaucaaccuggugcgggaucugccccagggcuucucagcccuggagccccugguggaccugcccaucggcaucaacaucacccgguuccagacccugcuggcccugcaccggagcuaccugaccccaggcgacagcagcagcggguggacagcaggcgcggcugcuuacuacgugggcuaccugcagccccggaccuuccugcugaaguacaacgagaacggcaccaucaccgacgccguggacugcgcccuggacccucugagcgagaccaagugcacccugaagagcuucaccguggagaagggcaucuaccagaccagcaacuuccgggugcagcccaccgagagcaucgugcgguuccccaacaucaccaaccugugccccuucggcgagguguucaacgccacccgguucgccagcguguacgccuggaaccggaagcggaucagcaacugcguggccgacuacagcgugcuguacaacagcgccagcuucagcaccuucaagugcuacggcgugagccccaccaagcugaacgaccugugcuucaccaacguguacgccgacagcuucgugauccguggcgacgaggugcggcagaucgcacccggccagacaggcaagaucgccgacuacaacuacaagcugcccgacgacuucaccggcugcgugaucgccuggaacagcaacaaccucgacagcaaggugggcggcaacuacaacuaccuguaccggcuguuccggaagagcaaccugaagcccuucgagcgggacaucagcaccgagaucuaccaagccggcuccaccccuugcaacggcguggagggcuucaacugcuacuucccucugcagagcuacggcuuccagcccaccaacggcgugggcuaccagcccuaccgggugguggugcugagcuucgagcugcugcacgccccagccaccguguguggccccaagaagagcaccaaccuggugaagaacaagugcgugaacuucaacuucaacggccuuaccggcaccggcgugcugaccgagagcaacaagaaauuccugcccuuucagcaguucggccgggacaucgccgacaccaccgacgcugugcgggauccccagacccuggagauccuggacaucaccccuugcagcuucggcggcgugagcgugaucaccccaggcaccaacaccagcaaccagguggccgugcuguaccaggacgugaacugcaccgaggugcccguggccauccacgccgaccagcugacacccaccuggcgggucuacagcaccggcagcaacguguuccagacccgggccgguugccugaucggcgccgagcacgugaacaacagcuacgagugcgacauccccaucggcgccggcaucugugccagcuaccagacccagaccaauucaccccggagggcaaggagcguggccagccagagcaucaucgccuacaccaugagccugggcgccgagaacagcguggccuacagcaacaacagcaucgccauccccaccaacuucaccaucagcgugaccaccgagauucugcccgugagcaugaccaagaccagcguggacugcaccauguacaucugcggcgacagcaccgagugcagcaaccugcugcugcaguacggcagcuucugcacccagcugaaccgggcccugaccggcaucgccguggagcaggacaagaacacccaggagguguucgcccaggugaagcagaucuacaagaccccucccaucaaggacuucggcggcuucaacuucagccagauccugcccgaccccagcaagcccagcaagcggagcuucaucgaggaccugcuguucaacaaggugacccuagccgacgccggcuucaucaagcaguacggcgacugccucggcgacauagccgcccgggaccugaucugcgcccagaaguucaacggccugaccgugcugccuccccugcugaccgacgagaugaucgcccaguacaccagcgcccuguuagccggaaccaucaccagcggcuggacuuucggcgcuggagccgcucugcagauccccuucgccaugcagauggccuaccgguucaacggcaucggcgugacccagaacgugcuguacgagaaccagaagcugaucgccaaccaguucaacagcgccaucggcaagauccaggacagccugagcagcaccgcuagcgcccugggcaagcugcaggacguggugaaccagaacgcccaggcccugaacacccuggugaagcagcugagcagcaacuucggcgccaucagcagcgugcugaacgacauccugagccggcuggacccucccgaggccgaggugcagaucgaccggcugaucacuggccggcugcagagccugcagaccuacgugacccagcagcugauccgggccgccgagauucgggccagcgccaaccuggccgccaccaagaugagcgagugcgugcugggccagagcaagcggguggacuucugcggcaagggcuaccaccugaugagcuuuccccagagcgcaccccacggagugguguuccugcacgugaccuacgugcccgcccaggagaagaacuucaccaccgccccagccaucugccacgacggcaaggcccacuuuccccgggagggcguguucgugagcaacggcacccacugguucgugacccagcggaacuucuacgagccccagaucaucaccaccgacaacaccuucgugagcggcaacugcgacguggugaucggcaucgugaacaacaccguguacgauccccugcagcccgagcuggacagcuucaaggaggagcuggacaaguacuucaagaaucacaccagccccgacguggaccugggcgacaucagcggcaucaacgccagcguggugaacauccagaaggagaucgaucggcugaacgagguggccaagaaccugaacgagagccugaucgaccugcaggagcugggcaaguacgagcaguacaucaaguggcccugguacaucuggcugggcuucaucgccggccugaucgccaucgugauggugaccaucaugcugugcugcaugaccagcugcugcagcugccugaagggcuguugcagcugcggcagcugcugcaaguucgacgaggacgacagcgagcccgugcugaagggcgugaagcugcacuacaccugaggacuaguuauaagacugacuagcccgaugggccucccaacgggcccuccuccccuccuugcaccgagagaucuaaaaaaaaaaaaaaaaaaaaaaaaaaaaaaaaaaaaaaaaaaaaaaaaaaaaaaaaaaaaaaaaaaaaaaaaaaaaaaaaaaaaaaaaaaaaaaaaaaaa

SEQ ID NO: 25974 - RNA, 4011 nt, Artificial Sequence
  SARS-CoV-2/Wuhan/WIV05/2019__EPI_ISL_402128 spike protein mRNA gc (1-1273)(K986P_V987P_ D614G)
aggagaaagcuuaccauguucguguuccuggugcugcugccccuggugagcagccagugcgugaaccugaccacccggacccagcugccaccagccuacaccaacagcuucacccggggcgucuacuaccccgacaagguguuccggagcagcguccugcacagcacccaggaccuguuccugcccuucuucagcaacgugaccugguuccacgccauccacgugagcggcaccaacggcaccaagcgguucgacaaccccgugcugcccuucaacgacggcguguacuucgccagcaccgagaagagcaacaucauccggggcuggaucuucggcaccacccuggacagcaagacccagagccugcugaucgugaauaacgccaccaacguggugaucaaggugugcgaguuccaguucugcaacgaccccuuccugggcguguacuaccacaagaacaacaagagcuggauggagagcgaguuccggguguacagcagcgccaacaacugcaccuucgaguacgugagccagcccuuccugauggaccuggagggcaagcagggcaacuucaagaaccugcgggaguucguguucaagaacaucgacggcuacuucaagaucuacagcaagcacaccccaaucaaccuggugcgggaucugccccagggcuucucagcccuggagccccugguggaccugcccaucggcaucaacaucacccgguuccagacccugcuggcccugcaccggagcuaccugaccccaggcgacagcagcagcggguggacagcaggcgcggcugcuuacuacgugggcuaccugcagccccggaccuuccugcugaaguacaacgagaacggcaccaucaccgacgccguggacugcgcccuggacccucugagcgagaccaagugcacccugaagagcuucaccguggagaagggcaucuaccagaccagcaacuuccgggugcagcccaccgagagcaucgugcgguuccccaacaucaccaaccugugccccuucggcgagguguucaacgccacccgguucgccagcguguacgccuggaaccggaagcggaucagcaacugcguggccgacuacagcgugcuguacaacagcgccagcuucagcaccuucaagugcuacggcgugagccccaccaagcugaacgaccugugcuucaccaacguguacgccgacagcuucgugauccguggcgacgaggugcggcagaucgcacccggccagacaggcaagaucgccgacuacaacuacaagcugcccgacgacuucaccggcugcgugaucgccuggaacagcaacaaccucgacagcaaggugggcggcaacuacaacuaccuguaccggcuguuccggaagagcaaccugaagcccuucgagcgggacaucagcaccgagaucuaccaagccggcuccaccccuugcaacggcguggagggcuucaacugcuacuucccucugcagagcuacggcuuccagcccaccaacggcgugggcuaccagcccuaccgggugguggugcugagcuucgagcugcugcacgccccagccaccguguguggccccaagaagagcaccaaccuggugaagaacaagugcgugaacuucaacuucaacggccuuaccggcaccggcgugcugaccgagagcaacaagaaauuccugcccuuucagcaguucggccgggacaucgccgacaccaccgacgcugugcgggauccccagacccuggagauccuggacaucaccccuugcagcuucggcggcgugagcgugaucaccccaggcaccaacaccagcaaccagguggccgugcuguaccagggcgugaacugcaccgaggugcccguggccauccacgccgaccagcugacacccaccuggcgggucuacagcaccggcagcaacguguuccagacccgggccgguugccugaucggcgccgagcacgugaacaacagcuacgagugcgacauccccaucggcgccggcaucugugccagcuaccagacccagaccaauucaccccggagggcaaggagcguggccagccagagcaucaucgccuacaccaugagccugggcgccgagaacagcguggccuacagcaacaacagcaucgccauccccaccaacuucaccaucagcgugaccaccgagauucugcccgugagcaugaccaagaccagcguggacugcaccauguacaucugcggcgacagcaccgagugcagcaaccugcugcugcaguacggcagcuucugcacccagcugaaccgggcccugaccggcaucgccguggagcaggacaagaacacccaggagguguucgcccaggugaagcagaucuacaagaccccucccaucaaggacuucggcggcuucaacuucagccagauccugcccgaccccagcaagcccagcaagcggagcuucaucgaggaccugcuguucaacaaggugacccuagccgacgccggcuucaucaagcaguacggcgacugccucggcgacauagccgcccgggaccugaucugcgcccagaaguucaacggccugaccgugcugccuccccugcugaccgacgagaugaucgcccaguacaccagcgcccuguuagccggaaccaucaccagcggcuggacuuucggcgcuggagccgcucugcagauccccuucgccaugcagauggccuaccgguucaacggcaucggcgugacccagaacgugcuguacgagaaccagaagcugaucgccaaccaguucaacagcgccaucggcaagauccaggacagccugagcagcaccgcuagcgcccugggcaagcugcaggacguggugaaccagaacgcccaggcccugaacacccuggugaagcagcugagcagcaacuucggcgccaucagcagcgugcugaacgacauccugagccggcuggacccucccgaggccgaggugcagaucgaccggcugaucacuggccggcugcagagccugcagaccuacgugacccagcagcugauccgggccgccgagauucgggccagcgccaaccuggccgccaccaagaugagcgagugcgugcugggccagagcaagcggguggacuucugcggcaagggcuaccaccugaugagcuuuccccagagcgcaccccacggagugguguuccugcacgugaccuacgugcccgcccaggagaagaacuucaccaccgccccagccaucugccacgacggcaaggcccacuuuccccgggagggcguguucgugagcaacggcacccacugguucgugacccagcggaacuucuacgagccccagaucaucaccaccgacaacaccuucgugagcggcaacugcgacguggugaucggcaucgugaacaacaccguguacgauccccugcagcccgagcuggacagcuucaaggaggagcuggacaaguacuucaagaaucacaccagccccgacguggaccugggcgacaucagcggcaucaacgccagcguggugaacauccagaaggagaucgaucggcugaacgagguggccaagaaccugaacgagagccugaucgaccugcaggagcugggcaaguacgagcaguacaucaaguggcccugguacaucuggcugggcuucaucgccggccugaucgccaucgugauggugaccaucaugcugugcugcaugaccagcugcugcagcugccugaagggcuguugcagcugcggcagcugcugcaaguucgacgaggacgacagcgagcccgugcugaagggcgugaagcugcacuacaccugaggacuaguuauaagacugacuagcccgaugggccucccaacgggcccuccuccccuccuugcaccgagagaucuaaaaaaaaaaaaaaaaaaaaaaaaaaaaaaaaaaaaaaaaaaaaaaaaaaaaaaaaaaaaaaaaaaaaaaaaaaaaaaaaaaaaaaaaaaaaaaaaaaaa

SEQ ID NO: 25975 - RNA, 4011 nt, Artificial Sequence
  SARS-CoV-2/Wuhan/WIV05/2019__EPI_ISL_402128 spike protein mRNA gc (1-1273)(K986P_V987P_A222V_D614G)
aggagaaagcuuaccauguucguguuccuggugcugcugccccuggugagcagccagugcgugaaccugaccacccggacccagcugccaccagccuacaccaacagcuucacccggggcgucuacuaccccgacaagguguuccggagcagcguccugcacagcacccaggaccuguuccugcccuucuucagcaacgugaccugguuccacgccauccacgugagcggcaccaacggcaccaagcgguucgacaaccccgugcugcccuucaacgacggcguguacuucgccagcaccgagaagagcaacaucauccggggcuggaucuucggcaccacccuggacagcaagacccagagccugcugaucgugaauaacgccaccaacguggugaucaaggugugcgaguuccaguucugcaacgaccccuuccugggcguguacuaccacaagaacaacaagagcuggauggagagcgaguuccggguguacagcagcgccaacaacugcaccuucgaguacgugagccagcccuuccugauggaccuggagggcaagcagggcaacuucaagaaccugcgggaguucguguucaagaacaucgacggcuacuucaagaucuacagcaagcacaccccaaucaaccuggugcgggaucugccccagggcuucucagugcuggagccccugguggaccugcccaucggcaucaacaucacccgguuccagacccugcuggcccugcaccggagcuaccugaccccaggcgacagcagcagcggguggacagcaggcgcggcugcuuacuacgugggcuaccugcagccccggaccuuccugcugaaguacaacgagaacggcaccaucaccgacgccguggacugcgcccuggacccucugagcgagaccaagugcacccugaagagcuucaccguggagaagggcaucuaccagaccagcaacuuccgggugcagcccaccgagagcaucgugcgguuccccaacaucaccaaccugugccccuucggcgagguguucaacgccacccgguucgccagcguguacgccuggaaccggaagcggaucagcaacugcguggccgacuacagcgugcuguacaacagcgccagcuucagcaccuucaagugcuacggcgugagccccaccaagcugaacgaccugugcuucaccaacguguacgccgacagcuucgugauccguggcgacgaggugcggcagaucgcacccggccagacaggcaagaucgccgacuacaacuacaagcugcccgacgacuucaccggcugcgugaucgccuggaacagcaacaaccucgacagcaaggugggcggcaacuacaacuaccuguaccggcuguuccggaagagcaaccugaagcccuucgagcgggacaucagcaccgagaucuaccaagccggcuccaccccuugcaacggcguggagggcuucaacugcuacuucccucugcagagcuacggcuuccagcccaccaacggcgugggcuaccagcccuaccgggugguggugcugagcuucgagcugcugcacgccccagccaccguguguggccccaagaagagcaccaaccuggugaagaacaagugcgugaacuucaacuucaacggccuuaccggcaccggcgugcugaccgagagcaacaagaaauuccugcccuuucagcaguucggccgggacaucgccgacaccaccgacgcugugcgggauccccagacccuggagauccuggacaucaccccuugcagcuucggcggcgugagcgugaucaccccaggcaccaacaccagcaaccagguggccgugcuguaccagggcgugaacugcaccgaggugcccguggccauccacgccgaccagcugacacccaccuggcgggucuacagcaccggcagcaacguguuccagacccgggccgguugccugaucggcgccgagcacgugaacaacagcuacgagugcgacauccccaucggcgccggcaucugugccagcuaccagacccagaccaauucaccccggagggcaaggagcguggccagccagagcaucaucgccuacaccaugagccugggcgccgagaacagcguggccuacagcaacaacagcaucgccauccccaccaacuucaccaucagcgugaccaccgagauucugcccgugagcaugaccaagaccagcguggacugcaccauguacaucugcggcgacagcaccgagugcagcaaccugcugcugcaguacggcagcuucugcacccagcugaaccgggcccugaccggcaucgccguggagcaggacaagaacacccaggagguguucgcccaggugaagcagaucuacaagaccccucccaucaaggacuucggcggcuucaacuucagccagauccugcccgaccccagcaagcccagcaagcggagcuucaucgaggaccugcuguucaacaaggugacccuagccgacgccggcuucaucaagcaguacggcgacugccucggcgacauagccgcccgggaccugaucugcgcccagaaguucaacggccugaccgugcugccuccccugcugaccgacgagaugaucgcccaguacaccagcgcccuguuagccggaaccaucaccagcggcuggacuuucggcgcuggagccgcucugcagauccccuucgccaugcagauggccuaccgguucaacggcaucggcgugacccagaacgugcuguacgagaaccagaagcugaucgccaaccaguucaacagcgccaucggcaagauccaggacagccugagcagcaccgcuagcgcccugggcaagcugcaggacguggugaaccagaacgcccaggcccugaacacccuggugaagcagcugagcagcaacuucggcgccaucagcagcgugcugaacgacauccugagccggcuggacccucccgaggccgaggugcagaucgaccggcugaucacuggccggcugcagagccugcagaccuacgugacccagcagcugauccgggccgccgagauucgggccagcgccaaccuggccgccaccaagaugagcgagugcgugcugggccagagcaagcggguggacuucugcggcaagggcuaccaccugaugagcuuuccccagagcgcaccccacggagugguguuccugcacgugaccuacgugcccgcccaggagaagaacuucaccaccgccccagccaucugccacgacggcaaggcccacuuuccccgggagggcguguucgugagcaacggcacccacugguucgugacccagcggaacuucuacgagccccagaucaucaccaccgacaacaccuucgugagcggcaacugcgacguggugaucggcaucgugaacaacaccguguacgauccccugcagcccgagcuggacagcuucaaggaggagcuggacaaguacuucaagaaucacaccagccccgacguggaccugggcgacaucagcggcaucaacgccagcguggugaacauccagaaggagaucgaucggcugaacgagguggccaagaaccugaacgagagccugaucgaccugcaggagcugggcaaguacgagcaguacaucaaguggcccugguacaucuggcugggcuucaucgccggccugaucgccaucgugauggugaccaucaugcugugcugcaugaccagcugcugcagcugccugaagggcuguugcagcugcggcagcugcugcaaguucgacgaggacgacagcgagcccgugcugaagggcgugaagcugcacuacaccugaggacuaguuauaagacugacuagcccgaugggccucccaacgggcccuccuccccuccuugcaccgagagaucuaaaaaaaaaaaaaaaaaaaaaaaaaaaaaaaaaaaaaaaaaaaaaaaaaaaaaaaaaaaaaaaaaaaaaaaaaaaaaaaaaaaaaaaaaaaaaaaaaaaa

SEQ ID NO: 25976 - RNA, 4011 nt, Artificial Sequence
  SARS-CoV-2/Wuhan/WIV05/2019__EPI_ISL_402128 spike protein mRNA gc (1-1273)(K986P_V987P_N439K_D614G)
aggagaaagcuuaccauguucguguuccuggugcugcugccccuggugagcagccagugcgugaaccugaccacccggacccagcugccaccagccuacaccaacagcuucacccggggcgucuacuaccccgacaagguguuccggagcagcguccugcacagcacccaggaccuguuccugcccuucuucagcaacgugaccugguuccacgccauccacgugagcggcaccaacggcaccaagcgguucgacaaccccgugcugcccuucaacgacggcguguacuucgccagcaccgagaagagcaacaucauccggggcuggaucuucggcaccacccuggacagcaagacccagagccugcugaucgugaauaacgccaccaacguggugaucaaggugugcgaguuccaguucugcaacgaccccuuccugggcguguacuaccacaagaacaacaagagcuggauggagagcgaguuccggguguacagcagcgccaacaacugcaccuucgaguacgugagccagcccuuccugauggaccuggagggcaagcagggcaacuucaagaaccugcgggaguucguguucaagaacaucgacggcuacuucaagaucuacagcaagcacaccccaaucaaccuggugcgggaucugccccagggcuucucagcccuggagccccugguggaccugcccaucggcaucaacaucacccgguuccagacccugcuggcccugcaccggagcuaccugaccccaggcgacagcagcagcggguggacagcaggcgcggcugcuuacuacgugggcuaccugcagccccggaccuuccugcugaaguacaacgagaacggcaccaucaccgacgccguggacugcgcccuggacccucugagcgagaccaagugcacccugaagagcuucaccguggagaagggcaucuaccagaccagcaacuuccgggugcagcccaccgagagcaucgugcgguuccccaacaucaccaaccugugccccuucggcgagguguucaacgccacccgguucgccagcguguacgccuggaaccggaagcggaucagcaacugcguggccgacuacagcgugcuguacaacagcgccagcuucagcaccuucaagugcuacggcgugagccccaccaagcugaacgaccugugcuucaccaacguguacgccgacagcuucgugauccguggcgacgaggugcggcagaucgcacccggccagacaggcaagaucgccgacuacaacuacaagcugcccgacgacuucaccggcugcgugaucgccuggaacagcaagaaccucgacagcaaggugggcggcaacuacaacuaccuguaccggcuguuccggaagagcaaccugaagcccuucgagcgggacaucagcaccgagaucuaccaagccggcuccaccccuugcaacggcguggagggcuucaacugcuacuucccucugcagagcuacggcuuccagcccaccaacggcgugggcuaccagcccuaccgggugguggugcugagcuucgagcugcugcacgccccagccaccguguguggccccaagaagagcaccaaccuggugaagaacaagugcgugaacuucaacuucaacggccuuaccggcaccggcgugcugaccgagagcaacaagaaauuccugcccuuucagcaguucggccgggacaucgccgacaccaccgacgcugugcgggauccccagacccuggagauccuggacaucaccccuugcagcuucggcggcgugagcgugaucaccccaggcaccaacaccagcaaccagguggccgugcuguaccagggcgugaacugcaccgaggugcccguggccauccacgccgaccagcugacacccaccuggcgggucuacagcaccggcagcaacguguuccagacccgggccgguugccugaucggcgccgagcacgugaacaacagcuacgagugcgacauccccaucggcgccggcaucugugccagcuaccagacccagaccaauucaccccggagggcaaggagcguggccagccagagcaucaucgccuacaccaugagccugggcgccgagaacagcguggccuacagcaacaacagcaucgccauccccaccaacuucaccaucagcgugaccaccgagauucugcccgugagcaugaccaagaccagcguggacugcaccauguacaucugcggcgacagcaccgagugcagcaaccugcugcugcaguacggcagcuucugcacccagcugaaccgggcccugaccggcaucgccguggagcaggacaagaacacccaggagguguucgcccaggugaagcagaucuacaagaccccucccaucaaggacuucggcggcuucaacuucagccagauccugcccgaccccagcaagcccagcaagcggagcuucaucgaggaccugcuguucaacaaggugacccuagccgacgccggcuucaucaagcaguacggcgacugccucggcgacauagccgcccgggaccugaucugcgcccagaaguucaacggccugaccgugcugccuccccugcugaccgacgagaugaucgcccaguacaccagcgcccuguuagccggaaccaucaccagcggcuggacuuucggcgcuggagccgcucugcagauccccuucgccaugcagauggccuaccgguucaacggcaucggcgugacccagaacgugcuguacgagaaccagaagcugaucgccaaccaguucaacagcgccaucggcaagauccaggacagccugagcagcaccgcuagcgcccugggcaagcugcaggacguggugaaccagaacgcccaggcccugaacacccuggugaagcagcugagcagcaacuucggcgccaucagcagcgugcugaacgacauccugagccggcuggacccucccgaggccgaggugcagaucgaccggcugaucacuggccggcugcagagccugcagaccuacgugacccagcagcugauccgggccgccgagauucgggccagcgccaaccuggccgccaccaagaugagcgagugcgugcugggccagagcaagcggguggacuucugcggcaagggcuaccaccugaugagcuuuccccagagcgcaccccacggagugguguuccugcacgugaccuacgugcccgcccaggagaagaacuucaccaccgccccagccaucugccacgacggcaaggcccacuuuccccgggagggcguguucgugagcaacggcacccacugguucgugacccagcggaacuucuacgagccccagaucaucaccaccgacaacaccuucgugagcggcaacugcgacguggugaucggcaucgugaacaacaccguguacgauccccugcagcccgagcuggacagcuucaaggaggagcuggacaaguacuucaagaaucacaccagccccgacguggaccugggcgacaucagcggcaucaacgccagcguggugaacauccagaaggagaucgaucggcugaacgagguggccaagaaccugaacgagagccugaucgaccugcaggagcugggcaaguacgagcaguacaucaaguggcccugguacaucuggcugggcuucaucgccggccugaucgccaucgugauggugaccaucaugcugugcugcaugaccagcugcugcagcugccugaagggcuguugcagcugcggcagcugcugcaaguucgacgaggacgacagcgagcccgugcugaagggcgugaagcugcacuacaccugaggacuaguuauaagacugacuagcccgaugggccucccaacgggcccuccuccccuccuugcaccgagagaucuaaaaaaaaaaaaaaaaaaaaaaaaaaaaaaaaaaaaaaaaaaaaaaaaaaaaaaaaaaaaaaaaaaaaaaaaaaaaaaaaaaaaaaaaaaaaaaaaaaaa

SEQ ID NO: 25977 - RNA, 4011 nt, Artificial Sequence
  SARS-CoV-2/Wuhan/WIV05/2019__EPI_ISL_402128 spike protein mRNA gc (1-1273)(K986P_V987P_S477N_D614G)
aggagaaagcuuaccauguucguguuccuggugcugcugccccuggugagcagccagugcgugaaccugaccacccggacccagcugccaccagccuacaccaacagcuucacccggggcgucuacuaccccgacaagguguuccggagcagcguccugcacagcacccaggaccuguuccugcccuucuucagcaacgugaccugguuccacgccauccacgugagcggcaccaacggcaccaagcgguucgacaaccccgugcugcccuucaacgacggcguguacuucgccagcaccgagaagagcaacaucauccggggcuggaucuucggcaccacccuggacagcaagacccagagccugcugaucgugaauaacgccaccaacguggugaucaaggugugcgaguuccaguucugcaacgaccccuuccugggcguguacuaccacaagaacaacaagagcuggauggagagcgaguuccggguguacagcagcgccaacaacugcaccuucgaguacgugagccagcccuuccugauggaccuggagggcaagcagggcaacuucaagaaccugcgggaguucguguucaagaacaucgacggcuacuucaagaucuacagcaagcacaccccaaucaaccuggugcgggaucugccccagggcuucucagcccuggagccccugguggaccugcccaucggcaucaacaucacccgguuccagacccugcuggcccugcaccggagcuaccugaccccaggcgacagcagcagcggguggacagcaggcgcggcugcuuacuacgugggcuaccugcagccccggaccuuccugcugaaguacaacgagaacggcaccaucaccgacgccguggacugcgcccuggacccucugagcgagaccaagugcacccugaagagcuucaccguggagaagggcaucuaccagaccagcaacuuccgggugcagcccaccgagagcaucgugcgguuccccaacaucaccaaccugugccccuucggcgagguguucaacgccacccgguucgccagcguguacgccuggaaccggaagcggaucagcaacugcguggccgacuacagcgugcuguacaacagcgccagcuucagcaccuucaagugcuacggcgugagccccaccaagcugaacgaccugugcuucaccaacguguacgccgacagcuucgugauccguggcgacgaggugcggcagaucgcacccggccagacaggcaagaucgccgacuacaacuacaagcugcccgacgacuucaccggcugcgugaucgccuggaacagcaacaaccucgacagcaaggugggcggcaacuacaacuaccuguaccggcuguuccggaagagcaaccugaagcccuucgagcgggacaucagcaccgagaucuaccaagccggcaacaccccuugcaacggcguggagggcuucaacugcuacuucccucugcagagcuacggcuuccagcccaccaacggcgugggcuaccagcccuaccgggugguggugcugagcuucgagcugcugcacgccccagccaccguguguggccccaagaagagcaccaaccuggugaagaacaagugcgugaacuucaacuucaacggccuuaccggcaccggcgugcugaccgagagcaacaagaaauuccugcccuuucagcaguucggccgggacaucgccgacaccaccgacgcugugcgggauccccagacccuggagauccuggacaucaccccuugcagcuucggcggcgugagcgugaucaccccaggcaccaacaccagcaaccagguggccgugcuguaccagggcgugaacugcaccgaggugcccguggccauccacgccgaccagcugacacccaccuggcgggucuacagcaccggcagcaacguguuccagacccgggccgguugccugaucggcgccgagcacgugaacaacagcuacgagugcgacauccccaucggcgccggcaucugugccagcuaccagacccagaccaauucaccccggagggcaaggagcguggccagccagagcaucaucgccuacaccaugagccugggcgccgagaacagcguggccuacagcaacaacagcaucgccauccccaccaacuucaccaucagcgugaccaccgagauucugcccgugagcaugaccaagaccagcguggacugcaccauguacaucugcggcgacagcaccgagugcagcaaccugcugcugcaguacggcagcuucugcacccagcugaaccgggcccugaccggcaucgccguggagcaggacaagaacacccaggagguguucgcccaggugaagcagaucuacaagaccccucccaucaaggacuucggcggcuucaacuucagccagauccugcccgaccccagcaagcccagcaagcggagcuucaucgaggaccugcuguucaacaaggugacccuagccgacgccggcuucaucaagcaguacggcgacugccucggcgacauagccgcccgggaccugaucugcgcccagaaguucaacggccugaccgugcugccuccccugcugaccgacgagaugaucgcccaguacaccagcgcccuguuagccggaaccaucaccagcggcuggacuuucggcgcuggagccgcucugcagauccccuucgccaugcagauggccuaccgguucaacggcaucggcgugacccagaacgugcuguacgagaaccagaagcugaucgccaaccaguucaacagcgccaucggcaagauccaggacagccugagcagcaccgcuagcgcccugggcaagcugcaggacguggugaaccagaacgcccaggcccugaacacccuggugaagcagcugagcagcaacuucggcgccaucagcagcgugcugaacgacauccugagccggcuggacccucccgaggccgaggugcagaucgaccggcugaucacuggccggcugcagagccugcagaccuacgugacccagcagcugauccgggccgccgagauucgggccagcgccaaccuggccgccaccaagaugagcgagugcgugcugggccagagcaagcggguggacuucugcggcaagggcuaccaccugaugagcuuuccccagagcgcaccccacggagugguguuccugcacgugaccuacgugcccgcccaggagaagaacuucaccaccgccccagccaucugccacgacggcaaggcccacuuuccccgggagggcguguucgugagcaacggcacccacugguucgugacccagcggaacuucuacgagccccagaucaucaccaccgacaacaccuucgugagcggcaacugcgacguggugaucggcaucgugaacaacaccguguacgauccccugcagcccgagcuggacagcuucaaggaggagcuggacaaguacuucaagaaucacaccagccccgacguggaccugggcgacaucagcggcaucaacgccagcguggugaacauccagaaggagaucgaucggcugaacgagguggccaagaaccugaacgagagccugaucgaccugcaggagcugggcaaguacgagcaguacaucaaguggcccugguacaucuggcugggcuucaucgccggccugaucgccaucgugauggugaccaucaugcugugcugcaugaccagcugcugcagcugccugaagggcuguugcagcugcggcagcugcugcaaguucgacgaggacgacagcgagcccgugcugaagggcgugaagcugcacuacaccugaggacuaguuauaagacugacuagcccgaugggccucccaacgggcccuccuccccuccuugcaccgagagaucuaaaaaaaaaaaaaaaaaaaaaaaaaaaaaaaaaaaaaaaaaaaaaaaaaaaaaaaaaaaaaaaaaaaaaaaaaaaaaaaaaaaaaaaaaaaaaaaaaaaa

SEQ ID NO: 25978 - RNA, 4011 nt, Artificial Sequence
  SARS-CoV-2/Wuhan/WIV05/2019__EPI_ISL_402128 spike protein mRNA gc (1-1273)(K986P_V987P_N501Y_D614G)
aggagaaagcuuaccauguucguguuccuggugcugcugccccuggugagcagccagugcgugaaccugaccacccggacccagcugccaccagccuacaccaacagcuucacccggggcgucuacuaccccgacaagguguuccggagcagcguccugcacagcacccaggaccuguuccugcccuucuucagcaacgugaccugguuccacgccauccacgugagcggcaccaacggcaccaagcgguucgacaaccccgugcugcccuucaacgacggcguguacuucgccagcaccgagaagagcaacaucauccggggcuggaucuucggcaccacccuggacagcaagacccagagccugcugaucgugaauaacgccaccaacguggugaucaaggugugcgaguuccaguucugcaacgaccccuuccugggcguguacuaccacaagaacaacaagagcuggauggagagcgaguuccggguguacagcagcgccaacaacugcaccuucgaguacgugagccagcccuuccugauggaccuggagggcaagcagggcaacuucaagaaccugcgggaguucguguucaagaacaucgacggcuacuucaagaucuacagcaagcacaccccaaucaaccuggugcgggaucugccccagggcuucucagcccuggagccccugguggaccugcccaucggcaucaacaucacccgguuccagacccugcuggcccugcaccggagcuaccugaccccaggcgacagcagcagcggguggacagcaggcgcggcugcuuacuacgugggcuaccugcagccccggaccuuccugcugaaguacaacgagaacggcaccaucaccgacgccguggacugcgcccuggacccucugagcgagaccaagugcacccugaagagcuucaccguggagaagggcaucuaccagaccagcaacuuccgggugcagcccaccgagagcaucgugcgguuccccaacaucaccaaccugugccccuucggcgagguguucaacgccacccgguucgccagcguguacgccuggaaccggaagcggaucagcaacugcguggccgacuacagcgugcuguacaacagcgccagcuucagcaccuucaagugcuacggcgugagccccaccaagcugaacgaccugugcuucaccaacguguacgccgacagcuucgugauccguggcgacgaggugcggcagaucgcacccggccagacaggcaagaucgccgacuacaacuacaagcugcccgacgacuucaccggcugcgugaucgccuggaacagcaacaaccucgacagcaaggugggcggcaacuacaacuaccuguaccggcuguuccggaagagcaaccugaagcccuucgagcgggacaucagcaccgagaucuaccaagccggcuccaccccuugcaacggcguggagggcuucaacugcuacuucccucugcagagcuacggcuuccagcccaccuacggcgugggcuaccagcccuaccgggugguggugcugagcuucgagcugcugcacgccccagccaccguguguggccccaagaagagcaccaaccuggugaagaacaagugcgugaacuucaacuucaacggccuuaccggcaccggcgugcugaccgagagcaacaagaaauuccugcccuuucagcaguucggccgggacaucgccgacaccaccgacgcugugcgggauccccagacccuggagauccuggacaucaccccuugcagcuucggcggcgugagcgugaucaccccaggcaccaacaccagcaaccagguggccgugcuguaccagggcgugaacugcaccgaggugcccguggccauccacgccgaccagcugacacccaccuggcgggucuacagcaccggcagcaacguguuccagacccgggccgguugccugaucggcgccgagcacgugaacaacagcuacgagugcgacauccccaucggcgccggcaucugugccagcuaccagacccagaccaauucaccccggagggcaaggagcguggccagccagagcaucaucgccuacaccaugagccugggcgccgagaacagcguggccuacagcaacaacagcaucgccauccccaccaacuucaccaucagcgugaccaccgagauucugcccgugagcaugaccaagaccagcguggacugcaccauguacaucugcggcgacagcaccgagugcagcaaccugcugcugcaguacggcagcuucugcacccagcugaaccgggcccugaccggcaucgccguggagcaggacaagaacacccaggagguguucgcccaggugaagcagaucuacaagaccccucccaucaaggacuucggcggcuucaacuucagccagauccugcccgaccccagcaagcccagcaagcggagcuucaucgaggaccugcuguucaacaaggugacccuagccgacgccggcuucaucaagcaguacggcgacugccucggcgacauagccgcccgggaccugaucugcgcccagaaguucaacggccugaccgugcugccuccccugcugaccgacgagaugaucgcccaguacaccagcgcccuguuagccggaaccaucaccagcggcuggacuuucggcgcuggagccgcucugcagauccccuucgccaugcagauggccuaccgguucaacggcaucggcgugacccagaacgugcuguacgagaaccagaagcugaucgccaaccaguucaacagcgccaucggcaagauccaggacagccugagcagcaccgcuagcgcccugggcaagcugcaggacguggugaaccagaacgcccaggcccugaacacccuggugaagcagcugagcagcaacuucggcgccaucagcagcgugcugaacgacauccugagccggcuggacccucccgaggccgaggugcagaucgaccggcugaucacuggccggcugcagagccugcagaccuacgugacccagcagcugauccgggccgccgagauucgggccagcgccaaccuggccgccaccaagaugagcgagugcgugcugggccagagcaagcggguggacuucugcggcaagggcuaccaccugaugagcuuuccccagagcgcaccccacggagugguguuccugcacgugaccuacgugcccgcccaggagaagaacuucaccaccgccccagccaucugccacgacggcaaggcccacuuuccccgggagggcguguucgugagcaacggcacccacugguucgugacccagcggaacuucuacgagccccagaucaucaccaccgacaacaccuucgugagcggcaacugcgacguggugaucggcaucgugaacaacaccguguacgauccccugcagcccgagcuggacagcuucaaggaggagcuggacaaguacuucaagaaucacaccagccccgacguggaccugggcgacaucagcggcaucaacgccagcguggugaacauccagaaggagaucgaucggcugaacgagguggccaagaaccugaacgagagccugaucgaccugcaggagcugggcaaguacgagcaguacaucaaguggcccugguacaucuggcugggcuucaucgccggccugaucgccaucgugauggugaccaucaugcugugcugcaugaccagcugcugcagcugccugaagggcuguugcagcugcggcagcugcugcaaguucgacgaggacgacagcgagcccgugcugaagggcgugaagcugcacuacaccugaggacuaguuauaagacugacuagcccgaugggccucccaacgggcccuccuccccuccuugcaccgagagaucuaaaaaaaaaaaaaaaaaaaaaaaaaaaaaaaaaaaaaaaaaaaaaaaaaaaaaaaaaaaaaaaaaaaaaaaaaaaaaaaaaaaaaaaaaaaaaaaaaaaa

SEQ ID NO: 25979 - RNA, 4005 nt, Artificial Sequence
  SARS-CoV-2/Wuhan/WIV05/2019__EPI_ISL_402128 spike protein mRNA gc (1-1273)(K986P_V987P_H69del_V70del_D614G)
aggagaaagcuuaccauguucguguuccuggugcugcugccccuggugagcagccagugcgugaaccugaccacccggacccagcugccaccagccuacaccaacagcuucacccggggcgucuacuaccccgacaagguguuccggagcagcguccugcacagcacccaggaccuguuccugcccuucuucagcaacgugaccugguuccacgccaucagcggcaccaacggcaccaagcgguucgacaaccccgugcugcccuucaacgacggcguguacuucgccagcaccgagaagagcaacaucauccggggcuggaucuucggcaccacccuggacagcaagacccagagccugcugaucgugaauaacgccaccaacguggugaucaaggugugcgaguuccaguucugcaacgaccccuuccugggcguguacuaccacaagaacaacaagagcuggauggagagcgaguuccggguguacagcagcgccaacaacugcaccuucgaguacgugagccagcccuuccugauggaccuggagggcaagcagggcaacuucaagaaccugcgggaguucguguucaagaacaucgacggcuacuucaagaucuacagcaagcacaccccaaucaaccuggugcgggaucugccccagggcuucucagcccuggagccccugguggaccugcccaucggcaucaacaucacccgguuccagacccugcuggcccugcaccggagcuaccugaccccaggcgacagcagcagcggguggacagcaggcgcggcugcuuacuacgugggcuaccugcagccccggaccuuccugcugaaguacaacgagaacggcaccaucaccgacgccguggacugcgcccuggacccucugagcgagaccaagugcacccugaagagcuucaccguggagaagggcaucuaccagaccagcaacuuccgggugcagcccaccgagagcaucgugcgguuccccaacaucaccaaccugugccccuucggcgagguguucaacgccacccgguucgccagcguguacgccuggaaccggaagcggaucagcaacugcguggccgacuacagcgugcuguacaacagcgccagcuucagcaccuucaagugcuacggcgugagccccaccaagcugaacgaccugugcuucaccaacguguacgccgacagcuucgugauccguggcgacgaggugcggcagaucgcacccggccagacaggcaagaucgccgacuacaacuacaagcugcccgacgacuucaccggcugcgugaucgccuggaacagcaacaaccucgacagcaaggugggcggcaacuacaacuaccuguaccggcuguuccggaagagcaaccugaagcccuucgagcgggacaucagcaccgagaucuaccaagccggcuccaccccuugcaacggcguggagggcuucaacugcuacuucccucugcagagcuacggcuuccagcccaccaacggcgugggcuaccagcccuaccgggugguggugcugagcuucgagcugcugcacgccccagccaccguguguggccccaagaagagcaccaaccuggugaagaacaagugcgugaacuucaacuucaacggccuuaccggcaccggcgugcugaccgagagcaacaagaaauuccugcccuuucagcaguucggccgggacaucgccgacaccaccgacgcugugcgggauccccagacccuggagauccuggacaucaccccuugcagcuucggcggcgugagcgugaucaccccaggcaccaacaccagcaaccagguggccgugcuguaccagggcgugaacugcaccgaggugcccguggccauccacgccgaccagcugacacccaccuggcgggucuacagcaccggcagcaacguguuccagacccgggccgguugccugaucggcgccgagcacgugaacaacagcuacgagugcgacauccccaucggcgccggcaucugugccagcuaccagacccagaccaauucaccccggagggcaaggagcguggccagccagagcaucaucgccuacaccaugagccugggcgccgagaacagcguggccuacagcaacaacagcaucgccauccccaccaacuucaccaucagcgugaccaccgagauucugcccgugagcaugaccaagaccagcguggacugcaccauguacaucugcggcgacagcaccgagugcagcaaccugcugcugcaguacggcagcuucugcacccagcugaaccgggcccugaccggcaucgccguggagcaggacaagaacacccaggagguguucgcccaggugaagcagaucuacaagaccccucccaucaaggacuucggcggcuucaacuucagccagauccugcccgaccccagcaagcccagcaagcggagcuucaucgaggaccugcuguucaacaaggugacccuagccgacgccggcuucaucaagcaguacggcgacugccucggcgacauagccgcccgggaccugaucugcgcccagaaguucaacggccugaccgugcugccuccccugcugaccgacgagaugaucgcccaguacaccagcgcccuguuagccggaaccaucaccagcggcuggacuuucggcgcuggagccgcucugcagauccccuucgccaugcagauggccuaccgguucaacggcaucggcgugacccagaacgugcuguacgagaaccagaagcugaucgccaaccaguucaacagcgccaucggcaagauccaggacagccugagcagcaccgcuagcgcccugggcaagcugcaggacguggugaaccagaacgcccaggcccugaacacccuggugaagcagcugagcagcaacuucggcgccaucagcagcgugcugaacgacauccugagccggcuggacccucccgaggccgaggugcagaucgaccggcugaucacuggccggcugcagagccugcagaccuacgugacccagcagcugauccgggccgccgagauucgggccagcgccaaccuggccgccaccaagaugagcgagugcgugcugggccagagcaagcggguggacuucugcggcaagggcuaccaccugaugagcuuuccccagagcgcaccccacggagugguguuccugcacgugaccuacgugcccgcccaggagaagaacuucaccaccgccccagccaucugccacgacggcaaggcccacuuuccccgggagggcguguucgugagcaacggcacccacugguucgugacccagcggaacuucuacgagccccagaucaucaccaccgacaacaccuucgugagcggcaacugcgacguggugaucggcaucgugaacaacaccguguacgauccccugcagcccgagcuggacagcuucaaggaggagcuggacaaguacuucaagaaucacaccagccccgacguggaccugggcgacaucagcggcaucaacgccagcguggugaacauccagaaggagaucgaucggcugaacgagguggccaagaaccugaacgagagccugaucgaccugcaggagcugggcaaguacgagcaguacaucaaguggcccugguacaucuggcugggcuucaucgccggccugaucgccaucgugauggugaccaucaugcugugcugcaugaccagcugcugcagcugccugaagggcuguugcagcugcggcagcugcugcaaguucgacgaggacgacagcgagcccgugcugaagggcgugaagcugcacuacaccugaggacuaguuauaagacugacuagcccgaugggccucccaacgggcccuccuccccuccuugcaccgagagaucuaaaaaaaaaaaaaaaaaaaaaaaaaaaaaaaaaaaaaaaaaaaaaaaaaaaaaaaaaaaaaaaaaaaaaaaaaaaaaaaaaaaaaaaaaaaaaaaaaaaa

SEQ ID NO: 25980 - RNA, 4011 nt, Artificial Sequence
  SARS-CoV-2/Wuhan/WIV05/2019__EPI_ISL_402128 spike protein mRNA gc (1-1273)(K986P_V987P_Y453F_D614G)
aggagaaagcuuaccauguucguguuccuggugcugcugccccuggugagcagccagugcgugaaccugaccacccggacccagcugccaccagccuacaccaacagcuucacccggggcgucuacuaccccgacaagguguuccggagcagcguccugcacagcacccaggaccuguuccugcccuucuucagcaacgugaccugguuccacgccauccacgugagcggcaccaacggcaccaagcgguucgacaaccccgugcugcccuucaacgacggcguguacuucgccagcaccgagaagagcaacaucauccggggcuggaucuucggcaccacccuggacagcaagacccagagccugcugaucgugaauaacgccaccaacguggugaucaaggugugcgaguuccaguucugcaacgaccccuuccugggcguguacuaccacaagaacaacaagagcuggauggagagcgaguuccggguguacagcagcgccaacaacugcaccuucgaguacgugagccagcccuuccugauggaccuggagggcaagcagggcaacuucaagaaccugcgggaguucguguucaagaacaucgacggcuacuucaagaucuacagcaagcacaccccaaucaaccuggugcgggaucugccccagggcuucucagcccuggagccccugguggaccugcccaucggcaucaacaucacccgguuccagacccugcuggcccugcaccggagcuaccugaccccaggcgacagcagcagcggguggacagcaggcgcggcugcuuacuacgugggcuaccugcagccccggaccuuccugcugaaguacaacgagaacggcaccaucaccgacgccguggacugcgcccuggacccucugagcgagaccaagugcacccugaagagcuucaccguggagaagggcaucuaccagaccagcaacuuccgggugcagcccaccgagagcaucgugcgguuccccaacaucaccaaccugugccccuucggcgagguguucaacgccacccgguucgccagcguguacgccuggaaccggaagcggaucagcaacugcguggccgacuacagcgugcuguacaacagcgccagcuucagcaccuucaagugcuacggcgugagccccaccaagcugaacgaccugugcuucaccaacguguacgccgacagcuucgugauccguggcgacgaggugcggcagaucgcacccggccagacaggcaagaucgccgacuacaacuacaagcugcccgacgacuucaccggcugcgugaucgccuggaacagcaacaaccucgacagcaaggugggcggcaacuacaacuaccuguuccggcuguuccggaagagcaaccugaagcccuucgagcgggacaucagcaccgagaucuaccaagccggcuccaccccuugcaacggcguggagggcuucaacugcuacuucccucugcagagcuacggcuuccagcccaccaacggcgugggcuaccagcccuaccgggugguggugcugagcuucgagcugcugcacgccccagccaccguguguggccccaagaagagcaccaaccuggugaagaacaagugcgugaacuucaacuucaacggccuuaccggcaccggcgugcugaccgagagcaacaagaaauuccugcccuuucagcaguucggccgggacaucgccgacaccaccgacgcugugcgggauccccagacccuggagauccuggacaucaccccuugcagcuucggcggcgugagcgugaucaccccaggcaccaacaccagcaaccagguggccgugcuguaccagggcgugaacugcaccgaggugcccguggccauccacgccgaccagcugacacccaccuggcgggucuacagcaccggcagcaacguguuccagacccgggccgguugccugaucggcgccgagcacgugaacaacagcuacgagugcgacauccccaucggcgccggcaucugugccagcuaccagacccagaccaauucaccccggagggcaaggagcguggccagccagagcaucaucgccuacaccaugagccugggcgccgagaacagcguggccuacagcaacaacagcaucgccauccccaccaacuucaccaucagcgugaccaccgagauucugcccgugagcaugaccaagaccagcguggacugcaccauguacaucugcggcgacagcaccgagugcagcaaccugcugcugcaguacggcagcuucugcacccagcugaaccgggcccugaccggcaucgccguggagcaggacaagaacacccaggagguguucgcccaggugaagcagaucuacaagaccccucccaucaaggacuucggcggcuucaacuucagccagauccugcccgaccccagcaagcccagcaagcggagcuucaucgaggaccugcuguucaacaaggugacccuagccgacgccggcuucaucaagcaguacggcgacugccucggcgacauagccgcccgggaccugaucugcgcccagaaguucaacggccugaccgugcugccuccccugcugaccgacgagaugaucgcccaguacaccagcgcccuguuagccggaaccaucaccagcggcuggacuuucggcgcuggagccgcucugcagauccccuucgccaugcagauggccuaccgguucaacggcaucggcgugacccagaacgugcuguacgagaaccagaagcugaucgccaaccaguucaacagcgccaucggcaagauccaggacagccugagcagcaccgcuagcgcccugggcaagcugcaggacguggugaaccagaacgcccaggcccugaacacccuggugaagcagcugagcagcaacuucggcgccaucagcagcgugcugaacgacauccugagccggcuggacccucccgaggccgaggugcagaucgaccggcugaucacuggccggcugcagagccugcagaccuacgugacccagcagcugauccgggccgccgagauucgggccagcgccaaccuggccgccaccaagaugagcgagugcgugcugggccagagcaagcggguggacuucugcggcaagggcuaccaccugaugagcuuuccccagagcgcaccccacggagugguguuccugcacgugaccuacgugcccgcccaggagaagaacuucaccaccgccccagccaucugccacgacggcaaggcccacuuuccccgggagggcguguucgugagcaacggcacccacugguucgugacccagcggaacuucuacgagccccagaucaucaccaccgacaacaccuucgugagcggcaacugcgacguggugaucggcaucgugaacaacaccguguacgauccccugcagcccgagcuggacagcuucaaggaggagcuggacaaguacuucaagaaucacaccagccccgacguggaccugggcgacaucagcggcaucaacgccagcguggugaacauccagaaggagaucgaucggcugaacgagguggccaagaaccugaacgagagccugaucgaccugcaggagcugggcaaguacgagcaguacaucaaguggcccugguacaucuggcugggcuucaucgccggccugaucgccaucgugauggugaccaucaugcugugcugcaugaccagcugcugcagcugccugaagggcuguugcagcugcggcagcugcugcaaguucgacgaggacgacagcgagcccgugcugaagggcgugaagcugcacuacaccugaggacuaguuauaagacugacuagcccgaugggccucccaacgggcccuccuccccuccuugcaccgagagaucuaaaaaaaaaaaaaaaaaaaaaaaaaaaaaaaaaaaaaaaaaaaaaaaaaaaaaaaaaaaaaaaaaaaaaaaaaaaaaaaaaaaaaaaaaaaaaaaaaaaa

SEQ ID NO: 25981 - RNA, 4011 nt, Artificial Sequence
  SARS-CoV-2/Wuhan/WIV05/2019__EPI_ISL_402128 spike protein mRNA gc (1-1273)(K986P_V987P_D614G_I692V)
aggagaaagcuuaccauguucguguuccuggugcugcugccccuggugagcagccagugcgugaaccugaccacccggacccagcugccaccagccuacaccaacagcuucacccggggcgucuacuaccccgacaagguguuccggagcagcguccugcacagcacccaggaccuguuccugcccuucuucagcaacgugaccugguuccacgccauccacgugagcggcaccaacggcaccaagcgguucgacaaccccgugcugcccuucaacgacggcguguacuucgccagcaccgagaagagcaacaucauccggggcuggaucuucggcaccacccuggacagcaagacccagagccugcugaucgugaauaacgccaccaacguggugaucaaggugugcgaguuccaguucugcaacgaccccuuccugggcguguacuaccacaagaacaacaagagcuggauggagagcgaguuccggguguacagcagcgccaacaacugcaccuucgaguacgugagccagcccuuccugauggaccuggagggcaagcagggcaacuucaagaaccugcgggaguucguguucaagaacaucgacggcuacuucaagaucuacagcaagcacaccccaaucaaccuggugcgggaucugccccagggcuucucagcccuggagccccugguggaccugcccaucggcaucaacaucacccgguuccagacccugcuggcccugcaccggagcuaccugaccccaggcgacagcagcagcggguggacagcaggcgcggcugcuuacuacgugggcuaccugcagccccggaccuuccugcugaaguacaacgagaacggcaccaucaccgacgccguggacugcgcccuggacccucugagcgagaccaagugcacccugaagagcuucaccguggagaagggcaucuaccagaccagcaacuuccgggugcagcccaccgagagcaucgugcgguuccccaacaucaccaaccugugccccuucggcgagguguucaacgccacccgguucgccagcguguacgccuggaaccggaagcggaucagcaacugcguggccgacuacagcgugcuguacaacagcgccagcuucagcaccuucaagugcuacggcgugagccccaccaagcugaacgaccugugcuucaccaacguguacgccgacagcuucgugauccguggcgacgaggugcggcagaucgcacccggccagacaggcaagaucgccgacuacaacuacaagcugcccgacgacuucaccggcugcgugaucgccuggaacagcaacaaccucgacagcaaggugggcggcaacuacaacuaccuguaccggcuguuccggaagagcaaccugaagcccuucgagcgggacaucagcaccgagaucuaccaagccggcuccaccccuugcaacggcguggagggcuucaacugcuacuucccucugcagagcuacggcuuccagcccaccaacggcgugggcuaccagcccuaccgggugguggugcugagcuucgagcugcugcacgccccagccaccguguguggccccaagaagagcaccaaccuggugaagaacaagugcgugaacuucaacuucaacggccuuaccggcaccggcgugcugaccgagagcaacaagaaauuccugcccuuucagcaguucggccgggacaucgccgacaccaccgacgcugugcgggauccccagacccuggagauccuggacaucaccccuugcagcuucggcggcgugagcgugaucaccccaggcaccaacaccagcaaccagguggccgugcuguaccagggcgugaacugcaccgaggugcccguggccauccacgccgaccagcugacacccaccuggcgggucuacagcaccggcagcaacguguuccagacccgggccgguugccugaucggcgccgagcacgugaacaacagcuacgagugcgacauccccaucggcgccggcaucugugccagcuaccagacccagaccaauucaccccggagggcaaggagcguggccagccagagcgugaucgccuacaccaugagccugggcgccgagaacagcguggccuacagcaacaacagcaucgccauccccaccaacuucaccaucagcgugaccaccgagauucugcccgugagcaugaccaagaccagcguggacugcaccauguacaucugcggcgacagcaccgagugcagcaaccugcugcugcaguacggcagcuucugcacccagcugaaccgggcccugaccggcaucgccguggagcaggacaagaacacccaggagguguucgcccaggugaagcagaucuacaagaccccucccaucaaggacuucggcggcuucaacuucagccagauccugcccgaccccagcaagcccagcaagcggagcuucaucgaggaccugcuguucaacaaggugacccuagccgacgccggcuucaucaagcaguacggcgacugccucggcgacauagccgcccgggaccugaucugcgcccagaaguucaacggccugaccgugcugccuccccugcugaccgacgagaugaucgcccaguacaccagcgcccuguuagccggaaccaucaccagcggcuggacuuucggcgcuggagccgcucugcagauccccuucgccaugcagauggccuaccgguucaacggcaucggcgugacccagaacgugcuguacgagaaccagaagcugaucgccaaccaguucaacagcgccaucggcaagauccaggacagccugagcagcaccgcuagcgcccugggcaagcugcaggacguggugaaccagaacgcccaggcccugaacacccuggugaagcagcugagcagcaacuucggcgccaucagcagcgugcugaacgacauccugagccggcuggacccucccgaggccgaggugcagaucgaccggcugaucacuggccggcugcagagccugcagaccuacgugacccagcagcugauccgggccgccgagauucgggccagcgccaaccuggccgccaccaagaugagcgagugcgugcugggccagagcaagcggguggacuucugcggcaagggcuaccaccugaugagcuuuccccagagcgcaccccacggagugguguuccugcacgugaccuacgugcccgcccaggagaagaacuucaccaccgccccagccaucugccacgacggcaaggcccacuuuccccgggagggcguguucgugagcaacggcacccacugguucgugacccagcggaacuucuacgagccccagaucaucaccaccgacaacaccuucgugagcggcaacugcgacguggugaucggcaucgugaacaacaccguguacgauccccugcagcccgagcuggacagcuucaaggaggagcuggacaaguacuucaagaaucacaccagccccgacguggaccugggcgacaucagcggcaucaacgccagcguggugaacauccagaaggagaucgaucggcugaacgagguggccaagaaccugaacgagagccugaucgaccugcaggagcugggcaaguacgagcaguacaucaaguggcccugguacaucuggcugggcuucaucgccggccugaucgccaucgugauggugaccaucaugcugugcugcaugaccagcugcugcagcugccugaagggcuguugcagcugcggcagcugcugcaaguucgacgaggacgacagcgagcccgugcugaagggcgugaagcugcacuacaccugaggacuaguuauaagacugacuagcccgaugggccucccaacgggcccuccuccccuccuugcaccgagagaucuaaaaaaaaaaaaaaaaaaaaaaaaaaaaaaaaaaaaaaaaaaaaaaaaaaaaaaaaaaaaaaaaaaaaaaaaaaaaaaaaaaaaaaaaaaaaaaaaaaaa

SEQ ID NO: 25982 - RNA, 4011 nt, Artificial Sequence
  SARS-CoV-2/Wuhan/WIV05/2019__EPI_ISL_402128 spike protein mRNA gc (1-1273)(K986P_V987P_D614G_M1229I)
aggagaaagcuuaccauguucguguuccuggugcugcugccccuggugagcagccagugcgugaaccugaccacccggacccagcugccaccagccuacaccaacagcuucacccggggcgucuacuaccccgacaagguguuccggagcagcguccugcacagcacccaggaccuguuccugcccuucuucagcaacgugaccugguuccacgccauccacgugagcggcaccaacggcaccaagcgguucgacaaccccgugcugcccuucaacgacggcguguacuucgccagcaccgagaagagcaacaucauccggggcuggaucuucggcaccacccuggacagcaagacccagagccugcugaucgugaauaacgccaccaacguggugaucaaggugugcgaguuccaguucugcaacgaccccuuccugggcguguacuaccacaagaacaacaagagcuggauggagagcgaguuccggguguacagcagcgccaacaacugcaccuucgaguacgugagccagcccuuccugauggaccuggagggcaagcagggcaacuucaagaaccugcgggaguucguguucaagaacaucgacggcuacuucaagaucuacagcaagcacaccccaaucaaccuggugcgggaucugccccagggcuucucagcccuggagccccugguggaccugcccaucggcaucaacaucacccgguuccagacccugcuggcccugcaccggagcuaccugaccccaggcgacagcagcagcggguggacagcaggcgcggcugcuuacuacgugggcuaccugcagccccggaccuuccugcugaaguacaacgagaacggcaccaucaccgacgccguggacugcgcccuggacccucugagcgagaccaagugcacccugaagagcuucaccguggagaagggcaucuaccagaccagcaacuuccgggugcagcccaccgagagcaucgugcgguuccccaacaucaccaaccugugccccuucggcgagguguucaacgccacccgguucgccagcguguacgccuggaaccggaagcggaucagcaacugcguggccgacuacagcgugcuguacaacagcgccagcuucagcaccuucaagugcuacggcgugagccccaccaagcugaacgaccugugcuucaccaacguguacgccgacagcuucgugauccguggcgacgaggugcggcagaucgcacccggccagacaggcaagaucgccgacuacaacuacaagcugcccgacgacuucaccggcugcgugaucgccuggaacagcaacaaccucgacagcaaggugggcggcaacuacaacuaccuguaccggcuguuccggaagagcaaccugaagcccuucgagcgggacaucagcaccgagaucuaccaagccggcuccaccccuugcaacggcguggagggcuucaacugcuacuucccucugcagagcuacggcuuccagcccaccaacggcgugggcuaccagcccuaccgggugguggugcugagcuucgagcugcugcacgccccagccaccguguguggccccaagaagagcaccaaccuggugaagaacaagugcgugaacuucaacuucaacggccuuaccggcaccggcgugcugaccgagagcaacaagaaauuccugcccuuucagcaguucggccgggacaucgccgacaccaccgacgcugugcgggauccccagacccuggagauccuggacaucaccccuugcagcuucggcggcgugagcgugaucaccccaggcaccaacaccagcaaccagguggccgugcuguaccagggcgugaacugcaccgaggugcccguggccauccacgccgaccagcugacacccaccuggcgggucuacagcaccggcagcaacguguuccagacccgggccgguugccugaucggcgccgagcacgugaacaacagcuacgagugcgacauccccaucggcgccggcaucugugccagcuaccagacccagaccaauucaccccggagggcaaggagcguggccagccagagcaucaucgccuacaccaugagccugggcgccgagaacagcguggccuacagcaacaacagcaucgccauccccaccaacuucaccaucagcgugaccaccgagauucugcccgugagcaugaccaagaccagcguggacugcaccauguacaucugcggcgacagcaccgagugcagcaaccugcugcugcaguacggcagcuucugcacccagcugaaccgggcccugaccggcaucgccguggagcaggacaagaacacccaggagguguucgcccaggugaagcagaucuacaagaccccucccaucaaggacuucggcggcuucaacuucagccagauccugcccgaccccagcaagcccagcaagcggagcuucaucgaggaccugcuguucaacaaggugacccuagccgacgccggcuucaucaagcaguacggcgacugccucggcgacauagccgcccgggaccugaucugcgcccagaaguucaacggccugaccgugcugccuccccugcugaccgacgagaugaucgcccaguacaccagcgcccuguuagccggaaccaucaccagcggcuggacuuucggcgcuggagccgcucugcagauccccuucgccaugcagauggccuaccgguucaacggcaucggcgugacccagaacgugcuguacgagaaccagaagcugaucgccaaccaguucaacagcgccaucggcaagauccaggacagccugagcagcaccgcuagcgcccugggcaagcugcaggacguggugaaccagaacgcccaggcccugaacacccuggugaagcagcugagcagcaacuucggcgccaucagcagcgugcugaacgacauccugagccggcuggacccucccgaggccgaggugcagaucgaccggcugaucacuggccggcugcagagccugcagaccuacgugacccagcagcugauccgggccgccgagauucgggccagcgccaaccuggccgccaccaagaugagcgagugcgugcugggccagagcaagcggguggacuucugcggcaagggcuaccaccugaugagcuuuccccagagcgcaccccacggagugguguuccugcacgugaccuacgugcccgcccaggagaagaacuucaccaccgccccagccaucugccacgacggcaaggcccacuuuccccgggagggcguguucgugagcaacggcacccacugguucgugacccagcggaacuucuacgagccccagaucaucaccaccgacaacaccuucgugagcggcaacugcgacguggugaucggcaucgugaacaacaccguguacgauccccugcagcccgagcuggacagcuucaaggaggagcuggacaaguacuucaagaaucacaccagccccgacguggaccugggcgacaucagcggcaucaacgccagcguggugaacauccagaaggagaucgaucggcugaacgagguggccaagaaccugaacgagagccugaucgaccugcaggagcugggcaaguacgagcaguacaucaaguggcccugguacaucuggcugggcuucaucgccggccugaucgccaucgugaucgugaccaucaugcugugcugcaugaccagcugcugcagcugccugaagggcuguugcagcugcggcagcugcugcaaguucgacgaggacgacagcgagcccgugcugaagggcgugaagcugcacuacaccugaggacuaguuauaagacugacuagcccgaugggccucccaacgggcccuccuccccuccuugcaccgagagaucuaaaaaaaaaaaaaaaaaaaaaaaaaaaaaaaaaaaaaaaaaaaaaaaaaaaaaaaaaaaaaaaaaaaaaaaaaaaaaaaaaaaaaaaaaaaaaaaaaaaa

SEQ ID NO: 25983 - RNA, 4005 nt, Artificial Sequence
  SARS-CoV-2/Wuhan/WIV05/2019__EPI_ISL_402128 spike protein mRNA gc (1-1273)(K986P_V987P_H69del_V70del_A222V_Y453F_S477N_D614G_I692V)
aggagaaagcuuaccauguucguguuccuggugcugcugccccuggugagcagccagugcgugaaccugaccacccggacccagcugccaccagccuacaccaacagcuucacccggggcgucuacuaccccgacaagguguuccggagcagcguccugcacagcacccaggaccuguuccugcccuucuucagcaacgugaccugguuccacgccaucagcggcaccaacggcaccaagcgguucgacaaccccgugcugcccuucaacgacggcguguacuucgccagcaccgagaagagcaacaucauccggggcuggaucuucggcaccacccuggacagcaagacccagagccugcugaucgugaauaacgccaccaacguggugaucaaggugugcgaguuccaguucugcaacgaccccuuccugggcguguacuaccacaagaacaacaagagcuggauggagagcgaguuccggguguacagcagcgccaacaacugcaccuucgaguacgugagccagcccuuccugauggaccuggagggcaagcagggcaacuucaagaaccugcgggaguucguguucaagaacaucgacggcuacuucaagaucuacagcaagcacaccccaaucaaccuggugcgggaucugccccagggcuucucagugcuggagccccugguggaccugcccaucggcaucaacaucacccgguuccagacccugcuggcccugcaccggagcuaccugaccccaggcgacagcagcagcggguggacagcaggcgcggcugcuuacuacgugggcuaccugcagccccggaccuuccugcugaaguacaacgagaacggcaccaucaccgacgccguggacugcgcccuggacccucugagcgagaccaagugcacccugaagagcuucaccguggagaagggcaucuaccagaccagcaacuuccgggugcagcccaccgagagcaucgugcgguuccccaacaucaccaaccugugccccuucggcgagguguucaacgccacccgguucgccagcguguacgccuggaaccggaagcggaucagcaacugcguggccgacuacagcgugcuguacaacagcgccagcuucagcaccuucaagugcuacggcgugagccccaccaagcugaacgaccugugcuucaccaacguguacgccgacagcuucgugauccguggcgacgaggugcggcagaucgcacccggccagacaggcaagaucgccgacuacaacuacaagcugcccgacgacuucaccggcugcgugaucgccuggaacagcaacaaccucgacagcaaggugggcggcaacuacaacuaccuguuccggcuguuccggaagagcaaccugaagcccuucgagcgggacaucagcaccgagaucuaccaagccggcaacaccccuugcaacggcguggagggcuucaacugcuacuucccucugcagagcuacggcuuccagcccaccaacggcgugggcuaccagcccuaccgggugguggugcugagcuucgagcugcugcacgccccagccaccguguguggccccaagaagagcaccaaccuggugaagaacaagugcgugaacuucaacuucaacggccuuaccggcaccggcgugcugaccgagagcaacaagaaauuccugcccuuucagcaguucggccgggacaucgccgacaccaccgacgcugugcgggauccccagacccuggagauccuggacaucaccccuugcagcuucggcggcgugagcgugaucaccccaggcaccaacaccagcaaccagguggccgugcuguaccagggcgugaacugcaccgaggugcccguggccauccacgccgaccagcugacacccaccuggcgggucuacagcaccggcagcaacguguuccagacccgggccgguugccugaucggcgccgagcacgugaacaacagcuacgagugcgacauccccaucggcgccggcaucugugccagcuaccagacccagaccaauucaccccggagggcaaggagcguggccagccagagcgugaucgccuacaccaugagccugggcgccgagaacagcguggccuacagcaacaacagcaucgccauccccaccaacuucaccaucagcgugaccaccgagauucugcccgugagcaugaccaagaccagcguggacugcaccauguacaucugcggcgacagcaccgagugcagcaaccugcugcugcaguacggcagcuucugcacccagcugaaccgggcccugaccggcaucgccguggagcaggacaagaacacccaggagguguucgcccaggugaagcagaucuacaagaccccucccaucaaggacuucggcggcuucaacuucagccagauccugcccgaccccagcaagcccagcaagcggagcuucaucgaggaccugcuguucaacaaggugacccuagccgacgccggcuucaucaagcaguacggcgacugccucggcgacauagccgcccgggaccugaucugcgcccagaaguucaacggccugaccgugcugccuccccugcugaccgacgagaugaucgcccaguacaccagcgcccuguuagccggaaccaucaccagcggcuggacuuucggcgcuggagccgcucugcagauccccuucgccaugcagauggccuaccgguucaacggcaucggcgugacccagaacgugcuguacgagaaccagaagcugaucgccaaccaguucaacagcgccaucggcaagauccaggacagccugagcagcaccgcuagcgcccugggcaagcugcaggacguggugaaccagaacgcccaggcccugaacacccuggugaagcagcugagcagcaacuucggcgccaucagcagcgugcugaacgacauccugagccggcuggacccucccgaggccgaggugcagaucgaccggcugaucacuggccggcugcagagccugcagaccuacgugacccagcagcugauccgggccgccgagauucgggccagcgccaaccuggccgccaccaagaugagcgagugcgugcugggccagagcaagcggguggacuucugcggcaagggcuaccaccugaugagcuuuccccagagcgcaccccacggagugguguuccugcacgugaccuacgugcccgcccaggagaagaacuucaccaccgccccagccaucugccacgacggcaaggcccacuuuccccgggagggcguguucgugagcaacggcacccacugguucgugacccagcggaacuucuacgagccccagaucaucaccaccgacaacaccuucgugagcggcaacugcgacguggugaucggcaucgugaacaacaccguguacgauccccugcagcccgagcuggacagcuucaaggaggagcuggacaaguacuucaagaaucacaccagccccgacguggaccugggcgacaucagcggcaucaacgccagcguggugaacauccagaaggagaucgaucggcugaacgagguggccaagaaccugaacgagagccugaucgaccugcaggagcugggcaaguacgagcaguacaucaaguggcccugguacaucuggcugggcuucaucgccggccugaucgccaucgugauggugaccaucaugcugugcugcaugaccagcugcugcagcugccugaagggcuguugcagcugcggcagcugcugcaaguucgacgaggacgacagcgagcccgugcugaagggcgugaagcugcacuacaccugaggacuaguuauaagacugacuagcccgaugggccucccaacgggcccuccuccccuccuugcaccgagagaucuaaaaaaaaaaaaaaaaaaaaaaaaaaaaaaaaaaaaaaaaaaaaaaaaaaaaaaaaaaaaaaaaaaaaaaaaaaaaaaaaaaaaaaaaaaaaaaaaaaaa

SEQ ID NO: 25984 - RNA, 4005 nt, Artificial Sequence
  SARS-CoV-2/Wuhan/WIV05/2019__EPI_ISL_402128 spike protein mRNA gc (1-1273)(K986P_V987P_H69del_V70del_Y453F_D614G_I692V_M1229I)
aggagaaagcuuaccauguucguguuccuggugcugcugccccuggugagcagccagugcgugaaccugaccacccggacccagcugccaccagccuacaccaacagcuucacccggggcgucuacuaccccgacaagguguuccggagcagcguccugcacagcacccaggaccuguuccugcccuucuucagcaacgugaccugguuccacgccaucagcggcaccaacggcaccaagcgguucgacaaccccgugcugcccuucaacgacggcguguacuucgccagcaccgagaagagcaacaucauccggggcuggaucuucggcaccacccuggacagcaagacccagagccugcugaucgugaauaacgccaccaacguggugaucaaggugugcgaguuccaguucugcaacgaccccuuccugggcguguacuaccacaagaacaacaagagcuggauggagagcgaguuccggguguacagcagcgccaacaacugcaccuucgaguacgugagccagcccuuccugauggaccuggagggcaagcagggcaacuucaagaaccugcgggaguucguguucaagaacaucgacggcuacuucaagaucuacagcaagcacaccccaaucaaccuggugcgggaucugccccagggcuucucagcccuggagccccugguggaccugcccaucggcaucaacaucacccgguuccagacccugcuggcccugcaccggagcuaccugaccccaggcgacagcagcagcggguggacagcaggcgcggcugcuuacuacgugggcuaccugcagccccggaccuuccugcugaaguacaacgagaacggcaccaucaccgacgccguggacugcgcccuggacccucugagcgagaccaagugcacccugaagagcuucaccguggagaagggcaucuaccagaccagcaacuuccgggugcagcccaccgagagcaucgugcgguuccccaacaucaccaaccugugccccuucggcgagguguucaacgccacccgguucgccagcguguacgccuggaaccggaagcggaucagcaacugcguggccgacuacagcgugcuguacaacagcgccagcuucagcaccuucaagugcuacggcgugagccccaccaagcugaacgaccugugcuucaccaacguguacgccgacagcuucgugauccguggcgacgaggugcggcagaucgcacccggccagacaggcaagaucgccgacuacaacuacaagcugcccgacgacuucaccggcugcgugaucgccuggaacagcaacaaccucgacagcaaggugggcggcaacuacaacuaccuguuccggcuguuccggaagagcaaccugaagcccuucgagcgggacaucagcaccgagaucuaccaagccggcuccaccccuugcaacggcguggagggcuucaacugcuacuucccucugcagagcuacggcuuccagcccaccaacggcgugggcuaccagcccuaccgggugguggugcugagcuucgagcugcugcacgccccagccaccguguguggccccaagaagagcaccaaccuggugaagaacaagugcgugaacuucaacuucaacggccuuaccggcaccggcgugcugaccgagagcaacaagaaauuccugcccuuucagcaguucggccgggacaucgccgacaccaccgacgcugugcgggauccccagacccuggagauccuggacaucaccccuugcagcuucggcggcgugagcgugaucaccccaggcaccaacaccagcaaccagguggccgugcuguaccagggcgugaacugcaccgaggugcccguggccauccacgccgaccagcugacacccaccuggcgggucuacagcaccggcagcaacguguuccagacccgggccgguugccugaucggcgccgagcacgugaacaacagcuacgagugcgacauccccaucggcgccggcaucugugccagcuaccagacccagaccaauucaccccggagggcaaggagcguggccagccagagcgugaucgccuacaccaugagccugggcgccgagaacagcguggccuacagcaacaacagcaucgccauccccaccaacuucaccaucagcgugaccaccgagauucugcccgugagcaugaccaagaccagcguggacugcaccauguacaucugcggcgacagcaccgagugcagcaaccugcugcugcaguacggcagcuucugcacccagcugaaccgggcccugaccggcaucgccguggagcaggacaagaacacccaggagguguucgcccaggugaagcagaucuacaagaccccucccaucaaggacuucggcggcuucaacuucagccagauccugcccgaccccagcaagcccagcaagcggagcuucaucgaggaccugcuguucaacaaggugacccuagccgacgccggcuucaucaagcaguacggcgacugccucggcgacauagccgcccgggaccugaucugcgcccagaaguucaacggccugaccgugcugccuccccugcugaccgacgagaugaucgcccaguacaccagcgcccuguuagccggaaccaucaccagcggcuggacuuucggcgcuggagccgcucugcagauccccuucgccaugcagauggccuaccgguucaacggcaucggcgugacccagaacgugcuguacgagaaccagaagcugaucgccaaccaguucaacagcgccaucggcaagauccaggacagccugagcagcaccgcuagcgcccugggcaagcugcaggacguggugaaccagaacgcccaggcccugaacacccuggugaagcagcugagcagcaacuucggcgccaucagcagcgugcugaacgacauccugagccggcuggacccucccgaggccgaggugcagaucgaccggcugaucacuggccggcugcagagccugcagaccuacgugacccagcagcugauccgggccgccgagauucgggccagcgccaaccuggccgccaccaagaugagcgagugcgugcugggccagagcaagcggguggacuucugcggcaagggcuaccaccugaugagcuuuccccagagcgcaccccacggagugguguuccugcacgugaccuacgugcccgcccaggagaagaacuucaccaccgccccagccaucugccacgacggcaaggcccacuuuccccgggagggcguguucgugagcaacggcacccacugguucgugacccagcggaacuucuacgagccccagaucaucaccaccgacaacaccuucgugagcggcaacugcgacguggugaucggcaucgugaacaacaccguguacgauccccugcagcccgagcuggacagcuucaaggaggagcuggacaaguacuucaagaaucacaccagccccgacguggaccugggcgacaucagcggcaucaacgccagcguggugaacauccagaaggagaucgaucggcugaacgagguggccaagaaccugaacgagagccugaucgaccugcaggagcugggcaaguacgagcaguacaucaaguggcccugguacaucuggcugggcuucaucgccggccugaucgccaucgugaucgugaccaucaugcugugcugcaugaccagcugcugcagcugccugaagggcuguugcagcugcggcagcugcugcaaguucgacgaggacgacagcgagcccgugcugaagggcgugaagcugcacuacaccugaggacuaguuauaagacugacuagcccgaugggccucccaacgggcccuccuccccuccuugcaccgagagaucuaaaaaaaaaaaaaaaaaaaaaaaaaaaaaaaaaaaaaaaaaaaaaaaaaaaaaaaaaaaaaaaaaaaaaaaaaaaaaaaaaaaaaaaaaaaaaaaaaaaa

SEQ ID NO: 25985 - RNA, 4002 nt, Artificial Sequence
  SARS-CoV-2/Wuhan/WIV05/2019__EPI_ISL_402128 spike protein mRNA gc (1-1273)(K986P_V987P_K986P_V987P_H69del_V70del_Y144del_N501Y_A570 D_D614G_P681H_T716I_S982A_D1118H)
aggagaaagcuuaccauguucguguuccuggugcugcugccccuggugagcagccagugcgugaaccugaccacccggacccagcugccaccagccuacaccaacagcuucacccggggcgucuacuaccccgacaagguguuccggagcagcguccugcacagcacccaggaccuguuccugcccuucuucagcaacgugaccugguuccacgccaucagcggcaccaacggcaccaagcgguucgacaaccccgugcugcccuucaacgacggcguguacuucgccagcaccgagaagagcaacaucauccggggcuggaucuucggcaccacccuggacagcaagacccagagccugcugaucgugaauaacgccaccaacguggugaucaaggugugcgaguuccaguucugcaacgaccccuuccugggcguguaccacaagaacaacaagagcuggauggagagcgaguuccggguguacagcagcgccaacaacugcaccuucgaguacgugagccagcccuuccugauggaccuggagggcaagcagggcaacuucaagaaccugcgggaguucguguucaagaacaucgacggcuacuucaagaucuacagcaagcacaccccaaucaaccuggugcgggaucugccccagggcuucucagcccuggagccccugguggaccugcccaucggcaucaacaucacccgguuccagacccugcuggcccugcaccggagcuaccugaccccaggcgacagcagcagcggguggacagcaggcgcggcugcuuacuacgugggcuaccugcagccccggaccuuccugcugaaguacaacgagaacggcaccaucaccgacgccguggacugcgcccuggacccucugagcgagaccaagugcacccugaagagcuucaccguggagaagggcaucuaccagaccagcaacuuccgggugcagcccaccgagagcaucgugcgguuccccaacaucaccaaccugugccccuucggcgagguguucaacgccacccgguucgccagcguguacgccuggaaccggaagcggaucagcaacugcguggccgacuacagcgugcuguacaacagcgccagcuucagcaccuucaagugcuacggcgugagccccaccaagcugaacgaccugugcuucaccaacguguacgccgacagcuucgugauccguggcgacgaggugcggcagaucgcacccggccagacaggcaagaucgccgacuacaacuacaagcugcccgacgacuucaccggcugcgugaucgccuggaacagcaacaaccucgacagcaaggugggcggcaacuacaacuaccuguaccggcuguuccggaagagcaaccugaagcccuucgagcgggacaucagcaccgagaucuaccaagccggcuccaccccuugcaacggcguggagggcuucaacugcuacuucccucugcagagcuacggcuuccagcccaccuacggcgugggcuaccagcccuaccgggugguggugcugagcuucgagcugcugcacgccccagccaccguguguggccccaagaagagcaccaaccuggugaagaacaagugcgugaacuucaacuucaacggccuuaccggcaccggcgugcugaccgagagcaacaagaaauuccugcccuuucagcaguucggccgggacaucgacgacaccaccgacgcugugcgggauccccagacccuggagauccuggacaucaccccuugcagcuucggcggcgugagcgugaucaccccaggcaccaacaccagcaaccagguggccgugcuguaccagggcgugaacugcaccgaggugcccguggccauccacgccgaccagcugacacccaccuggcgggucuacagcaccggcagcaacguguuccagacccgggccgguugccugaucggcgccgagcacgugaacaacagcuacgagugcgacauccccaucggcgccggcaucugugccagcuaccagacccagaccaauucacaccggagggcaaggagcguggccagccagagcaucaucgccuacaccaugagccugggcgccgagaacagcguggccuacagcaacaacagcaucgccauccccaucaacuucaccaucagcgugaccaccgagauucugcccgugagcaugaccaagaccagcguggacugcaccauguacaucugcggcgacagcaccgagugcagcaaccugcugcugcaguacggcagcuucugcacccagcugaaccgggcccugaccggcaucgccguggagcaggacaagaacacccaggagguguucgcccaggugaagcagaucuacaagaccccucccaucaaggacuucggcggcuucaacuucagccagauccugcccgaccccagcaagcccagcaagcggagcuucaucgaggaccugcuguucaacaaggugacccuagccgacgccggcuucaucaagcaguacggcgacugccucggcgacauagccgcccgggaccugaucugcgcccagaaguucaacggccugaccgugcugccuccccugcugaccgacgagaugaucgcccaguacaccagcgcccuguuagccggaaccaucaccagcggcuggacuuucggcgcuggagccgcucugcagauccccuucgccaugcagauggccuaccgguucaacggcaucggcgugacccagaacgugcuguacgagaaccagaagcugaucgccaaccaguucaacagcgccaucggcaagauccaggacagccugagcagcaccgcuagcgcccugggcaagcugcaggacguggugaaccagaacgcccaggcccugaacacccuggugaagcagcugagcagcaacuucggcgccaucagcagcgugcugaacgacauccuggcccggcuggacccucccgaggccgaggugcagaucgaccggcugaucacuggccggcugcagagccugcagaccuacgugacccagcagcugauccgggccgccgagauucgggccagcgccaaccuggccgccaccaagaugagcgagugcgugcugggccagagcaagcggguggacuucugcggcaagggcuaccaccugaugagcuuuccccagagcgcaccccacggagugguguuccugcacgugaccuacgugcccgcccaggagaagaacuucaccaccgccccagccaucugccacgacggcaaggcccacuuuccccgggagggcguguucgugagcaacggcacccacugguucgugacccagcggaacuucuacgagccccagaucaucaccacccacaacaccuucgugagcggcaacugcgacguggugaucggcaucgugaacaacaccguguacgauccccugcagcccgagcuggacagcuucaaggaggagcuggacaaguacuucaagaaucacaccagccccgacguggaccugggcgacaucagcggcaucaacgccagcguggugaacauccagaaggagaucgaucggcugaacgagguggccaagaaccugaacgagagccugaucgaccugcaggagcugggcaaguacgagcaguacaucaaguggcccugguacaucuggcugggcuucaucgccggccugaucgccaucgugauggugaccaucaugcugugcugcaugaccagcugcugcagcugccugaagggcuguugcagcugcggcagcugcugcaaguucgacgaggacgacagcgagcccgugcugaagggcgugaagcugcacuacaccugaggacuaguuauaagacugacuagcccgaugggccucccaacgggcccuccuccccuccuugcaccgagagaucuaaaaaaaaaaaaaaaaaaaaaaaaaaaaaaaaaaaaaaaaaaaaaaaaaaaaaaaaaaaaaaaaaaaaaaaaaaaaaaaaaaaaaaaaaaaaaaaaaaaa

SEQ ID NO: 25986 - RNA, 4011 nt, Artificial Sequence
  SARS-CoV-2/Wuhan/WIV05/2019__EPI_ISL_402128 spike protein mRNA gc (1-1273)(K986P_V987P_K986P_V987P_K417N_E484K_N501Y_D614G)
aggagaaagcuuaccauguucguguuccuggugcugcugccccuggugagcagccagugcgugaaccugaccacccggacccagcugccaccagccuacaccaacagcuucacccggggcgucuacuaccccgacaagguguuccggagcagcguccugcacagcacccaggaccuguuccugcccuucuucagcaacgugaccugguuccacgccauccacgugagcggcaccaacggcaccaagcgguucgacaaccccgugcugcccuucaacgacggcguguacuucgccagcaccgagaagagcaacaucauccggggcuggaucuucggcaccacccuggacagcaagacccagagccugcugaucgugaauaacgccaccaacguggugaucaaggugugcgaguuccaguucugcaacgaccccuuccugggcguguacuaccacaagaacaacaagagcuggauggagagcgaguuccggguguacagcagcgccaacaacugcaccuucgaguacgugagccagcccuuccugauggaccuggagggcaagcagggcaacuucaagaaccugcgggaguucguguucaagaacaucgacggcuacuucaagaucuacagcaagcacaccccaaucaaccuggugcgggaucugccccagggcuucucagcccuggagccccugguggaccugcccaucggcaucaacaucacccgguuccagacccugcuggcccugcaccggagcuaccugaccccaggcgacagcagcagcggguggacagcaggcgcggcugcuuacuacgugggcuaccugcagccccggaccuuccugcugaaguacaacgagaacggcaccaucaccgacgccguggacugcgcccuggacccucugagcgagaccaagugcacccugaagagcuucaccguggagaagggcaucuaccagaccagcaacuuccgggugcagcccaccgagagcaucgugcgguuccccaacaucaccaaccugugccccuucggcgagguguucaacgccacccgguucgccagcguguacgccuggaaccggaagcggaucagcaacugcguggccgacuacagcgugcuguacaacagcgccagcuucagcaccuucaagugcuacggcgugagccccaccaagcugaacgaccugugcuucaccaacguguacgccgacagcuucgugauccguggcgacgaggugcggcagaucgcacccggccagacaggcaacaucgccgacuacaacuacaagcugcccgacgacuucaccggcugcgugaucgccuggaacagcaacaaccucgacagcaaggugggcggcaacuacaacuaccuguaccggcuguuccggaagagcaaccugaagcccuucgagcgggacaucagcaccgagaucuaccaagccggcuccaccccuugcaacggcgugaagggcuucaacugcuacuucccucugcagagcuacggcuuccagcccaccuacggcgugggcuaccagcccuaccgggugguggugcugagcuucgagcugcugcacgccccagccaccguguguggccccaagaagagcaccaaccuggugaagaacaagugcgugaacuucaacuucaacggccuuaccggcaccggcgugcugaccgagagcaacaagaaauuccugcccuuucagcaguucggccgggacaucgccgacaccaccgacgcugugcgggauccccagacccuggagauccuggacaucaccccuugcagcuucggcggcgugagcgugaucaccccaggcaccaacaccagcaaccagguggccgugcuguaccagggcgugaacugcaccgaggugcccguggccauccacgccgaccagcugacacccaccuggcgggucuacagcaccggcagcaacguguuccagacccgggccgguugccugaucggcgccgagcacgugaacaacagcuacgagugcgacauccccaucggcgccggcaucugugccagcuaccagacccagaccaauucaccccggagggcaaggagcguggccagccagagcaucaucgccuacaccaugagccugggcgccgagaacagcguggccuacagcaacaacagcaucgccauccccaccaacuucaccaucagcgugaccaccgagauucugcccgugagcaugaccaagaccagcguggacugcaccauguacaucugcggcgacagcaccgagugcagcaaccugcugcugcaguacggcagcuucugcacccagcugaaccgggcccugaccggcaucgccguggagcaggacaagaacacccaggagguguucgcccaggugaagcagaucuacaagaccccucccaucaaggacuucggcggcuucaacuucagccagauccugcccgaccccagcaagcccagcaagcggagcuucaucgaggaccugcuguucaacaaggugacccuagccgacgccggcuucaucaagcaguacggcgacugccucggcgacauagccgcccgggaccugaucugcgcccagaaguucaacggccugaccgugcugccuccccugcugaccgacgagaugaucgcccaguacaccagcgcccuguuagccggaaccaucaccagcggcuggacuuucggcgcuggagccgcucugcagauccccuucgccaugcagauggccuaccgguucaacggcaucggcgugacccagaacgugcuguacgagaaccagaagcugaucgccaaccaguucaacagcgccaucggcaagauccaggacagccugagcagcaccgcuagcgcccugggcaagcugcaggacguggugaaccagaacgcccaggcccugaacacccuggugaagcagcugagcagcaacuucggcgccaucagcagcgugcugaacgacauccugagccggcuggacccucccgaggccgaggugcagaucgaccggcugaucacuggccggcugcagagccugcagaccuacgugacccagcagcugauccgggccgccgagauucgggccagcgccaaccuggccgccaccaagaugagcgagugcgugcugggccagagcaagcggguggacuucugcggcaagggcuaccaccugaugagcuuuccccagagcgcaccccacggagugguguuccugcacgugaccuacgugcccgcccaggagaagaacuucaccaccgccccagccaucugccacgacggcaaggcccacuuuccccgggagggcguguucgugagcaacggcacccacugguucgugacccagcggaacuucuacgagccccagaucaucaccaccgacaacaccuucgugagcggcaacugcgacguggugaucggcaucgugaacaacaccguguacgauccccugcagcccgagcuggacagcuucaaggaggagcuggacaaguacuucaagaaucacaccagccccgacguggaccugggcgacaucagcggcaucaacgccagcguggugaacauccagaaggagaucgaucggcugaacgagguggccaagaaccugaacgagagccugaucgaccugcaggagcugggcaaguacgagcaguacaucaaguggcccugguacaucuggcugggcuucaucgccggccugaucgccaucgugauggugaccaucaugcugugcugcaugaccagcugcugcagcugccugaagggcuguugcagcugcggcagcugcugcaaguucgacgaggacgacagcgagcccgugcugaagggcgugaagcugcacuacaccugaggacuaguuauaagacugacuagcccgaugggccucccaacgggcccuccuccccuccuugcaccgagagaucuaaaaaaaaaaaaaaaaaaaaaaaaaaaaaaaaaaaaaaaaaaaaaaaaaaaaaaaaaaaaaaaaaaaaaaaaaaaaaaaaaaaaaaaaaaaaaaaaaaaa

SEQ ID NO: 25987 - RNA, 4002 nt, Artificial Sequence
  SARS-CoV-2/Wuhan/WIV05/2019__EPI_ISL_402128 spike protein mRNA gc (1-1273)(K986P_V987P_K986P_V987P_L18F_D80A_D215G_L242del_A243del_ L244del_R246I_K417N_E484K_N501Y_D614G_A701V)
aggagaaagcuuaccauguucguguuccuggugcugcugccccuggugagcagccagugcgugaacuucaccacccggacccagcugccaccagccuacaccaacagcuucacccggggcgucuacuaccccgacaagguguuccggagcagcguccugcacagcacccaggaccuguuccugcccuucuucagcaacgugaccugguuccacgccauccacgugagcggcaccaacggcaccaagcgguucgccaaccccgugcugcccuucaacgacggcguguacuucgccagcaccgagaagagcaacaucauccggggcuggaucuucggcaccacccuggacagcaagacccagagccugcugaucgugaauaacgccaccaacguggugaucaaggugugcgaguuccaguucugcaacgaccccuuccugggcguguacuaccacaagaacaacaagagcuggauggagagcgaguuccggguguacagcagcgccaacaacugcaccuucgaguacgugagccagcccuuccugauggaccuggagggcaagcagggcaacuucaagaaccugcgggaguucguguucaagaacaucgacggcuacuucaagaucuacagcaagcacaccccaaucaaccuggugcggggccugccccagggcuucucagcccuggagccccugguggaccugcccaucggcaucaacaucacccgguuccagacccugcacaucagcuaccugaccccaggcgacagcagcagcggguggacagcaggcgcggcugcuuacuacgugggcuaccugcagccccggaccuuccugcugaaguacaacgagaacggcaccaucaccgacgccguggacugcgcccuggacccucugagcgagaccaagugcacccugaagagcuucaccguggagaagggcaucuaccagaccagcaacuuccgggugcagcccaccgagagcaucgugcgguuccccaacaucaccaaccugugccccuucggcgagguguucaacgccacccgguucgccagcguguacgccuggaaccggaagcggaucagcaacugcguggccgacuacagcgugcuguacaacagcgccagcuucagcaccuucaagugcuacggcgugagccccaccaagcugaacgaccugugcuucaccaacguguacgccgacagcuucgugauccguggcgacgaggugcggcagaucgcacccggccagacaggcaacaucgccgacuacaacuacaagcugcccgacgacuucaccggcugcgugaucgccuggaacagcaacaaccucgacagcaaggugggcggcaacuacaacuaccuguaccggcuguuccggaagagcaaccugaagcccuucgagcgggacaucagcaccgagaucuaccaagccggcuccaccccuugcaacggcgugaagggcuucaacugcuacuucccucugcagagcuacggcuuccagcccaccuacggcgugggcuaccagcccuaccgggugguggugcugagcuucgagcugcugcacgccccagccaccguguguggccccaagaagagcaccaaccuggugaagaacaagugcgugaacuucaacuucaacggccuuaccggcaccggcgugcugaccgagagcaacaagaaauuccugcccuuucagcaguucggccgggacaucgccgacaccaccgacgcugugcgggauccccagacccuggagauccuggacaucaccccuugcagcuucggcggcgugagcgugaucaccccaggcaccaacaccagcaaccagguggccgugcuguaccagggcgugaacugcaccgaggugcccguggccauccacgccgaccagcugacacccaccuggcgggucuacagcaccggcagcaacguguuccagacccgggccgguugccugaucggcgccgagcacgugaacaacagcuacgagugcgacauccccaucggcgccggcaucugugccagcuaccagacccagaccaauucaccccggagggcaaggagcguggccagccagagcaucaucgccuacaccaugagccugggcguggagaacagcguggccuacagcaacaacagcaucgccauccccaccaacuucaccaucagcgugaccaccgagauucugcccgugagcaugaccaagaccagcguggacugcaccauguacaucugcggcgacagcaccgagugcagcaaccugcugcugcaguacggcagcuucugcacccagcugaaccgggcccugaccggcaucgccguggagcaggacaagaacacccaggagguguucgcccaggugaagcagaucuacaagaccccucccaucaaggacuucggcggcuucaacuucagccagauccugcccgaccccagcaagcccagcaagcggagcuucaucgaggaccugcuguucaacaaggugacccuagccgacgccggcuucaucaagcaguacggcgacugccucggcgacauagccgcccgggaccugaucugcgcccagaaguucaacggccugaccgugcugccuccccugcugaccgacgagaugaucgcccaguacaccagcgcccuguuagccggaaccaucaccagcggcuggacuuucggcgcuggagccgcucugcagauccccuucgccaugcagauggccuaccgguucaacggcaucggcgugacccagaacgugcuguacgagaaccagaagcugaucgccaaccaguucaacagcgccaucggcaagauccaggacagccugagcagcaccgcuagcgcccugggcaagcugcaggacguggugaaccagaacgcccaggcccugaacacccuggugaagcagcugagcagcaacuucggcgccaucagcagcgugcugaacgacauccugagccggcuggacccucccgaggccgaggugcagaucgaccggcugaucacuggccggcugcagagccugcagaccuacgugacccagcagcugauccgggccgccgagauucgggccagcgccaaccuggccgccaccaagaugagcgagugcgugcugggccagagcaagcggguggacuucugcggcaagggcuaccaccugaugagcuuuccccagagcgcaccccacggagugguguuccugcacgugaccuacgugcccgcccaggagaagaacuucaccaccgccccagccaucugccacgacggcaaggcccacuuuccccgggagggcguguucgugagcaacggcacccacugguucgugacccagcggaacuucuacgagccccagaucaucaccaccgacaacaccuucgugagcggcaacugcgacguggugaucggcaucgugaacaacaccguguacgauccccugcagcccgagcuggacagcuucaaggaggagcuggacaaguacuucaagaaucacaccagccccgacguggaccugggcgacaucagcggcaucaacgccagcguggugaacauccagaaggagaucgaucggcugaacgagguggccaagaaccugaacgagagccugaucgaccugcaggagcugggcaaguacgagcaguacaucaaguggcccugguacaucuggcugggcuucaucgccggccugaucgccaucgugauggugaccaucaugcugugcugcaugaccagcugcugcagcugccugaagggcuguugcagcugcggcagcugcugcaaguucgacgaggacgacagcgagcccgugcugaagggcgugaagcugcacuacaccugaggacuaguuauaagacugacuagcccgaugggccucccaacgggcccuccuccccuccuugcaccgagagaucuaaaaaaaaaaaaaaaaaaaaaaaaaaaaaaaaaaaaaaaaaaaaaaaaaaaaaaaaaaaaaaaaaaaaaaaaaaaaaaaaaaaaaaaaaaaaaaaaaaaa

SEQ ID NO: 25988 - RNA, 4011 nt, Artificial Sequence
  SARS-CoV-2/Wuhan/WIV05/2019__EPI_ISL_402128 spike protein mRNA gc (1-1273)(K986P_V987P_K986P_V987P_E484K_D614G)
aggagaaagcuuaccauguucguguuccuggugcugcugccccuggugagcagccagugcgugaaccugaccacccggacccagcugccaccagccuacaccaacagcuucacccggggcgucuacuaccccgacaagguguuccggagcagcguccugcacagcacccaggaccuguuccugcccuucuucagcaacgugaccugguuccacgccauccacgugagcggcaccaacggcaccaagcgguucgacaaccccgugcugcccuucaacgacggcguguacuucgccagcaccgagaagagcaacaucauccggggcuggaucuucggcaccacccuggacagcaagacccagagccugcugaucgugaauaacgccaccaacguggugaucaaggugugcgaguuccaguucugcaacgaccccuuccugggcguguacuaccacaagaacaacaagagcuggauggagagcgaguuccggguguacagcagcgccaacaacugcaccuucgaguacgugagccagcccuuccugauggaccuggagggcaagcagggcaacuucaagaaccugcgggaguucguguucaagaacaucgacggcuacuucaagaucuacagcaagcacaccccaaucaaccuggugcgggaucugccccagggcuucucagcccuggagccccugguggaccugcccaucggcaucaacaucacccgguuccagacccugcuggcccugcaccggagcuaccugaccccaggcgacagcagcagcggguggacagcaggcgcggcugcuuacuacgugggcuaccugcagccccggaccuuccugcugaaguacaacgagaacggcaccaucaccgacgccguggacugcgcccuggacccucugagcgagaccaagugcacccugaagagcuucaccguggagaagggcaucuaccagaccagcaacuuccgggugcagcccaccgagagcaucgugcgguuccccaacaucaccaaccugugccccuucggcgagguguucaacgccacccgguucgccagcguguacgccuggaaccggaagcggaucagcaacugcguggccgacuacagcgugcuguacaacagcgccagcuucagcaccuucaagugcuacggcgugagccccaccaagcugaacgaccugugcuucaccaacguguacgccgacagcuucgugauccguggcgacgaggugcggcagaucgcacccggccagacaggcaagaucgccgacuacaacuacaagcugcccgacgacuucaccggcugcgugaucgccuggaacagcaacaaccucgacagcaaggugggcggcaacuacaacuaccuguaccggcuguuccggaagagcaaccugaagcccuucgagcgggacaucagcaccgagaucuaccaagccggcuccaccccuugcaacggcgugaagggcuucaacugcuacuucccucugcagagcuacggcuuccagcccaccaacggcgugggcuaccagcccuaccgggugguggugcugagcuucgagcugcugcacgccccagccaccguguguggccccaagaagagcaccaaccuggugaagaacaagugcgugaacuucaacuucaacggccuuaccggcaccggcgugcugaccgagagcaacaagaaauuccugcccuuucagcaguucggccgggacaucgccgacaccaccgacgcugugcgggauccccagacccuggagauccuggacaucaccccuugcagcuucggcggcgugagcgugaucaccccaggcaccaacaccagcaaccagguggccgugcuguaccagggcgugaacugcaccgaggugcccguggccauccacgccgaccagcugacacccaccuggcgggucuacagcaccggcagcaacguguuccagacccgggccgguugccugaucggcgccgagcacgugaacaacagcuacgagugcgacauccccaucggcgccggcaucugugccagcuaccagacccagaccaauucaccccggagggcaaggagcguggccagccagagcaucaucgccuacaccaugagccugggcgccgagaacagcguggccuacagcaacaacagcaucgccauccccaccaacuucaccaucagcgugaccaccgagauucugcccgugagcaugaccaagaccagcguggacugcaccauguacaucugcggcgacagcaccgagugcagcaaccugcugcugcaguacggcagcuucugcacccagcugaaccgggcccugaccggcaucgccguggagcaggacaagaacacccaggagguguucgcccaggugaagcagaucuacaagaccccucccaucaaggacuucggcggcuucaacuucagccagauccugcccgaccccagcaagcccagcaagcggagcuucaucgaggaccugcuguucaacaaggugacccuagccgacgccggcuucaucaagcaguacggcgacugccucggcgacauagccgcccgggaccugaucugcgcccagaaguucaacggccugaccgugcugccuccccugcugaccgacgagaugaucgcccaguacaccagcgcccuguuagccggaaccaucaccagcggcuggacuuucggcgcuggagccgcucugcagauccccuucgccaugcagauggccuaccgguucaacggcaucggcgugacccagaacgugcuguacgagaaccagaagcugaucgccaaccaguucaacagcgccaucggcaagauccaggacagccugagcagcaccgcuagcgcccugggcaagcugcaggacguggugaaccagaacgcccaggcccugaacacccuggugaagcagcugagcagcaacuucggcgccaucagcagcgugcugaacgacauccugagccggcuggacccucccgaggccgaggugcagaucgaccggcugaucacuggccggcugcagagccugcagaccuacgugacccagcagcugauccgggccgccgagauucgggccagcgccaaccuggccgccaccaagaugagcgagugcgugcugggccagagcaagcggguggacuucugcggcaagggcuaccaccugaugagcuuuccccagagcgcaccccacggagugguguuccugcacgugaccuacgugcccgcccaggagaagaacuucaccaccgccccagccaucugccacgacggcaaggcccacuuuccccgggagggcguguucgugagcaacggcacccacugguucgugacccagcggaacuucuacgagccccagaucaucaccaccgacaacaccuucgugagcggcaacugcgacguggugaucggcaucgugaacaacaccguguacgauccccugcagcccgagcuggacagcuucaaggaggagcuggacaaguacuucaagaaucacaccagccccgacguggaccugggcgacaucagcggcaucaacgccagcguggugaacauccagaaggagaucgaucggcugaacgagguggccaagaaccugaacgagagccugaucgaccugcaggagcugggcaaguacgagcaguacaucaaguggcccugguacaucuggcugggcuucaucgccggccugaucgccaucgugauggugaccaucaugcugugcugcaugaccagcugcugcagcugccugaagggcuguugcagcugcggcagcugcugcaaguucgacgaggacgacagcgagcccgugcugaagggcgugaagcugcacuacaccugaggacuaguuauaagacugacuagcccgaugggccucccaacgggcccuccuccccuccuugcaccgagagaucuaaaaaaaaaaaaaaaaaaaaaaaaaaaaaaaaaaaaaaaaaaaaaaaaaaaaaaaaaaaaaaaaaaaaaaaaaaaaaaaaaaaaaaaaaaaaaaaaaaaa

SEQ ID NO: 25989 - RNA, 4011 nt, Artificial Sequence
  SARS-CoV-2/Wuhan/WIV05/2019__EPI_ISL_402128 spike protein mRNA gc (1-1273)(K986P_V987P_K986P_V987P_L18F_T20N_P26S_D138Y_R190S_K417T _E484K_N501Y_D614G_H655Y_T1027I)
aggagaaagcuuaccauguucguguuccuggugcugcugccccuggugagcagccagugcgugaacuucaccaaccggacccagcugccaagcgccuacaccaacagcuucacccggggcgucuacuaccccgacaagguguuccggagcagcguccugcacagcacccaggaccuguuccugcccuucuucagcaacgugaccugguuccacgccauccacgugagcggcaccaacggcaccaagcgguucgacaaccccgugcugcccuucaacgacggcguguacuucgccagcaccgagaagagcaacaucauccggggcuggaucuucggcaccacccuggacagcaagacccagagccugcugaucgugaauaacgccaccaacguggugaucaaggugugcgaguuccaguucugcaacuaccccuuccugggcguguacuaccacaagaacaacaagagcuggauggagagcgaguuccggguguacagcagcgccaacaacugcaccuucgaguacgugagccagcccuuccugauggaccuggagggcaagcagggcaacuucaagaaccugagcgaguucguguucaagaacaucgacggcuacuucaagaucuacagcaagcacaccccaaucaaccuggugcgggaucugccccagggcuucucagcccuggagccccugguggaccugcccaucggcaucaacaucacccgguuccagacccugcuggcccugcaccggagcuaccugaccccaggcgacagcagcagcggguggacagcaggcgcggcugcuuacuacgugggcuaccugcagccccggaccuuccugcugaaguacaacgagaacggcaccaucaccgacgccguggacugcgcccuggacccucugagcgagaccaagugcacccugaagagcuucaccguggagaagggcaucuaccagaccagcaacuuccgggugcagcccaccgagagcaucgugcgguuccccaacaucaccaaccugugccccuucggcgagguguucaacgccacccgguucgccagcguguacgccuggaaccggaagcggaucagcaacugcguggccgacuacagcgugcuguacaacagcgccagcuucagcaccuucaagugcuacggcgugagccccaccaagcugaacgaccugugcuucaccaacguguacgccgacagcuucgugauccguggcgacgaggugcggcagaucgcacccggccagacaggcaccaucgccgacuacaacuacaagcugcccgacgacuucaccggcugcgugaucgccuggaacagcaacaaccucgacagcaaggugggcggcaacuacaacuaccuguaccggcuguuccggaagagcaaccugaagcccuucgagcgggacaucagcaccgagaucuaccaagccggcuccaccccuugcaacggcgugaagggcuucaacugcuacuucccucugcagagcuacggcuuccagcccaccuacggcgugggcuaccagcccuaccgggugguggugcugagcuucgagcugcugcacgccccagccaccguguguggccccaagaagagcaccaaccuggugaagaacaagugcgugaacuucaacuucaacggccuuaccggcaccggcgugcugaccgagagcaacaagaaauuccugcccuuucagcaguucggccgggacaucgccgacaccaccgacgcugugcgggauccccagacccuggagauccuggacaucaccccuugcagcuucggcggcgugagcgugaucaccccaggcaccaacaccagcaaccagguggccgugcuguaccagggcgugaacugcaccgaggugcccguggccauccacgccgaccagcugacacccaccuggcgggucuacagcaccggcagcaacguguuccagacccgggccgguugccugaucggcgccgaguacgugaacaacagcuacgagugcgacauccccaucggcgccggcaucugugccagcuaccagacccagaccaauucaccccggagggcaaggagcguggccagccagagcaucaucgccuacaccaugagccugggcgccgagaacagcguggccuacagcaacaacagcaucgccauccccaccaacuucaccaucagcgugaccaccgagauucugcccgugagcaugaccaagaccagcguggacugcaccauguacaucugcggcgacagcaccgagugcagcaaccugcugcugcaguacggcagcuucugcacccagcugaaccgggcccugaccggcaucgccguggagcaggacaagaacacccaggagguguucgcccaggugaagcagaucuacaagaccccucccaucaaggacuucggcggcuucaacuucagccagauccugcccgaccccagcaagcccagcaagcggagcuucaucgaggaccugcuguucaacaaggugacccuagccgacgccggcuucaucaagcaguacggcgacugccucggcgacauagccgcccgggaccugaucugcgcccagaaguucaacggccugaccgugcugccuccccugcugaccgacgagaugaucgcccaguacaccagcgcccuguuagccggaaccaucaccagcggcuggacuuucggcgcuggagccgcucugcagauccccuucgccaugcagauggccuaccgguucaacggcaucggcgugacccagaacgugcuguacgagaaccagaagcugaucgccaaccaguucaacagcgccaucggcaagauccaggacagccugagcagcaccgcuagcgcccugggcaagcugcaggacguggugaaccagaacgcccaggcccugaacacccuggugaagcagcugagcagcaacuucggcgccaucagcagcgugcugaacgacauccugagccggcuggacccucccgaggccgaggugcagaucgaccggcugaucacuggccggcugcagagccugcagaccuacgugacccagcagcugauccgggccgccgagauucgggccagcgccaaccuggccgccaucaagaugagcgagugcgugcugggccagagcaagcggguggacuucugcggcaagggcuaccaccugaugagcuuuccccagagcgcaccccacggagugguguuccugcacgugaccuacgugcccgcccaggagaagaacuucaccaccgccccagccaucugccacgacggcaaggcccacuuuccccgggagggcguguucgugagcaacggcacccacugguucgugacccagcggaacuucuacgagccccagaucaucaccaccgacaacaccuucgugagcggcaacugcgacguggugaucggcaucgugaacaacaccguguacgauccccugcagcccgagcuggacagcuucaaggaggagcuggacaaguacuucaagaaucacaccagccccgacguggaccugggcgacaucagcggcaucaacgccagcguggugaacauccagaaggagaucgaucggcugaacgagguggccaagaaccugaacgagagccugaucgaccugcaggagcugggcaaguacgagcaguacaucaaguggcccugguacaucuggcugggcuucaucgccggccugaucgccaucgugauggugaccaucaugcugugcugcaugaccagcugcugcagcugccugaagggcuguugcagcugcggcagcugcugcaaguucgacgaggacgacagcgagcccgugcugaagggcgugaagcugcacuacaccugaggacuaguuauaagacugacuagcccgaugggccucccaacgggcccuccuccccuccuugcaccgagagaucuaaaaaaaaaaaaaaaaaaaaaaaaaaaaaaaaaaaaaaaaaaaaaaaaaaaaaaaaaaaaaaaaaaaaaaaaaaaaaaaaaaaaaaaaaaaaaaaaaaaa

SEQ ID NO: 25990 - RNA, 4011 nt, Artificial Sequence
  SARS-CoV-2/Wuhan/WIV05/2019__EPI_ISL_402128 spike protein mRNA gc (1-1273)(K986P_V987P_K986P_V987P_S13I_W152C_L452R_D614G)
aggagaaagcuuaccauguucguguuccuggugcugcugccccuggugagcauccagugcgugaaccugaccacccggacccagcugccaccagccuacaccaacagcuucacccggggcgucuacuaccccgacaagguguuccggagcagcguccugcacagcacccaggaccuguuccugcccuucuucagcaacgugaccugguuccacgccauccacgugagcggcaccaacggcaccaagcgguucgacaaccccgugcugcccuucaacgacggcguguacuucgccagcaccgagaagagcaacaucauccggggcuggaucuucggcaccacccuggacagcaagacccagagccugcugaucgugaauaacgccaccaacguggugaucaaggugugcgaguuccaguucugcaacgaccccuuccugggcguguacuaccacaagaacaacaagagcugcauggagagcgaguuccggguguacagcagcgccaacaacugcaccuucgaguacgugagccagcccuuccugauggaccuggagggcaagcagggcaacuucaagaaccugcgggaguucguguucaagaacaucgacggcuacuucaagaucuacagcaagcacaccccaaucaaccuggugcgggaucugccccagggcuucucagcccuggagccccugguggaccugcccaucggcaucaacaucacccgguuccagacccugcuggcccugcaccggagcuaccugaccccaggcgacagcagcagcggguggacagcaggcgcggcugcuuacuacgugggcuaccugcagccccggaccuuccugcugaaguacaacgagaacggcaccaucaccgacgccguggacugcgcccuggacccucugagcgagaccaagugcacccugaagagcuucaccguggagaagggcaucuaccagaccagcaacuuccgggugcagcccaccgagagcaucgugcgguuccccaacaucaccaaccugugccccuucggcgagguguucaacgccacccgguucgccagcguguacgccuggaaccggaagcggaucagcaacugcguggccgacuacagcgugcuguacaacagcgccagcuucagcaccuucaagugcuacggcgugagccccaccaagcugaacgaccugugcuucaccaacguguacgccgacagcuucgugauccguggcgacgaggugcggcagaucgcacccggccagacaggcaagaucgccgacuacaacuacaagcugcccgacgacuucaccggcugcgugaucgccuggaacagcaacaaccucgacagcaaggugggcggcaacuacaacuaccgcuaccggcuguuccggaagagcaaccugaagcccuucgagcgggacaucagcaccgagaucuaccaagccggcuccaccccuugcaacggcguggagggcuucaacugcuacuucccucugcagagcuacggcuuccagcccaccaacggcgugggcuaccagcccuaccgggugguggugcugagcuucgagcugcugcacgccccagccaccguguguggccccaagaagagcaccaaccuggugaagaacaagugcgugaacuucaacuucaacggccuuaccggcaccggcgugcugaccgagagcaacaagaaauuccugcccuuucagcaguucggccgggacaucgccgacaccaccgacgcugugcgggauccccagacccuggagauccuggacaucaccccuugcagcuucggcggcgugagcgugaucaccccaggcaccaacaccagcaaccagguggccgugcuguaccagggcgugaacugcaccgaggugcccguggccauccacgccgaccagcugacacccaccuggcgggucuacagcaccggcagcaacguguuccagacccgggccgguugccugaucggcgccgagcacgugaacaacagcuacgagugcgacauccccaucggcgccggcaucugugccagcuaccagacccagaccaauucaccccggagggcaaggagcguggccagccagagcaucaucgccuacaccaugagccugggcgccgagaacagcguggccuacagcaacaacagcaucgccauccccaccaacuucaccaucagcgugaccaccgagauucugcccgugagcaugaccaagaccagcguggacugcaccauguacaucugcggcgacagcaccgagugcagcaaccugcugcugcaguacggcagcuucugcacccagcugaaccgggcccugaccggcaucgccguggagcaggacaagaacacccaggagguguucgcccaggugaagcagaucuacaagaccccucccaucaaggacuucggcggcuucaacuucagccagauccugcccgaccccagcaagcccagcaagcggagcuucaucgaggaccugcuguucaacaaggugacccuagccgacgccggcuucaucaagcaguacggcgacugccucggcgacauagccgcccgggaccugaucugcgcccagaaguucaacggccugaccgugcugccuccccugcugaccgacgagaugaucgcccaguacaccagcgcccuguuagccggaaccaucaccagcggcuggacuuucggcgcuggagccgcucugcagauccccuucgccaugcagauggccuaccgguucaacggcaucggcgugacccagaacgugcuguacgagaaccagaagcugaucgccaaccaguucaacagcgccaucggcaagauccaggacagccugagcagcaccgcuagcgcccugggcaagcugcaggacguggugaaccagaacgcccaggcccugaacacccuggugaagcagcugagcagcaacuucggcgccaucagcagcgugcugaacgacauccugagccggcuggacccucccgaggccgaggugcagaucgaccggcugaucacuggccggcugcagagccugcagaccuacgugacccagcagcugauccgggccgccgagauucgggccagcgccaaccuggccgccaccaagaugagcgagugcgugcugggccagagcaagcggguggacuucugcggcaagggcuaccaccugaugagcuuuccccagagcgcaccccacggagugguguuccugcacgugaccuacgugcccgcccaggagaagaacuucaccaccgccccagccaucugccacgacggcaaggcccacuuuccccgggagggcguguucgugagcaacggcacccacugguucgugacccagcggaacuucuacgagccccagaucaucaccaccgacaacaccuucgugagcggcaacugcgacguggugaucggcaucgugaacaacaccguguacgauccccugcagcccgagcuggacagcuucaaggaggagcuggacaaguacuucaagaaucacaccagccccgacguggaccugggcgacaucagcggcaucaacgccagcguggugaacauccagaaggagaucgaucggcugaacgagguggccaagaaccugaacgagagccugaucgaccugcaggagcugggcaaguacgagcaguacaucaaguggcccugguacaucuggcugggcuucaucgccggccugaucgccaucgugauggugaccaucaugcugugcugcaugaccagcugcugcagcugccugaagggcuguugcagcugcggcagcugcugcaaguucgacgaggacgacagcgagcccgugcugaagggcgugaagcugcacuacaccugaggacuaguuauaagacugacuagcccgaugggccucccaacgggcccuccuccccuccuugcaccgagagaucuaaaaaaaaaaaaaaaaaaaaaaaaaaaaaaaaaaaaaaaaaaaaaaaaaaaaaaaaaaaaaaaaaaaaaaaaaaaaaaaaaaaaaaaaaaaaaaaaaaaa

SEQ ID NO: 25991 - RNA, 4011 nt, Artificial Sequence
  SARS-CoV-2/Wuhan/WIV05/2019__EPI_ISL_402128 spike protein mRNA gc (1-1273)(K986P_V987P)
aggagaaagcuuaccauguucguguuccuggugcugcugccccuggugagcagccagugcgugaaccugaccacccggacccagcugcccccugccuacaccaacagcuucacccggggcguguacuaccccgacaagguguuccggagcagcgugcugcacagcacccaggaccuguuccugcccuucuucagcaacgugaccugguuccacgccauccacgugagcggcaccaacggcaccaagcgguucgacaacccagugcugcccuucaacgacggcguguacuucgccagcaccgagaagucaaacaucauccggggcuggaucuucggcaccacccuggacagcaagacacagagccugcugaucgugaacaacgccaccaacguggugaucaaggugugcgaguuucaguucugcaacgaccccuuccugggcguguacuaccacaagaacaacaagagcuggauggagagcgaguuccgggucuacagcagcgcuaacaauugcaccuucgaguacgugagccagcccuuccugauggaccucgagggcaagcagggcaacuucaagaaccugcgggaguucguguucaagaacaucgauggcuacuucaagaucuacagcaagcacacccccaucaaccuggugcgggaccugccccagggauucagcgcccuggagccucugguggaccugcccaucggcaucaacaucaccagguuccagacccugcuggcccugcaccggagcuaccugacccccggcgacagcagcagcggcuggaccgccggcgccgccgcauacuacgugggcuaccugcagccacggaccuuccugcugaaguacaacgagaacggcaccaucaccgacgccguggacugcgcccuggacccccugagcgagaccaagugcacccuaaagagcuucaccguggagaagggcaucuaccagaccagcaacuuccgggugcagcccacugagagcaucgugcgguuccccaacauuaccaaccugugucccuucggcgagguguucaacgccacccgguucgccagcguguacgccuggaaccggaagcggaucagcaacugcguggccgacuacagcgugcuguacaacagcgccagcuucagcaccuucaagugcuacggcgugagcccuaccaagcugaacgaccugugcuucaccaacguguacgcugacagcuucgugauccggggcgacgaggugcggcagaucgcccccggccagaccggcaagaucgccgacuacaacuacaagcugcccgacgacuucaccggcugcgugaucgccuggaacagcaacaaccuggacagcaaggugggcggcaacuacaacuaccuguaccggcuguuccguaagagcaaccugaagccauucgagcgggacaucagcaccgagaucuaccaggccggcagcacccccugcaacgguguggagggcuuuaacugcuacuucccccugcagagcuacggcuuccagcccaccaacggcgugggcuaccagcccuaccgggugguggugcugagcuucgagcugcugcacgcccccgccaccgugugcggcccuaaaaagagcaccaaccuggugaagaacaagugcgugaacuucaauuucaacggccugaccggcaccggcgugcugaccgagagcaacaagaaguuccugcccuuccagcaguucggccgggauaucgccgacaccaccgacgcagugcgggacccccagacccuggagauccuggacaucaccccaugcagcuucggcggcgugagcgucaucacccccggcacaaacaccagcaaccagguggccgugcuguaccaggacgugaacugcaccgaggugcccguggccauccacgccgaccagcugacccccaccuggcggguguacagcaccggaagcaacguguuccagacccgggccggcugccugaucggcgccgagcacgugaacaacuccuacgagugcgacauccccaucggcgcuggcaucugcgccagcuaccagacccagaccaacagcccccggcgggcccggagcguggccagccagagcaucaucgccuacaccaugagcuuaggcgccgagaacagcguggccuacagcaacaacagcaucgcgaucccuaccaacuucaccaucagcgugaccaccgagauacugcccgugagcaugaccaagaccagcguggacuguaccauguacaucugcggcgacagcaccgagugcagcaaccugcugcugcaguacggcagcuucugcacccagcugaaccgggcccugaccggcaucgccguggagcaggacaagaacacccaagagguguucgcccaggugaagcagaucuacaagacucccccaaucaaggacuucggcggcuucaacuucagccagauccugcccgaccccagcaagcccagcaagcggagcuucaucgaggaccugcuguucaacaaggugacccuggccgacgccggcuucaucaagcaguacggcgauugccugggcgacaucgccgcucgggaccugaucugcgcccagaaguucaacgggcugaccgugcugcccccucugcugaccgacgagaugaucgcccaguacaccagcgcccugcuugccggcaccaucaccagcggcuggaccuucggcgccggcgcagcccugcagauccccuucgccaugcagauggccuaccgguucaacggcaucggcgugacccagaacgugcuguacgagaaccagaagcugaucgccaaccaguucaacagcgccaucggcaagauccaggacagccugagcagcaccgccagcgcccugggcaagcugcaggacguggugaaccagaacgcucaggcccugaacacccuggugaagcagcugagcagcaacuucggcgccaucagcucagugcugaaugacauccugagcaggcuggaucccccagaggccgaggugcagaucgaccggcugaucaccggccggcugcagagccugcagaccuacgugacccagcagcugauccgggccgccgagauccgggccagcgccaaccuggcagccaccaagaugagcgagugcgugcugggccagagcaagcggguggacuuuugcggcaagggcuaccaccugaugagcuucccccagagcgcuccccacggcgugguguuccuccacgugacauacguccccgcccaggagaagaacuucaccaccgcccccgccauuugccacgacggcaaggcccacuucccccgggagggcguguucgugagcaacggaacccacugguucgugacccagcggaacuucuacgagccucagaucaucaccaccgacaacaccuucgugagcggcaacugcgacguggugaucggcaucgugaacaacaccguguacgacccccugcagcccgagcuggacagcuucaaggaggagcuggacaaguacuucaagaaccacaccagcccagacguggaccugggcgacaucagcggcaucaacgccagcguggugaacauccagaaggagaucgaccggcugaacgagguggccaagaaccugaacgagagccugaucgaccugcaggagcugggcaaguacgagcaguacaucaaguggcccugguacaucuggcugggcuucaucgccggccugaucgccaucgugauggugaccaucaugcugugcugcaugaccagcugcuguagcugccugaagggcugcugcagcugcggcagcugcugcaaguucgacgaggacgacagcgagcccgugcugaagggcgugaagcugcacuacaccugaggacuaguuauaagacugacuagcccgaugggccucccaacgggcccuccuccccuccuugcaccgagagaucuaaaaaaaaaaaaaaaaaaaaaaaaaaaaaaaaaaaaaaaaaaaaaaaaaaaaaaaaaaaaaaaaaaaaaaaaaaaaaaaaaaaaaaaaaaaaaaaaaaaa

SEQ ID NO: 25992 - RNA, 4011 nt, Artificial Sequence
  SARS-CoV-2/Wuhan/WIV05/2019__EPI_ISL_402128 spike protein mRNA gc (1-1273)(K986P_V987P_ D614G)
aggagaaagcuuaccauguucguguuccuggugcugcugccccuggugagcagccagugcgugaaccugaccacccggacccagcugcccccugccuacaccaacagcuucacccggggcguguacuaccccgacaagguguuccggagcagcgugcugcacagcacccaggaccuguuccugcccuucuucagcaacgugaccugguuccacgccauccacgugagcggcaccaacggcaccaagcgguucgacaacccagugcugcccuucaacgacggcguguacuucgccagcaccgagaagucaaacaucauccggggcuggaucuucggcaccacccuggacagcaagacacagagccugcugaucgugaacaacgccaccaacguggugaucaaggugugcgaguuucaguucugcaacgaccccuuccugggcguguacuaccacaagaacaacaagagcuggauggagagcgaguuccgggucuacagcagcgcuaacaauugcaccuucgaguacgugagccagcccuuccugauggaccucgagggcaagcagggcaacuucaagaaccugcgggaguucguguucaagaacaucgauggcuacuucaagaucuacagcaagcacacccccaucaaccuggugcgggaccugccccagggauucagcgcccuggagccucugguggaccugcccaucggcaucaacaucaccagguuccagacccugcuggcccugcaccggagcuaccugacccccggcgacagcagcagcggcuggaccgccggcgccgccgcauacuacgugggcuaccugcagccacggaccuuccugcugaaguacaacgagaacggcaccaucaccgacgccguggacugcgcccuggacccccugagcgagaccaagugcacccuaaagagcuucaccguggagaagggcaucuaccagaccagcaacuuccgggugcagcccacugagagcaucgugcgguuccccaacauuaccaaccugugucccuucggcgagguguucaacgccacccgguucgccagcguguacgccuggaaccggaagcggaucagcaacugcguggccgacuacagcgugcuguacaacagcgccagcuucagcaccuucaagugcuacggcgugagcccuaccaagcugaacgaccugugcuucaccaacguguacgcugacagcuucgugauccggggcgacgaggugcggcagaucgcccccggccagaccggcaagaucgccgacuacaacuacaagcugcccgacgacuucaccggcugcgugaucgccuggaacagcaacaaccuggacagcaaggugggcggcaacuacaacuaccuguaccggcuguuccguaagagcaaccugaagccauucgagcgggacaucagcaccgagaucuaccaggccggcagcacccccugcaacgguguggagggcuuuaacugcuacuucccccugcagagcuacggcuuccagcccaccaacggcgugggcuaccagcccuaccgggugguggugcugagcuucgagcugcugcacgcccccgccaccgugugcggcccuaaaaagagcaccaaccuggugaagaacaagugcgugaacuucaauuucaacggccugaccggcaccggcgugcugaccgagagcaacaagaaguuccugcccuuccagcaguucggccgggauaucgccgacaccaccgacgcagugcgggacccccagacccuggagauccuggacaucaccccaugcagcuucggcggcgugagcgucaucacccccggcacaaacaccagcaaccagguggccgugcuguaccagggagugaacugcaccgaggugcccguggccauccacgccgaccagcugacccccaccuggcggguguacagcaccggcagcaacguguuccagacccgggccggcugccugaucggcgccgagcacgugaacaacuccuacgagugcgacauccccaucggcgcuggcaucugcgccagcuaccagacccagaccaacagcccccggcgggcccggagcguggccagccagagcaucaucgccuacaccaugagcuuaggcgccgagaacagcguggccuacagcaacaacagcaucgcgaucccuaccaacuucaccaucagcgugaccaccgagauacugcccgugagcaugaccaagaccagcguggacuguaccauguacaucugcggcgacagcaccgagugcagcaaccugcugcugcaguacggcagcuucugcacccagcugaaccgggcccugaccggcaucgccguggagcaggacaagaacacccaagagguguucgcccaggugaagcagaucuacaagacucccccaaucaaggacuucggcggcuucaacuucagccagauccugcccgaccccagcaagcccagcaagcggagcuucaucgaggaccugcuguucaacaaggugacccuggccgacgccggcuucaucaagcaguacggcgacugccugggggauaucgccgcucgggaccugaucugcgcccagaaguucaacggccugaccgugcugcccccucugcugaccgacgagaugaucgcccaguacaccagcgcccugcuugccggcaccaucaccagcggcuggaccuucggcgccggcgcagcccugcagauccccuucgccaugcagauggccuaccgguucaacggcaucggcgugacccagaacgugcuguacgagaaccagaagcugaucgccaaccaguucaacagcgccaucggcaagauccaggacagccugagcagcaccgccagcgcccugggcaagcugcaggacguggugaaccagaacgcucaggcccugaacacccuggugaagcagcugagcagcaacuucggcgccaucagcucagugcugaaugacauccugagcaggcuggaucccccagaggccgaggugcagaucgaccggcugaucaccggccggcugcagagccugcagaccuacgugacccagcagcugauccgggccgccgagauccgggccagcgccaaccuggcagccaccaagaugagcgagugcgugcugggccagagcaagcggguggacuuuugcggcaagggcuaccaccugaugagcuucccccagagcgcuccccacggcgugguguuccuccacgugacauacguccccgcccaggagaagaacuucaccaccgcccccgccauuugccacgacggcaaggcccacuucccccgggagggaguguucgugagcaacggcacccacugguucgugacccagcggaacuucuacgagccucagaucaucaccaccgacaacaccuucgugagcggcaacugcgacguggugaucggcaucgugaacaacaccguguacgacccccugcagcccgagcuggacagcuucaaggaggagcuggacaaguacuucaagaaccacaccagcccagacguggaccugggcgacaucagcggcaucaacgccagcguggugaacauccagaaggagaucgaccggcugaacgagguggccaagaaccugaacgagagccugaucgaccugcaggagcugggcaaguacgagcaguacaucaaguggcccugguacaucuggcugggcuucaucgccggccugaucgccaucgugauggugaccaucaugcugugcugcaugaccagcugcuguagcugccugaagggcugcugcagcugcggcagcugcugcaaguucgacgaggacgacagcgagcccgugcugaagggcgugaagcugcacuacaccugaggacuaguuauaagacugacuagcccgaugggccucccaacgggcccuccuccccuccuugcaccgagagaucuaaaaaaaaaaaaaaaaaaaaaaaaaaaaaaaaaaaaaaaaaaaaaaaaaaaaaaaaaaaaaaaaaaaaaaaaaaaaaaaaaaaaaaaaaaaaaaaaaaaa

SEQ ID NO: 25993 - RNA, 4011 nt, Artificial Sequence
  SARS-CoV-2/Wuhan/WIV05/2019__EPI_ISL_402128 spike protein mRNA gc (1-1273)(K986P_V987P_A222V_D614G)
aggagaaagcuuaccauguucguguuccuggugcugcugccccuggugagcagccagugcgugaaccugaccacccggacccagcugcccccugccuacaccaacagcuucacccggggcguguacuaccccgacaagguguuccggagcagcgugcugcacagcacccaggaccuguuccugcccuucuucagcaacgugaccugguuccacgccauccacgugagcggcaccaacggcaccaagcgguucgacaacccagugcugcccuucaacgacggcguguacuucgccagcaccgagaagucaaacaucauccggggcuggaucuucggcaccacccuggacagcaagacacagagccugcugaucgugaacaacgccaccaacguggugaucaaggugugcgaguuucaguucugcaacgaccccuuccugggcguguacuaccacaagaacaacaagagcuggauggagagcgaguuccgggucuacagcagcgcuaacaauugcaccuucgaguacgugagccagcccuuccugauggaccucgagggcaagcagggcaacuucaagaaccugcgggaguucguguucaagaacaucgauggcuacuucaagaucuacagcaagcacacccccaucaaccuggugcgggaccugccccagggauucagcgugcuggagccucugguggaccugcccaucggcaucaacaucaccagguuccagacccugcuggcccugcaccggagcuaccugacccccggcgacagcagcagcggcuggaccgccggcgccgccgccuacuacgugggcuaccugcagccacggaccuuccugcugaaguacaacgagaacggcaccaucaccgacgcaguggacugcgcccuggacccccugagcgagaccaagugcacccuaaagagcuucaccguggagaagggcaucuaccagaccagcaacuuccgggugcagcccacugagagcaucgugcgguuccccaacauuaccaaccugugucccuucggcgagguguucaacgccacccgguucgccagcguguacgccuggaaccggaagcggaucagcaacugcguggccgacuacagcgugcuguacaacagcgccagcuucagcaccuucaagugcuacggcgugagcccuaccaagcugaacgaccugugcuucaccaacguguacgccgacagcuucgugauccggggcgacgaggugcggcagaucgcucccggccagaccggcaagaucgccgacuacaacuacaagcugcccgacgacuucaccggcugcgugaucgccuggaacagcaacaaccuggacagcaaggugggcggcaacuacaacuaccuguaccggcuguuccguaagagcaaccugaagccauucgagcgggacaucagcaccgagaucuaccaggccggcagcacccccugcaacgguguggagggcuuuaacugcuacuucccccugcagagcuacggcuuccagcccaccaacggcgugggcuaccagcccuaccgggugguggugcugagcuucgagcugcugcacgcccccgccaccgugugcggcccuaaaaagagcaccaaccuggugaagaacaagugcgugaacuucaauuucaacggccugaccggcaccggcgugcugaccgagagcaacaagaaguuccugcccuuccagcaguucggccgggauaucgccgacaccaccgacgccgugcgggacccccagacccuggagauccuggacaucaccccaugcagcuucggcggcgucagcgugaucacccccggcacaaacaccagcaaccagguggcagugcuguaccagggagugaacugcaccgaggugcccguggccauccacgccgaccagcugacccccaccuggcggguguacagcaccggcagcaacguguuccagacccgggccggcugccugaucggcgccgagcacgugaacaacuccuacgagugcgacauccccaucggcgccggcaucugcgcuagcuaccagacccagaccaacagcccccggcgggcccggagcguggccagccagagcaucaucgccuacaccaugagcuuaggcgccgagaacagcguggccuacagcaacaacagcaucgccaucccuaccaacuucaccaucagcgugaccaccgagauacugcccgugagcaugaccaagaccagcguggacuguaccauguacaucugcggcgacagcaccgagugcagcaaccugcugcugcaguacggcagcuucugcacccagcugaaccgggcgcugaccggcaucgccguggagcaggacaagaacacccaagagguguucgcccaggugaagcagaucuacaagacucccccaaucaaggacuucggcggcuucaacuucagccagauccugcccgaccccagcaagcccagcaagcggagcuucaucgaggaccugcuguucaacaaggugacccuggccgacgccggcuucaucaagcaguacggcgacugccugggggauaucgccgcccgggaccugaucugcgcucagaaguucaacggccugaccgugcugcccccucugcugaccgacgagaugaucgcccaguacaccagcgcccugcuugccggcaccaucaccagcggcuggaccuucggcgccggcgccgcacugcagauccccuucgccaugcagauggccuaccgguucaacggcaucggcgugacccagaacgugcuguacgagaaccagaagcugaucgccaaccaguucaacagcgccaucggcaagauccaggacagccugagcagcaccgccagcgcccugggcaagcugcaggacguggugaaccagaacgcccaggcucugaacacccuggugaagcagcugagcagcaacuucggcgccaucagcucagugcugaaugacauccugagcaggcuggaucccccagaggccgaggugcagaucgaccggcugaucaccggccggcugcagagccugcagaccuacgugacccagcagcugauccgggccgccgagauccgggccagcgccaaccuggccgcaaccaagaugagcgagugcgugcugggccagagcaagcggguggacuuuugcggcaagggcuaccaccugaugagcuucccccagagcgcuccccacggcgugguguuccuccacgucacauacgugcccgcccaggagaagaacuucaccaccgcccccgccauuugccacgacggcaaggcccacuucccccgggagggaguguucgugagcaacggcacccacugguucgugacccagcggaacuucuacgagccucagaucaucaccaccgacaacaccuucgugagcggcaacugcgacguggugaucggcaucgugaacaacaccguguacgacccccugcagcccgagcuggacagcuucaaggaggagcuggacaaguacuucaagaaccacaccagcccagacguggaccugggcgacaucagcggcaucaacgccagcguggugaacauccagaaggagaucgaccggcugaacgagguggccaagaaccugaacgagagccugaucgaccugcaggagcugggcaaguacgagcaguacaucaaguggcccugguacaucuggcugggcuucaucgccggccugaucgccaucgugauggugaccaucaugcugugcugcaugaccagcugcuguagcugccugaagggcugcugcagcugcggcagcugcugcaaguucgacgaggacgacagcgagcccgugcugaagggcgugaagcugcacuacaccugaggacuaguuauaagacugacuagcccgaugggccucccaacgggcccuccuccccuccuugcaccgagagaucuaaaaaaaaaaaaaaaaaaaaaaaaaaaaaaaaaaaaaaaaaaaaaaaaaaaaaaaaaaaaaaaaaaaaaaaaaaaaaaaaaaaaaaaaaaaaaaaaaaaa

SEQ ID NO: 25994 - RNA, 4011 nt, Artificial Sequence
  SARS-CoV-2/Wuhan/WIV05/2019__EPI_ISL_402128 spike protein mRNA gc (1-1273)(K986P_V987P_N439K_D614G)
aggagaaagcuuaccauguucguguuccuggugcugcugccccuggugagcagccagugcgugaaccugaccacccggacccagcugcccccugccuacaccaacagcuucacccggggcguguacuaccccgacaagguguuccggagcagcgugcugcacagcacccaggaccuguuccugcccuucuucagcaacgugaccugguuccacgccauccacgugagcggcaccaacggcaccaagcgguucgacaacccagugcugcccuucaacgacggcguguacuucgccagcaccgagaagucaaacaucauccggggcuggaucuucggcaccacccuggacagcaagacacagagccugcugaucgugaacaacgccaccaacguggugaucaaggugugcgaguuucaguucugcaacgaccccuuccugggcguguacuaccacaagaacaacaagagcuggauggagagcgaguuccgggucuacagcagcgcuaacaauugcaccuucgaguacgugagccagcccuuccugauggaccucgagggcaagcagggcaacuucaagaaccugcgggaguucguguucaagaacaucgauggcuacuucaagaucuacagcaagcacacccccaucaaccuggugcgggaccugccccagggauucagcgcccuggagccucugguggaccugcccaucggcaucaacaucaccagguuccagacccugcuggcccugcaccggagcuaccugacccccggcgacagcagcagcggcuggaccgccggcgccgccgcauacuacgugggcuaccugcagccacggaccuuccugcugaaguacaacgagaacggcaccaucaccgacgccguggacugcgcccuggacccccugagcgagaccaagugcacccuaaagagcuucaccguggagaagggcaucuaccagaccagcaacuuccgggugcagcccacugagagcaucgugcgguuccccaacauuaccaaccugugucccuucggcgagguguucaacgccacccgguucgccagcguguacgccuggaaccggaagcggaucagcaacugcguggccgacuacagcgugcuguacaacagcgccagcuucagcaccuucaagugcuacggcgugagcccuaccaagcugaacgaccugugcuucaccaacguguacgcugacagcuucgugauccggggcgacgaggugcggcagaucgcccccggccagaccggcaagaucgccgacuacaacuacaagcugcccgacgacuucaccggcugcgugaucgccuggaacagcaagaaccuggacagcaaggugggcggcaacuacaacuaccuguaccggcuguuccguaagagcaaccugaagccauucgagcgggacaucagcaccgagaucuaccaggccggcagcacccccugcaacgguguggagggcuuuaacugcuacuucccccugcagagcuacggcuuccagcccaccaacggcgugggcuaccagcccuaccgggugguggugcugagcuucgagcugcugcacgcccccgccaccgugugcggcccuaaaaagagcaccaaccuggugaagaacaagugcgugaacuucaacuucaauggccugaccggcaccggcgugcugaccgagagcaacaagaaguuccugcccuuccagcaguucggccgggauaucgccgacaccaccgacgcagugcgggacccccagacccuggagauccuggacaucaccccaugcagcuucggcggcgugagcgucaucacccccggcacaaacaccagcaaccagguggccgugcuguaccagggagugaacugcaccgaggugcccguggccauccacgccgaccagcugacccccaccuggcggguguacagcaccggcagcaacguguuccagacccgggccggcugccugaucggcgccgagcacgugaacaacuccuacgagugcgacauccccaucggcgcuggcaucugcgccagcuaccagacccagaccaacagcccccggcgggcccggagcguggccagccagagcaucaucgccuacaccaugagcuuaggcgccgagaacagcguggccuacagcaacaacagcaucgcgaucccuaccaacuucaccaucagcgugaccaccgagauacugcccgugagcaugaccaagaccagcguggacuguaccauguacaucugcggcgacagcaccgagugcagcaaccugcugcugcaguacggcagcuucugcacccagcugaaccgggcccugaccggcaucgccguggagcaggacaagaacacccaagagguguucgcccaggugaagcagaucuacaagacucccccaaucaaggacuucggcggcuucaacuucagccagauccugcccgaccccagcaagcccagcaagcggagcuucaucgaggaccugcuguucaacaaggugacccuggccgacgccggcuucaucaagcaguacggcgacugccugggggauaucgccgcucgggaccugaucugcgcccagaaguucaacggccugaccgugcugcccccucugcugaccgacgagaugaucgcccaguacaccagcgcccugcuugccggcaccaucaccagcggcuggaccuucggcgccggcgcagcccugcagauccccuucgccaugcagauggccuaccgguucaacggcaucggcgugacccagaacgugcuguacgagaaccagaagcugaucgccaaccaguucaacagcgccaucggcaagauccaggacagccugagcagcaccgccagcgcccugggcaagcugcaggacguggugaaccagaacgcucaggcccugaacacccuggugaagcagcugagcagcaacuucggcgccaucagcucagugcugaacgacauccugagcaggcuggaucccccagaggccgaggugcagaucgaccggcugaucaccggccggcugcagagccugcagaccuacgugacccagcagcugauccgggccgccgagauccgggccagcgccaaucuggcagccaccaagaugagcgagugcgugcugggccagagcaagcggguggacuuuugcggcaagggcuaccaccugaugagcuucccccagagcgcuccccacggcgugguguuccuccacgugacauacguccccgcccaggagaagaacuucaccaccgcccccgccauuugccacgacggcaaggcccacuucccccgggagggaguguucgugagcaacggcacccacugguucgugacccagcggaacuucuacgagccucagaucaucaccaccgacaacaccuucgugagcggcaacugcgacguggugaucggcaucgugaacaacaccguguacgacccccugcagcccgagcuggacagcuucaaggaggagcuggacaaguacuucaagaaccacaccagcccagacguggaccugggcgacaucagcggcaucaacgccagcguggugaacauccagaaggagaucgaccggcugaacgagguggccaagaaccugaacgagagccugaucgaccugcaggagcugggcaaguacgagcaguacaucaaguggcccugguacaucuggcugggcuucaucgccggccugaucgccaucgugauggugaccaucaugcugugcugcaugaccagcugcuguagcugccugaagggcugcugcagcugcggcagcugcugcaaguucgacgaggacgacagcgagcccgugcugaagggcgugaagcugcacuacaccugaggacuaguuauaagacugacuagcccgaugggccucccaacgggcccuccuccccuccuugcaccgagagaucuaaaaaaaaaaaaaaaaaaaaaaaaaaaaaaaaaaaaaaaaaaaaaaaaaaaaaaaaaaaaaaaaaaaaaaaaaaaaaaaaaaaaaaaaaaaaaaaaaaaa

SEQ ID NO: 25995 - RNA, 4011 nt, Artificial Sequence
  SARS-CoV-2/Wuhan/WIV05/2019__EPI_ISL_402128 spike protein mRNA gc (1-1273)(K986P_V987P_S477N_D614G)
aggagaaagcuuaccauguucguguuccuggugcugcugccccuggugagcagccagugcgugaaccugaccacccggacccagcugcccccugccuacaccaacagcuucacccggggcguguacuaccccgacaagguguuccggagcagcgugcugcacagcacccaggaccuguuccugcccuucuucagcaacgugaccugguuccacgccauccacgugagcggcaccaacggcaccaagcgguucgacaacccagugcugcccuucaacgacggcguguacuucgccagcaccgagaagucaaacaucauccggggcuggaucuucggcaccacccuggacagcaagacacagagccugcugaucgugaacaacgccaccaacguggugaucaaggugugcgaguuucaguucugcaacgaccccuuccugggcguguacuaccacaagaacaacaagagcuggauggagagcgaguuccgggucuacagcagcgcuaacaauugcaccuucgaguacgugagccagcccuuccugauggaccucgagggcaagcagggcaacuucaagaaccugcgggaguucguguucaagaacaucgauggcuacuucaagaucuacagcaagcacacccccaucaaccuggugcgggaccugccccagggauucagcgcccuggagccucugguggaccugcccaucggcaucaacaucaccagguuccagacccugcuggcccugcaccggagcuaccugacccccggcgacagcagcagcggcuggaccgccggcgccgccgcauacuacgugggcuaccugcagccacggaccuuccugcugaaguacaacgagaacggcaccaucaccgacgccguggacugcgcccuggacccccugagcgagaccaagugcacccuaaagagcuucaccguggagaagggcaucuaccagaccagcaacuuccgggugcagcccacugagagcaucgugcgguuccccaacauuaccaaccugugucccuucggcgagguguucaacgccacccgguucgccagcguguacgccuggaaccggaagcggaucagcaacugcguggccgacuacagcgugcuguacaacagcgccagcuucagcaccuucaagugcuacggcgugagcccuaccaagcugaacgaccugugcuucaccaacguguacgcugacagcuucgugauccggggcgacgaggugcggcagaucgcccccggccagaccggcaagaucgccgacuacaacuacaagcugcccgacgacuucaccggcugcgugaucgccuggaacagcaacaaccuggacagcaaggugggcggcaacuacaacuaccuguaccggcuguuccguaagagcaaccugaagccauucgagcgggacaucagcaccgagaucuaccaggccggcaacacccccugcaacgguguggagggcuuuaacugcuacuucccccugcagagcuacggcuuccagcccaccaacggcgugggcuaccagcccuaccgggugguggugcugagcuucgagcugcugcacgcccccgccaccgugugcggcccuaaaaagagcaccaaccuggugaagaacaagugcgugaauuucaacuucaacggccugaccggcaccggcgugcugaccgagagcaacaagaaguuccugcccuuccagcaguucggccgggauaucgccgacaccaccgacgcagugcgggacccccagacccuggagauccuggacaucaccccaugcagcuucggcggcgugagcgucaucacccccggcacaaacaccagcaaccagguggccgugcuguaccagggagugaacugcaccgaggugcccguggccauccacgccgaccagcugacccccaccuggcggguguacagcaccggcagcaacguguuccagacccgggccggcugccugaucggcgccgagcacgugaacaacagcuacgagugcgacauccccaucggcgcuggcaucugcgccuccuaccagacccagaccaacagcccccggcgggcccggagcguggccagccagagcaucaucgccuacaccaugagcuuaggcgccgagaacagcguggccuacagcaacaacagcaucgcgaucccuaccaacuucaccaucagcgugaccaccgagauacugcccgugagcaugaccaagaccagcguggacuguaccauguacaucugcggcgacagcaccgagugcagcaaccugcugcugcaguacggcagcuucugcacccagcugaaccgggcccugaccggcaucgccguggagcaggacaagaacacccaagagguguucgcccaggugaagcagaucuacaagacucccccaaucaaggacuucggcggcuucaacuucagccagauccugcccgaccccagcaagcccagcaagcggagcuucaucgaggaccugcuguucaacaaggugacccuggccgacgccggcuucaucaagcaguacggcgacugccugggggauaucgccgcucgggaccugaucugcgcccagaaguucaacggccugaccgugcugcccccucugcugaccgacgagaugaucgcccaguacaccagcgcccugcuugccggcaccaucaccagcggcuggaccuucggcgccggcgcagcccugcagauccccuucgccaugcagauggccuaccgguucaacggcaucggcgugacccagaacgugcuguacgagaaccagaagcugaucgccaaccaguucaacagcgccaucggcaagauccaggacagccugagcagcaccgccagcgcccugggcaagcugcaggacguggugaaccagaacgcucaggcccugaacacccuggugaagcagcugagcagcaauuucggcgccaucagcagcgugcugaacgacauccugucaaggcuggaucccccagaggccgaggugcagaucgaccggcugaucaccggccggcugcagagccugcagaccuacgugacccagcagcugauccgggccgccgagauccgggccagcgccaaccuggcagccaccaagaugagcgagugcgugcugggccagagcaagcggguggacuuuugcggcaagggcuaccaccugaugagcuucccccagagcgcuccccacggcgugguguuccuccacgugacauacguccccgcccaggagaagaacuucaccaccgcccccgccauuugccacgacggcaaggcccacuucccccgggagggaguguucgugagcaacggcacccacugguucgugacccagcggaacuucuacgagccucagaucaucaccaccgacaacaccuucgugagcggcaacugcgacguggugaucggcaucgugaacaacaccguguacgacccccugcagcccgagcuggacagcuucaaggaggagcuggacaaguacuucaagaaccacaccagcccagacguggaccugggcgacaucagcggcaucaacgccagcguggugaacauccagaaggagaucgaccggcugaacgagguggccaagaaccugaacgagagccugaucgaccugcaggagcugggcaaguacgagcaguacaucaaguggcccugguacaucuggcugggcuucaucgccggccugaucgccaucgugauggugaccaucaugcugugcugcaugaccagcugcuguagcugccugaagggcugcugcagcugcggcagcugcugcaaguucgacgaggacgacagcgagcccgugcugaagggcgugaagcugcacuacaccugaggacuaguuauaagacugacuagcccgaugggccucccaacgggcccuccuccccuccuugcaccgagagaucuaaaaaaaaaaaaaaaaaaaaaaaaaaaaaaaaaaaaaaaaaaaaaaaaaaaaaaaaaaaaaaaaaaaaaaaaaaaaaaaaaaaaaaaaaaaaaaaaaaaa

SEQ ID NO: 25996 - RNA, 4011 nt, Artificial Sequence
  SARS-CoV-2/Wuhan/WIV05/2019__EPI_ISL_402128 spike protein mRNA gc (1-1273)(K986P_V987P_N501Y_D614G)
aggagaaagcuuaccauguucguguuccuggugcugcugccccuggugagcagccagugcgugaaccugaccacccggacccagcugcccccugccuacaccaacagcuucacccggggcguguacuaccccgacaagguguuccggagcagcgugcugcacagcacccaggaccuguuccugcccuucuucagcaacgugaccugguuccacgccauccacgugagcggcaccaacggcaccaagcgguucgacaacccagugcugcccuucaacgacggcguguacuucgccagcaccgagaagucaaacaucauccggggcuggaucuucggcaccacccuggacagcaagacacagagccugcugaucgugaacaacgccaccaacguggugaucaaggugugcgaguuucaguucugcaacgaccccuuccugggcguguacuaccacaagaacaacaagagcuggauggagagcgaguuccgggucuacagcagcgcuaacaauugcaccuucgaguacgugagccagcccuuccugauggaccucgagggcaagcagggcaacuucaagaaccugcgggaguucguguucaagaacaucgauggcuacuucaagaucuacagcaagcacacccccaucaaccuggugcgggaccugccccagggauucagcgcccuggagccucugguggaccugcccaucggcaucaacaucaccagguuccagacccugcuggcccugcaccggagcuaccugacccccggcgacagcagcagcggcuggaccgccggcgccgccgcauacuacgugggcuaccugcagccacggaccuuccugcugaaguacaacgagaacggcaccaucaccgacgccguggacugcgcccuggacccccugagcgagaccaagugcacccuaaagagcuucaccguggagaagggcaucuaccagaccagcaacuuccgggugcagcccacugagagcaucgugcgguuccccaacauuaccaaccugugucccuucggcgagguguucaacgccacccgguucgccagcguguacgccuggaaccggaagcggaucagcaacugcguggccgacuacagcgugcuguacaacagcgccagcuucagcaccuucaagugcuacggcgugagcccuaccaagcugaacgaccugugcuucaccaacguguacgcugacagcuucgugauccggggcgacgaggugcggcagaucgcccccggccagaccggcaagaucgccgacuacaacuacaagcugcccgacgacuucaccggcugcgugaucgccuggaacagcaacaaccuggacagcaaggugggcggcaacuacaacuaccuguaccggcuguuccguaagagcaaccugaagccauucgagcgggacaucagcaccgagaucuaccaggccggcagcacccccugcaacgguguggagggcuuuaacugcuacuucccccugcagagcuacggcuuccagcccaccuacggcgugggcuaccagcccuaccgggugguggugcugagcuucgagcugcugcacgcccccgccaccgugugcggcccuaaaaagagcaccaaccuggugaagaacaagugcgugaacuucaacuucaauggccugaccggcaccggcgugcugaccgagagcaacaagaaguuccugcccuuccagcaguucggccgggauaucgccgacaccaccgacgcagugcgggacccccagacccuggagauccuggacaucaccccaugcagcuucggcggcgugagcgucaucacccccggcacaaacaccagcaaccagguggccgugcuguaccagggagugaacugcaccgaggugcccguggccauccacgccgaccagcugacccccaccuggcggguguacagcaccggcagcaacguguuccagacccgggccggcugccugaucggcgccgagcacgugaacaacuccuacgagugcgacauccccaucggcgcuggcaucugcgccagcuaccagacccagaccaacagcccccggcgggcccggagcguggccagccagagcaucaucgccuacaccaugagcuuaggcgccgagaacagcguggccuacagcaacaacagcaucgcgaucccuaccaacuucaccaucagcgugaccaccgagauacugcccgugagcaugaccaagaccagcguggacuguaccauguacaucugcggcgacagcaccgagugcagcaaccugcugcugcaguacggcagcuucugcacccagcugaaccgggcccugaccggcaucgccguggagcaggacaagaacacccaagagguguucgcccaggugaagcagaucuacaagacucccccaaucaaggacuucggcggcuucaacuucagccagauccugcccgaccccagcaagcccagcaagcggagcuucaucgaggaccugcuguucaacaaggugacccuggccgacgccggcuucaucaagcaguacggcgacugccugggggauaucgccgcucgggaccugaucugcgcccagaaguucaacggccugaccgugcugcccccucugcugaccgacgagaugaucgcccaguacaccagcgcccugcuugccggcaccaucaccagcggcuggaccuucggcgccggcgcagcccugcagauccccuucgccaugcagauggccuaccgguucaacggcaucggcgugacccagaacgugcuguacgagaaccagaagcugaucgccaaccaguucaacagcgccaucggcaagauccaggacagccugagcagcaccgccagcgcccugggcaagcugcaggacguggugaaccagaacgcucaggcccugaacacccuggugaagcagcugagcagcaacuucggcgccaucagcucagugcugaacgacauccugagcaggcuggaucccccagaggccgaggugcagaucgaccggcugaucaccggccggcugcagagccugcagaccuacgugacccagcagcugauccgggccgccgagauccgggccagcgccaaucuggcagccaccaagaugagcgagugcgugcugggccagagcaagcggguggacuuuugcggcaagggcuaccaccugaugagcuucccccagagcgcuccccacggcgugguguuccuccacgugacauacguccccgcccaggagaagaacuucaccaccgcccccgccauuugccacgacggcaaggcccacuucccccgggagggaguguucgugagcaacggcacccacugguucgugacccagcggaacuucuacgagccucagaucaucaccaccgacaacaccuucgugagcggcaacugcgacguggugaucggcaucgugaacaacaccguguacgacccccugcagcccgagcuggacagcuucaaggaggagcuggacaaguacuucaagaaccacaccagcccagacguggaccugggcgacaucagcggcaucaacgccagcguggugaacauccagaaggagaucgaccggcugaacgagguggccaagaaccugaacgagagccugaucgaccugcaggagcugggcaaguacgagcaguacaucaaguggcccugguacaucuggcugggcuucaucgccggccugaucgccaucgugauggugaccaucaugcugugcugcaugaccagcugcuguagcugccugaagggcugcugcagcugcggcagcugcugcaaguucgacgaggacgacagcgagcccgugcugaagggcgugaagcugcacuacaccugaggacuaguuauaagacugacuagcccgaugggccucccaacgggcccuccuccccuccuugcaccgagagaucuaaaaaaaaaaaaaaaaaaaaaaaaaaaaaaaaaaaaaaaaaaaaaaaaaaaaaaaaaaaaaaaaaaaaaaaaaaaaaaaaaaaaaaaaaaaaaaaaaaaa

SEQ ID NO: 25997 - RNA, 4005 nt, Artificial Sequence
  SARS-CoV-2/Wuhan/WIV05/2019__EPI_ISL_402128 spike protein mRNA gc (1-1273)(K986P_V987P_H69del_V70del_D614G)
aggagaaagcuuaccauguucguguuccuggugcugcugccccuggugagcagccagugcgugaaccugaccacccggacccagcugcccccugccuacaccaacagcuucacccggggcguguacuaccccgacaagguguuccggagcagcgugcugcacagcacccaggaccuguuccugcccuucuucagcaacgugaccugguuccacgccaucagcggcaccaacggcaccaagcgguucgacaacccagugcugcccuucaacgacggcguguacuucgccagcaccgagaagucaaacaucauccggggcuggaucuucggcaccacccuggacagcaagacacagagccugcugaucgugaacaacgccaccaacguggugaucaaggugugcgaguuucaguucugcaacgaccccuuccugggcguguacuaccacaagaacaacaagagcuggauggagagcgaguuccggguguacagcagcgcuaacaauugcaccuucgaguacgucagccagcccuuccugauggaccucgagggcaagcagggcaacuucaagaaccugcgggaguucguguucaagaacaucgauggcuacuucaagaucuacagcaagcacacccccaucaaccuggugcgggaccugccccagggauucagcgcccuggagccucugguggaccugcccaucggcaucaacaucaccagguuccagacccugcuggcccugcaccggagcuaccugacccccggcgacagcagcagcggcuggaccgccggcgccgccgcauacuacgugggcuaccugcagccacggaccuuccugcugaaguacaacgagaacggcaccaucaccgacgccguggacugcgcccuggacccccugagcgagaccaagugcacccuaaagagcuucaccguggagaagggcaucuaccagaccagcaacuuccgggugcagcccacugagagcaucgugcgguuccccaacauuaccaaccugugucccuucggcgagguguucaacgccacccgguucgccagcguguacgccuggaaccggaagcggaucagcaacugcguggccgacuacagcgugcuguacaacagcgccagcuucagcaccuucaagugcuacggcgugagcccuaccaagcugaacgaccugugcuucaccaacguguacgcugacagcuucgugauccggggcgacgaggugcggcagaucgcccccggccagaccggcaagaucgccgacuacaacuacaagcugcccgacgacuucaccggcugcgugaucgccuggaacagcaacaaccuggacagcaaggugggcggcaacuacaacuaccuguaccggcuguuccguaagagcaaccugaagccauucgagcgggacaucagcaccgagaucuaccaggccggcagcacccccugcaacgguguggagggcuuuaacugcuacuucccccugcagagcuacggcuuccagcccaccaacggcgugggcuaccagcccuaccgggugguggugcugagcuucgagcugcugcacgcccccgccaccgugugcggcccuaaaaagagcaccaaccuggugaagaacaagugcgugaacuucaauuucaacggccugaccggcaccggcgugcugaccgagagcaacaagaaguuccugcccuuccagcaguucggccgggauaucgccgacaccaccgacgcagugcgggacccccagacccuggagauccuggacaucaccccaugcagcuucggcggcgugagcgugaucacccccggcacaaacaccagcaaccaggucgccgugcuguaccagggagugaacugcaccgaggugcccguggccauccacgccgaccagcugacccccaccuggcggguguacagcaccggcagcaacguguuccagacccgggccggcugccugaucggcgccgagcacgugaacaacuccuacgagugcgacauccccaucggcgcuggcaucugcgccagcuaccagacccagaccaacagcccccggcgggcccggagcguggccagccagagcaucaucgccuacaccaugagcuuaggcgccgagaacagcguggccuacagcaacaacagcaucgcgaucccuaccaacuucaccaucagcgugaccaccgagauacugcccgugagcaugaccaagaccagcguggacuguaccauguacaucugcggcgacagcaccgagugcagcaaccugcugcugcaguacggcagcuucugcacccagcugaaccgggcccugaccggcaucgccguggagcaggacaagaacacccaagagguguucgcccaggugaagcagaucuacaagacucccccaaucaaggacuucggcggcuucaacuucagccagauccugcccgaccccagcaagcccagcaagcggagcuucaucgaggaccugcuguucaacaaggugacccuggccgacgccggcuucaucaagcaguacggcgacugccugggggauaucgccgcucgggaccugaucugcgcccagaaguucaacggccugaccgugcugcccccucugcugaccgacgagaugaucgcccaguacaccagcgcccugcuugccggcaccaucaccagcggcuggaccuucggcgccggcgcagcccugcagauccccuucgccaugcagauggccuaccgguucaacggcaucggcgugacccagaacgugcuguacgagaaccagaagcugaucgccaaccaguucaacagcgccaucggcaagauccaggacagccugagcagcaccgccagcgcccugggcaagcugcaggacguggugaaccagaacgcucaggcccugaacacccuggugaagcagcugagcagcaacuucggcgccaucagcucagugcugaaugacauccugagcaggcuggaucccccagaggccgaggugcagaucgaccggcugaucaccggccggcugcagagccugcagaccuacgugacccagcagcugauccgggccgccgagauccgggccagcgccaaccuggcagccaccaagaugagcgagugcgugcugggccagagcaagcggguggacuuuugcggcaagggcuaccaccugaugagcuucccccagagcgcuccccacggcgugguguuccuccacgugacauacgugcccgcccaggagaagaacuucaccaccgcccccgccauuugccacgacggcaaggcccacuucccccgggagggagucuucgugagcaacggcacccacugguucgugacccagcggaacuucuacgagccucagaucaucaccaccgacaacaccuucgugagcggcaacugcgacguggugaucggcaucgugaacaacaccguguacgacccccugcagcccgagcuggacagcuucaaggaggagcuggacaaguacuucaagaaccacaccagcccagacguggaccugggcgacaucagcggcaucaacgccagcguggugaacauccagaaggagaucgaccggcugaacgagguggccaagaaccugaacgagagccugaucgaccugcaggagcugggcaaguacgagcaguacaucaaguggcccugguacaucuggcugggcuucaucgccggccugaucgccaucgugauggugaccaucaugcugugcugcaugaccagcugcuguagcugccugaagggcugcugcagcugcggcagcugcugcaaguucgacgaggacgacagcgagcccgugcugaagggcgugaagcugcacuacaccugaggacuaguuauaagacugacuagcccgaugggccucccaacgggcccuccuccccuccuugcaccgagagaucuaaaaaaaaaaaaaaaaaaaaaaaaaaaaaaaaaaaaaaaaaaaaaaaaaaaaaaaaaaaaaaaaaaaaaaaaaaaaaaaaaaaaaaaaaaaaaaaaaaaa

SEQ ID NO: 25998 - RNA, 4011 nt, Artificial Sequence
  SARS-CoV-2/Wuhan/WIV05/2019__EPI_ISL_402128 spike protein mRNA gc (1-1273)(K986P_V987P_Y453F_D614G)
aggagaaagcuuaccauguucguguuccuggugcugcugccccuggugagcagccagugcgugaaccugaccacccggacccagcugcccccugccuacaccaacagcuucacccggggcguguacuaccccgacaagguguuccggagcagcgugcugcacagcacccaggaccuguuccugcccuucuucagcaacgugaccugguuccacgccauccacgugagcggcaccaacggcaccaagcgguucgacaacccagugcugcccuucaacgacggcguguacuucgccagcaccgagaagucaaacaucauccggggcuggaucuucggcaccacccuggacagcaagacacagagccugcugaucgugaacaacgccaccaacguggugaucaaggugugcgaguuucaguucugcaacgaccccuuccugggcguguacuaccacaagaacaacaagagcuggauggagagcgaguuccgggucuacagcagcgcuaacaauugcaccuucgaguacgugagccagcccuuccugauggaccucgagggcaagcagggcaacuucaagaaccugcgggaguucguguucaagaacaucgauggcuacuucaagaucuacagcaagcacacccccaucaaccuggugcgggaccugccccagggauucagcgcccuggagccucugguggaccugcccaucggcaucaacaucaccagguuccagacccugcuggcccugcaccggagcuaccugacccccggcgacagcagcagcggcuggaccgccggcgccgccgcauacuacgugggcuaccugcagccacggaccuuccugcugaaguacaacgagaacggcaccaucaccgacgccguggacugcgcccuggacccccugagcgagaccaagugcacccuaaagagcuucaccguggagaagggcaucuaccagaccagcaacuuccgggugcagcccacugagagcaucgugcgguuccccaacauuaccaaccugugucccuucggcgagguguucaacgccacccgguucgccagcguguacgccuggaaccggaagcggaucagcaacugcguggccgacuacagcgugcuguacaacagcgccagcuucagcaccuucaagugcuacggcgugagcccuaccaagcugaacgaccugugcuucaccaacguguacgcugacagcuucgugauccggggcgacgaggugcggcagaucgcccccggccagaccggcaagaucgccgacuacaacuacaagcugcccgacgacuucaccggcugcgugaucgccuggaacagcaacaaccuggacagcaaggugggcggcaacuacaacuaccuguuccggcuguuccguaagagcaaccugaagccauuugagcgggacaucagcaccgagaucuaccaggccggcagcacccccugcaacgguguggagggcuucaacugcuacuucccccugcagagcuacggcuuccagcccaccaacggcgugggcuaccagcccuaccgggugguggugcugagcuucgagcugcugcacgcccccgccaccgugugcggcccuaaaaagagcaccaaccuggugaagaacaagugcgugaacuucaauuucaacggccugaccggcaccggcgugcugaccgagagcaacaagaaguuccugcccuuccagcaguucggccgggauaucgccgacaccaccgacgcagugcgggacccccagacccuggagauccuggacaucaccccaugcagcuucggcggcgugagcgucaucacccccggcacaaacaccagcaaccagguggccgugcuguaccagggagugaacugcaccgaggugcccguggccauccacgccgaccagcugacccccaccuggcggguguacagcaccggcagcaacguguuccagacccgggccggcugccugaucggcgccgagcacgugaacaacuccuacgagugcgacauccccaucggcgcuggcaucugcgccagcuaccagacccagaccaacagcccccggcgggcccggagcguggccagccagagcaucaucgccuacaccaugagcuuaggcgccgagaacagcguggccuacagcaacaacagcaucgcgaucccuaccaacuucaccaucagcgugaccaccgagauacugcccgugagcaugaccaagaccagcguggacuguaccauguacaucugcggcgacagcaccgagugcagcaaccugcugcugcaguacggcagcuucugcacccagcugaaccgggcccugaccggcaucgccguggagcaggacaagaacacccaagagguguucgcccaggugaagcagaucuacaagacucccccaaucaaggacuucggcggcuucaacuucagccagauccugcccgaccccagcaagcccagcaagcggagcuucaucgaggaccugcuguucaacaaggugacccuggccgacgccggcuucaucaagcaguacggcgacugccugggggauaucgccgcucgggaccugaucugcgcccagaaguucaacggccugaccgugcugcccccucugcugaccgacgagaugaucgcccaguacaccagcgcccugcuugccggcaccaucaccagcggcuggaccuucggcgccggcgcagcccugcagauccccuucgccaugcagauggccuaccgguucaacggcaucggcgugacccagaacgugcuguacgagaaccagaagcugaucgccaaccaguucaacagcgccaucggcaagauccaggacagccugagcagcaccgccagcgcccugggcaagcugcaggacguggugaaccagaacgcucaggcccugaacacccuggugaagcagcugagcagcaacuuuggcgccaucagcucagugcugaaugacauccugagcaggcuggaucccccagaggccgaggugcagaucgaccggcugaucaccggccggcugcagagccugcagaccuacgugacccagcagcugauccgggccgccgagauccgggccagcgccaaccuggcagccaccaagaugagcgagugcgugcugggccagagcaagcggguggacuucugcggcaagggcuaccaccugaugagcuucccccagagcgcuccccacggcgugguguuccuccacgugacauacguccccgcccaggagaagaacuucaccaccgcccccgccauuugccacgacggcaaggcccacuucccccgggagggaguguucgugagcaacggcacccacugguucgugacccagcggaacuucuacgagccucagaucaucaccaccgacaacaccuucgugagcggcaacugcgacguggugaucggcaucgugaacaacaccguguacgacccccugcagcccgagcuggacagcuucaaggaggagcuggacaaguacuucaagaaccacaccagcccagacguggaccugggcgacaucagcggcaucaacgccagcguggugaacauccagaaggagaucgaccggcugaacgagguggccaagaaccugaacgagagccugaucgaccugcaggagcugggcaaguacgagcaguacaucaaguggcccugguacaucuggcugggcuucaucgccggccugaucgccaucgugauggugaccaucaugcugugcugcaugaccagcugcuguagcugccugaagggcugcugcagcugcggcagcugcugcaaguucgacgaggacgacagcgagcccgugcugaagggcgugaagcugcacuacaccugaggacuaguuauaagacugacuagcccgaugggccucccaacgggcccuccuccccuccuugcaccgagagaucuaaaaaaaaaaaaaaaaaaaaaaaaaaaaaaaaaaaaaaaaaaaaaaaaaaaaaaaaaaaaaaaaaaaaaaaaaaaaaaaaaaaaaaaaaaaaaaaaaaaa

SEQ ID NO: 25999 - RNA, 4011 nt, Artificial Sequence
  SARS-CoV-2/Wuhan/WIV05/2019__EPI_ISL_402128 spike protein mRNA gc (1-1273)(K986P_V987P_D614G_I692V)
aggagaaagcuuaccauguucguguuccuggugcugcugccccuggugagcagccagugcgugaaccugaccacccggacccagcugcccccugccuacaccaacagcuucacccggggcguguacuaccccgacaagguguuccggagcagcgugcugcacagcacccaggaccuguuccugcccuucuucagcaacgugaccugguuccacgccauccacgugagcggcaccaacggcaccaagcgguucgacaacccagugcugcccuucaacgacggcguguacuucgccagcaccgagaagucaaacaucauccggggcuggaucuucggcaccacccuggacagcaagacacagagccugcugaucgugaacaacgccaccaacguggugaucaaggugugcgaguuucaguucugcaacgaccccuuccugggcguguacuaccacaagaacaacaagagcuggauggagagcgaguuccgggucuacagcagcgcuaacaauugcaccuucgaguacgugagccagcccuuccugauggaccucgagggcaagcagggcaacuucaagaaccugcgggaguucguguucaagaacaucgauggcuacuucaagaucuacagcaagcacacccccaucaaccuggugcgggaccugccccagggauucagcgcccuggagccucugguggaccugcccaucggcaucaacaucaccagguuccagacccugcuggcccugcaccggagcuaccugacccccggcgacagcagcagcggcuggaccgccggcgccgccgcauacuacgugggcuaccugcagccacggaccuuccugcugaaguacaacgagaacggcaccaucaccgacgccguggacugcgcccuggacccccugagcgagaccaagugcacccuaaagagcuucaccguggagaagggcaucuaccagaccagcaacuuccgggugcagcccacugagagcaucgugcgguuccccaacauuaccaaccugugucccuucggcgagguguucaacgccacccgguucgccagcguguacgccuggaaccggaagcggaucagcaacugcguggccgacuacagcgugcuguacaacagcgccagcuucagcaccuucaagugcuacggcgugagcccuaccaagcugaacgaccugugcuucaccaacguguacgcugacagcuucgugauccggggcgacgaggugcggcagaucgcccccggccagaccggcaagaucgccgacuacaacuacaagcugcccgacgacuucaccggcugcgugaucgccuggaacagcaacaaccuggacagcaaggugggcggcaacuacaacuaccuguaccggcuguuccguaagagcaaccugaagccauucgagcgggacaucagcaccgagaucuaccaggccggcagcacccccugcaacgguguggagggcuuuaacugcuacuucccccugcagagcuacggcuuccagcccaccaacggcgugggcuaccagcccuaccgggugguggugcugagcuucgagcugcugcacgcccccgccaccgugugcggcccuaaaaagagcaccaaccuggugaagaacaagugcgugaacuucaauuucaacggccugaccggcaccggcgugcugaccgagagcaacaagaaguuccugcccuuccagcaguucggccgggauaucgccgacaccaccgacgcagugcgggacccccagacccuggagauccuggacaucaccccaugcagcuucggcggcgugagcgucaucacccccggcacaaacaccagcaaccagguggccgugcuguaccagggagugaacugcaccgaggugcccguggccauccacgccgaccagcugacccccaccuggcggguguacagcaccggcagcaacguguuccagacccgggccggcugccugaucggcgccgagcacgugaacaacuccuacgagugcgacauccccaucggcgcuggcaucugcgccagcuaccagacccagaccaacagcccccggcgggcccggagcguggccagccagagcgugaucgccuacaccaugagcuuaggcgccgagaacagcguggccuacagcaacaacagcaucgcgaucccuaccaacuucaccaucagcgugaccaccgagauccugcccgugagcaugaccaagaccagcguggacuguaccauguacauaugcggcgacagcaccgagugcagcaaccugcugcugcaguacggcagcuucugcacccagcugaaccgggcccugaccggcaucgccguggagcaggacaagaacacccaagagguguucgcccaggugaagcagaucuacaagacucccccaaucaaggacuucggcggcuucaacuucagccagauccugcccgaccccagcaagcccagcaagcggagcuucaucgaggaccugcuguucaacaaggugacccuggccgacgccggcuucaucaagcaguacggcgacugccugggggauaucgccgcucgggaccugaucugcgcccagaaguucaacggccugaccgugcugcccccucugcugaccgacgagaugaucgcccaguacaccagcgcccugcuugccggcaccaucaccagcggcuggaccuucggcgccggcgcagcccugcagauccccuucgccaugcagauggccuaccgguucaacggcaucggcgugacccagaacgugcuguacgagaaccagaagcugaucgccaaccaguucaacagcgccaucggcaagauccaggacagccugagcagcaccgccagcgcccugggcaagcugcaggacguggugaaccagaacgcucaggcccugaacacccuggugaagcagcugagcagcaacuucggcgccaucagcucagugcugaaugacauccugagcaggcuggaucccccagaggccgaggugcagaucgaccggcugaucaccggccggcugcagagccugcagaccuacgugacccagcagcugauccgggccgccgagauccgggccagcgccaaccuggcagccaccaagaugagcgagugcgugcugggccagagcaagcggguggacuuuugcggcaagggcuaccaccugaugagcuucccccagagcgcuccccacggcgugguguuccuccacgucacauacgugcccgcccaggagaagaacuucaccaccgcccccgccaucugccacgacggcaaggcccacuucccccgggagggaguguucgugagcaacggcacccacugguucgugacccagcggaacuucuacgagccucagauuaucaccaccgacaacaccuucgugagcggcaacugcgacguggugaucggcaucgugaacaacaccguguacgacccccugcagcccgagcuggacagcuucaaggaggagcuggacaaguacuucaagaaccacaccagcccagacguggaccugggcgacaucagcggcaucaacgccagcguggugaacauccagaaggagaucgaccggcugaacgagguggccaagaaccugaacgagagccugaucgaccugcaggagcugggcaaguacgagcaguacaucaaguggcccugguacaucuggcugggcuucaucgccggccugaucgccaucgugauggugaccaucaugcugugcugcaugaccagcugcuguagcugccugaagggcugcugcagcugcggcagcugcugcaaguucgacgaggacgacagcgagcccgugcugaagggcgugaagcugcacuacaccugaggacuaguuauaagacugacuagcccgaugggccucccaacgggcccuccuccccuccuugcaccgagagaucuaaaaaaaaaaaaaaaaaaaaaaaaaaaaaaaaaaaaaaaaaaaaaaaaaaaaaaaaaaaaaaaaaaaaaaaaaaaaaaaaaaaaaaaaaaaaaaaaaaaa

SEQ ID NO: 26000 - RNA, 4011 nt, Artificial Sequence
  SARS-CoV-2/Wuhan/WIV05/2019__EPI_ISL_402128 spike protein mRNA gc (1-1273)(K986P_V987P_D614G_M1229I)
aggagaaagcuuaccauguucguguuccuggugcugcugccccuggugagcagccagugcgugaaccugaccacccggacccagcugcccccugccuacaccaacagcuucacccggggcguguacuaccccgacaagguguuccggagcagcgugcugcacagcacccaggaccuguuccugcccuucuucagcaacgugaccugguuccacgccauccacgugagcggcaccaacggcaccaagcgguucgacaacccagugcugcccuucaacgacggcguguacuucgccagcaccgagaagucaaacaucauccggggcuggaucuucggcaccacccuggacagcaagacacagagccugcugaucgugaacaacgccaccaacguggugaucaaggugugcgaguuucaguucugcaacgaccccuuccugggcguguacuaccacaagaacaacaagagcuggauggagagcgaguuccgggucuacagcagcgcuaacaauugcaccuucgaguacgugagccagcccuuccugauggaccucgagggcaagcagggcaacuucaagaaccugcgggaguucguguucaagaacaucgauggcuacuucaagaucuacagcaagcacacccccaucaaccuggugcgggaccugccccagggauucagcgcccuggagccucugguggaccugcccaucggcaucaacaucaccagguuccagacccugcuggcccugcaccggagcuaccugacccccggcgacagcagcagcggcuggaccgccggcgccgccgcauacuacgugggcuaccugcagccacggaccuuccugcugaaguacaacgagaacggcaccaucaccgacgccguggacugcgcccuggacccccugagcgagaccaagugcacccuaaagagcuucaccguggagaagggcaucuaccagaccagcaacuuccgggugcagcccacugagagcaucgugcgguuccccaacauuaccaaccugugucccuucggcgagguguucaacgccacccgguucgccagcguguacgccuggaaccggaagcggaucagcaacugcguggccgacuacagcgugcuguacaacagcgccagcuucagcaccuucaagugcuacggcgugagcccuaccaagcugaacgaccugugcuucaccaacguguacgcugacagcuucgugauccggggcgacgaggugcggcagaucgcccccggccagaccggcaagaucgccgacuacaacuacaagcugcccgacgacuucaccggcugcgugaucgccuggaacagcaacaaccuggacagcaaggugggcggcaacuacaacuaccuguaccggcuguuccguaagagcaaccugaagccauucgagcgggacaucagcaccgagaucuaccaggccggcagcacccccugcaacgguguggagggcuuuaacugcuacuucccccugcagagcuacggcuuccagcccaccaacggcgugggcuaccagcccuaccgggugguggugcugagcuucgagcugcugcacgcccccgccaccgugugcggcccuaaaaagagcaccaaccuggugaagaacaagugcgugaacuucaauuucaacggccugaccggcaccggcgugcugaccgagagcaacaagaaguuccugcccuuccagcaguucggccgggauaucgccgacaccaccgacgcagugcgggacccccagacccuggagauccuggacaucaccccaugcagcuucggcggcgugagcgucaucacccccggcacaaacaccagcaaccagguggccgugcuguaccagggagugaacugcaccgaggugcccguggccauccacgccgaccagcugacccccaccuggcggguguacagcaccggcagcaacguguuccagacccgggccggcugccugaucggcgccgagcacgugaacaacuccuacgagugcgacauccccaucggcgcuggcaucugcgccagcuaccagacccagaccaacagcccccggcgggcccggagcguggccagccagagcaucaucgccuacaccaugagcuuaggcgccgagaacagcguggccuacagcaacaacagcaucgcgaucccuaccaacuucaccaucagcgugaccaccgagauacugcccgugagcaugaccaagaccagcguggacuguaccauguacaucugcggcgacagcaccgagugcagcaaccugcugcugcaguacggcagcuucugcacccagcugaaccgggcccugaccggcaucgccguggagcaggacaagaacacccaagagguguucgcccaggugaagcagaucuacaagacucccccaaucaaggacuucggcggcuucaacuucagccagauccugcccgaccccagcaagcccagcaagcggagcuucaucgaggaccugcuguucaacaaggugacccuggccgacgccggcuucaucaagcaguacggcgacugccugggggauaucgccgcucgggaccugaucugcgcccagaaguucaacggccugaccgugcugcccccucugcugaccgacgagaugaucgcccaguacaccagcgcccugcuugccggcaccaucaccagcggcuggaccuucggcgccggcgcagcccugcagauccccuucgccaugcagauggccuaccgguucaacggcaucggcgugacccagaacgugcuguacgagaaccagaagcugaucgccaaccaguucaacagcgccaucggcaagauccaggacagccugagcagcaccgccagcgcccugggcaagcugcaggacguggugaaccagaacgcucaggcccugaacacccuggugaagcagcugagcagcaacuucggcgccaucagcucagugcugaaugacauccugagcaggcuggaucccccagaggccgaggugcagaucgaccggcugaucaccggccggcugcagagccugcagaccuacgugacccagcagcugauccgggccgccgagauccgggccagcgccaaccuggcagccaccaagaugagcgagugcgugcugggccagagcaagcggguggacuuuugcggcaagggcuaccaccugaugagcuucccccagagcgcuccccacggcgugguguuccuccacgugacauacguccccgcccaggagaagaacuucaccaccgcccccgccauuugccacgacggcaaggcccacuucccccgggagggaguguucgugagcaacggcacccacugguucgugacccagcggaacuucuacgagccucagaucaucaccaccgacaacaccuucgugagcggcaacugcgacguggugaucggcaucgugaacaacaccguguacgacccccugcagcccgagcuggacagcuucaaggaggagcuggacaaguacuucaagaaccacaccagcccagacguggaccugggcgacaucagcggcaucaacgccagcguggugaacauccagaaggagaucgaccggcugaacgagguggccaagaaccugaacgagagccugaucgaccugcaggagcugggcaaguacgagcaguacaucaaguggcccugguacaucuggcugggcuucaucgccggccugaucgccaucgugaucgugaccaucaugcugugcugcaugaccagcugcuguagcugccugaagggcugcugcagcugcggcagcugcugcaaguucgacgaggacgacagcgagcccgugcugaagggcgugaagcugcacuacaccugaggacuaguuauaagacugacuagcccgaugggccucccaacgggcccuccuccccuccuugcaccgagagaucuaaaaaaaaaaaaaaaaaaaaaaaaaaaaaaaaaaaaaaaaaaaaaaaaaaaaaaaaaaaaaaaaaaaaaaaaaaaaaaaaaaaaaaaaaaaaaaaaaaaa

SEQ ID NO: 26001 - RNA, 4005 nt, Artificial Sequence
  SARS-CoV-2/Wuhan/WIV05/2019__EPI_ISL_402128 spike protein mRNA gc (1-1273)(K986P_V987P_H69del_V70del_A222V_Y453F_S477N_D614G_I692V)
aggagaaagcuuaccauguucguguuccuggugcugcugccccuggugagcagccagugcgugaaccugaccacccggacccagcugcccccugccuacaccaacagcuucacccggggcguguacuaccccgacaagguguuccggagcagcgugcugcacagcacccaggaccuguuccugcccuucuucagcaacgugaccugguuccacgccaucagcggcaccaacggcaccaagcgguucgacaacccagugcugcccuucaacgacggcguguacuucgccagcaccgagaagucaaacaucauccggggcuggaucuucggcaccacccuggacagcaagacacagagccugcugaucgugaacaacgccaccaacguggugaucaaggugugcgaguuucaguucugcaacgaccccuuccugggcguguacuaccacaagaacaacaagagcuggauggagagcgaguuccggguguacagcagcgcuaacaauugcaccuucgaguacgucagccagcccuuccugauggaccucgagggcaagcagggcaacuucaagaaccugcgggaguucguguucaagaacaucgauggcuacuucaagaucuacagcaagcacacccccaucaaccuggugcgggaccugccccagggauucagcgugcuggagccucugguggaccugcccaucggcaucaacaucaccagguuccagacccugcuggcccugcaccggagcuaccugacccccggcgacagcagcagcggcuggaccgccggcgccgccgccuacuacgugggcuaccugcagccacggaccuuccugcugaaguacaacgagaacggcaccaucaccgacgcaguggacugcgcccuggacccccugagcgagaccaagugcacccuaaagagcuucaccguggagaagggcaucuaccagaccagcaacuuccgggugcagcccacugagagcaucgugcgguuccccaacauuaccaaccugugucccuucggcgagguguucaacgccacccgguucgccagcguguacgccuggaaccggaagcggaucagcaacugcguggccgacuacagcgugcuguacaacagcgccagcuucagcaccuucaagugcuacggcgugagcccuaccaagcugaacgaccugugcuucaccaacguguacgccgacagcuucgugauccggggcgacgaggugcggcagaucgcucccggccagaccggcaagaucgccgacuacaacuacaagcugcccgacgacuucaccggcugcgugaucgccuggaacagcaacaaccuggacagcaaggugggcggcaacuacaacuaccuguuccggcuguuccguaagagcaaccugaagccauuugagcgggacaucagcaccgagaucuaccaggccggcaacacccccugcaacgguguggagggcuucaacugcuacuucccccugcagagcuacggcuuccagcccaccaacggcgugggcuaccagcccuaccgggugguggugcugagcuucgagcugcugcacgcccccgccaccgugugcggcccuaaaaagagcaccaaccuggugaagaacaagugcgugaauuucaacuucaacggccugaccggcaccggcgugcugaccgagagcaacaagaaguuccugcccuuccagcaguucggccgggauaucgccgacaccaccgacgccgugcgggacccccagacccuggagauccuggacaucaccccaugcagcuucggcggcgugagcgucaucacccccggcacaaacaccagcaaccagguggcagugcuguaccagggagugaacugcaccgaggugcccguggccauccacgccgaccagcugacccccaccuggcggguguacagcaccggcagcaacguguuccagacccgggccggcugccugaucggcgccgagcacgugaacaacagcuacgagugcgacauccccaucggcgccggcaucugcgcuuccuaccagacccagaccaacagcccccggcgggcccggagcguggccagccagagcgugaucgccuacaccaugagcuuaggcgccgagaacagcguggccuacagcaacaacagcaucgccaucccuaccaacuucaccaucagcgugaccaccgagauccugcccgugagcaugaccaagaccagcguggacuguaccauguacauaugcggcgacagcaccgagugcagcaaccugcugcugcaguacggcagcuucugcacccagcugaaccgggcgcugaccggcaucgccguggagcaggacaagaacacccaagagguguucgcccaggugaagcagaucuacaagacucccccaaucaaggacuucggcggcuucaacuucagccagauccugcccgaccccagcaagcccagcaagcggagcuucaucgaggaccugcuguucaacaaggugacccuggccgacgccggcuucaucaagcaguacggcgacugccugggggauaucgccgcccgggaccugaucugcgcucagaaguucaacggccugaccgugcugcccccucugcugaccgacgagaugaucgcccaguacaccagcgcccugcuugccggcaccaucaccagcggcuggaccuucggcgccggcgccgcacugcagauccccuucgccaugcagauggccuaccgguucaacggcaucggcgugacccagaacgugcuguacgagaaccagaagcugaucgccaaccaguucaacagcgccaucggcaagauccaggacagccugagcagcaccgccagcgcccugggcaagcugcaggacguggugaaccagaacgcccaggcucugaacacccuggugaagcagcugagcagcaauuuuggcgccaucagcagcgugcugaacgacauccugucaaggcuggaucccccagaggccgaggugcagaucgaccggcugaucaccggccggcugcagagccugcagaccuacgugacccagcagcugauccgggccgccgagauccgggccagcgccaaccuggccgcaaccaagaugagcgagugcgugcugggccagagcaagcggguggacuucugcggcaagggcuaccaccugaugagcuucccccagagcgcuccccacggcgugguguuccuccacgucacauacgugcccgcccaggagaagaacuucaccaccgcccccgccaucugccacgacggcaaggcccacuucccccgggagggaguguucgugagcaacggcacccacugguucgugacccagcggaacuucuacgagccucagauuaucaccaccgacaacaccuucgugagcggcaacugcgacguggugaucggcaucgugaacaacaccguguacgacccccugcagcccgagcuggacagcuucaaggaggagcuggacaaguacuucaagaaccacaccagcccagacguggaccugggcgacaucagcggcaucaacgccagcguggugaacauccagaaggagaucgaccggcugaacgagguggccaagaaccugaacgagagccugaucgaccugcaggagcugggcaaguacgagcaguacaucaaguggcccugguacaucuggcugggcuucaucgccggccugaucgccaucgugauggugaccaucaugcugugcugcaugaccagcugcuguagcugccugaagggcugcugcagcugcggcagcugcugcaaguucgacgaggacgacagcgagcccgugcugaagggcgugaagcugcacuacaccugaggacuaguuauaagacugacuagcccgaugggccucccaacgggcccuccuccccuccuugcaccgagagaucuaaaaaaaaaaaaaaaaaaaaaaaaaaaaaaaaaaaaaaaaaaaaaaaaaaaaaaaaaaaaaaaaaaaaaaaaaaaaaaaaaaaaaaaaaaaaaaaaaaaa

SEQ ID NO: 26002 - RNA, 4005 nt, Artificial Sequence
  SARS-CoV-2/Wuhan/WIV05/2019__EPI_ISL_402128 spike protein mRNA gc (1-1273)(K986P_V987P_H69del_V70del_Y453F_D614G_I692V_M1229I)
aggagaaagcuuaccauguucguguuccuggugcugcugccccuggugagcagccagugcgugaaccugaccacccggacccagcugcccccugccuacaccaacagcuucacccggggcguguacuaccccgacaagguguuccggagcagcgugcugcacagcacccaggaccuguuccugcccuucuucagcaacgugaccugguuccacgccaucagcggcaccaacggcaccaagcgguucgacaacccagugcugcccuucaacgacggcguguacuucgccagcaccgagaagucaaacaucauccggggcuggaucuucggcaccacccuggacagcaagacacagagccugcugaucgugaacaacgccaccaacguggugaucaaggugugcgaguuucaguucugcaacgaccccuuccugggcguguacuaccacaagaacaacaagagcuggauggagagcgaguuccggguguacagcagcgcuaacaauugcaccuucgaguacgucagccagcccuuccugauggaccucgagggcaagcagggcaacuucaagaaccugcgggaguucguguucaagaacaucgauggcuacuucaagaucuacagcaagcacacccccaucaaccuggugcgggaccugccccagggauucagcgcccuggagccucugguggaccugcccaucggcaucaacaucaccagguuccagacccugcuggcccugcaccggagcuaccugacccccggcgacagcagcagcggcuggaccgccggcgccgccgcauacuacgugggcuaccugcagccacggaccuuccugcugaaguacaacgagaacggcaccaucaccgacgccguggacugcgcccuggacccccugagcgagaccaagugcacccuaaagagcuucaccguggagaagggcaucuaccagaccagcaacuuccgggugcagcccacugagagcaucgugcgguuccccaacauuaccaaccugugucccuucggcgagguguucaacgccacccgguucgccagcguguacgccuggaaccggaagcggaucagcaacugcguggccgacuacagcgugcuguacaacagcgccagcuucagcaccuucaagugcuacggcgugagcccuaccaagcugaacgaccugugcuucaccaacguguacgcugacagcuucgugauccggggcgacgaggugcggcagaucgcccccggccagaccggcaagaucgccgacuacaacuacaagcugcccgacgacuucaccggcugcgugaucgccuggaacagcaacaaccuggacagcaaggugggcggcaacuacaacuaccuguuccggcuguuccguaagagcaaccugaagccauuugagcgggacaucagcaccgagaucuaccaggccggcagcacccccugcaacgguguggagggcuucaacugcuacuucccccugcagagcuacggcuuccagcccaccaacggcgugggcuaccagcccuaccgggugguggugcugagcuucgagcugcugcacgcccccgccaccgugugcggcccuaaaaagagcaccaaccuggugaagaacaagugcgugaacuucaauuucaacggccugaccggcaccggcgugcugaccgagagcaacaagaaguuccugcccuuccagcaguucggccgggauaucgccgacaccaccgacgcagugcgggacccccagacccuggagauccuggacaucaccccaugcagcuucggcggcgugagcgugaucacccccggcacaaacaccagcaaccaggucgccgugcuguaccagggagugaacugcaccgaggugcccguggccauccacgccgaccagcugacccccaccuggcggguguacagcaccggcagcaacguguuccagacccgggccggcugccugaucggcgccgagcacgugaacaacuccuacgagugcgacauccccaucggcgcuggcaucugcgccagcuaccagacccagaccaacagcccccggcgggcccggagcguggccagccagagcgugaucgccuacaccaugagcuuaggcgccgagaacagcguggccuacagcaacaacagcaucgcgaucccuaccaacuucaccaucagcgugaccaccgagauccugcccgugagcaugaccaagaccagcguggacuguaccauguacauaugcggcgacagcaccgagugcagcaaccugcugcugcaguacggcagcuucugcacccagcugaaccgggcccugaccggcaucgccguggagcaggacaagaacacccaagagguguucgcccaggugaagcagaucuacaagacucccccaaucaaggacuucggcggcuucaacuucagccagauccugcccgaccccagcaagcccagcaagcggagcuucaucgaggaccugcuguucaacaaggugacccuggccgacgccggcuucaucaagcaguacggcgacugccugggggauaucgccgcucgggaccugaucugcgcccagaaguucaacggccugaccgugcugcccccucugcugaccgacgagaugaucgcccaguacaccagcgcccugcuugccggcaccaucaccagcggcuggaccuucggcgccggcgcagcccugcagauccccuucgccaugcagauggccuaccgguucaacggcaucggcgugacccagaacgugcuguacgagaaccagaagcugaucgccaaccaguucaacagcgccaucggcaagauccaggacagccugagcagcaccgccagcgcccugggcaagcugcaggacguggugaaccagaacgcucaggcccugaacacccuggugaagcagcugagcagcaacuuuggcgccaucagcucagugcugaaugacauccugagcaggcuggaucccccagaggccgaggugcagaucgaccggcugaucaccggccggcugcagagccugcagaccuacgugacccagcagcugauccgggccgccgagauccgggccagcgccaaccuggcagccaccaagaugagcgagugcgugcugggccagagcaagcggguggacuucugcggcaagggcuaccaccugaugagcuucccccagagcgcuccccacggcgugguguuccuccacgugacauacguccccgcccaggagaagaacuucaccaccgcccccgccaucugccacgacggcaaggcccacuucccccgggagggaguguucgugagcaacggcacccacugguucgugacccagcggaacuucuacgagccucagauuaucaccaccgacaacaccuucgugagcggcaacugcgacguggugaucggcaucgugaacaacaccguguacgacccccugcagcccgagcuggacagcuucaaggaggagcuggacaaguacuucaagaaccacaccagcccagacguggaccugggcgacaucagcggcaucaacgccagcguggugaacauccagaaggagaucgaccggcugaacgagguggccaagaaccugaacgagagccugaucgaccugcaggagcugggcaaguacgagcaguacaucaaguggcccugguacaucuggcugggcuucaucgccggccugaucgccaucgugaucgugaccaucaugcugugcugcaugaccagcugcuguagcugccugaagggcugcugcagcugcggcagcugcugcaaguucgacgaggacgacagcgagcccgugcugaagggcgugaagcugcacuacaccugaggacuaguuauaagacugacuagcccgaugggccucccaacgggcccuccuccccuccuugcaccgagagaucuaaaaaaaaaaaaaaaaaaaaaaaaaaaaaaaaaaaaaaaaaaaaaaaaaaaaaaaaaaaaaaaaaaaaaaaaaaaaaaaaaaaaaaaaaaaaaaaaaaaa

SEQ ID NO: 26003 - RNA, 4002 nt, Artificial Sequence
  SARS-CoV-2/Wuhan/WIV05/2019__EPI_ISL_402128 spike protein mRNA gc (1-1273)(K986P_V987P_K986P_V987P_H69del_V70del_Y144del_N501Y_A570 D_D614G_P681H_T716I_S982A_D1118H)
aggagaaagcuuaccauguucguguuccuggugcugcugccccuggugagcagccagugcgugaaccugaccacccggacccagcugcccccugccuacaccaacagcuucacccggggcguguacuaccccgacaagguguuccggagcagcgugcugcacagcacccaggaccuguuccugcccuucuucagcaacgugaccugguuccacgccaucagcggcaccaacggcaccaagcgguucgacaacccagugcugcccuucaacgacggcguguacuucgccagcaccgagaagucaaacaucauccggggcuggaucuucggcaccacccuggacagcaagacacagagccugcugaucgugaacaacgccaccaacguggugaucaaggugugcgaguuucaguucugcaacgaccccuuccugggcguguaccacaagaacaacaagagcuggauggagagcgaguuccggguguacagcagcgcuaacaauugcaccuucgaguacgucagccagcccuuccugauggaccucgagggcaagcagggcaacuucaagaaccugcgggaguucguguucaagaacaucgauggcuacuucaagaucuacagcaagcacacccccaucaaccuggugcgggaccugccccagggauucagcgcccuggagccucugguggaccugcccaucggcaucaacaucaccagguuccagacccugcuggcccugcaccggagcuaccugacccccggcgacagcagcagcggcuggaccgccggcgccgccgcauacuacgugggcuaccugcagccacggaccuuccugcugaaguacaacgagaacggcaccaucaccgacgccguggacugcgcccuggacccccugagcgagaccaagugcacccuaaagagcuucaccguggagaagggcaucuaccagaccagcaacuuccgggugcagcccacugagagcaucgugcgguuccccaacauuaccaaccugugucccuucggcgagguguucaacgccacccgguucgccagcguguacgccuggaaccggaagcggaucagcaacugcguggccgacuacagcgugcuguacaacagcgccagcuucagcaccuucaagugcuacggcgugagcccuaccaagcugaacgaccugugcuucaccaacguguacgcugacagcuucgugauccggggcgacgaggugcggcagaucgcccccggccagaccggcaagaucgccgacuacaacuacaagcugcccgacgacuucaccggcugcgugaucgccuggaacagcaacaaccuggacagcaaggugggcggcaacuacaacuaccuguaccggcuguuccguaagagcaaccugaagccauucgagcgggacaucagcaccgagaucuaccaggccggcagcacccccugcaacgguguggagggcuuuaacugcuacuucccccugcagagcuacggcuuccagcccaccuacggcgugggcuaccagcccuaccgggugguggugcugagcuucgagcugcugcacgcccccgccaccgugugcggcccuaaaaagagcaccaaccuggugaagaacaagugcgugaacuucaacuucaauggccugaccggcaccggcgugcugaccgagagcaacaagaaguuccugcccuuccagcaguucggccgggauaucgacgacaccaccgacgccgugcgggacccccagacccuggagauccuggacaucaccccaugcagcuucggcggcgugagcgugaucacccccggcacaaacaccagcaaccaggucgcagugcuguaccagggagugaacugcaccgaggugcccguggccauccacgccgaccagcugacccccaccuggcggguguacagcaccggcagcaacguguuccagacccgggccggcugccugaucggcgccgagcacgugaacaacuccuacgagugcgacauccccaucggcgccggcaucugcgcuagcuaccagacccagaccaacagccaccggcgggcccggagcguggccagccagagcaucaucgccuacaccaugagcuuaggcgccgagaacagcguggccuacagcaacaacagcaucgccauccccaucaacuucaccauaagcgugaccaccgagauccugccugugagcaugaccaagaccagcguggacuguaccauguacaucugcggcgacagcaccgagugcagcaaccugcugcugcaguacggcagcuucugcacccagcugaaccgggcgcugaccggcaucgccguggagcaggacaagaacacccaagagguguucgcccaggugaagcagaucuacaagaccccacccaucaaggacuucggcggcuucaacuucagccagauccugcccgaccccagcaagcccagcaagcggagcuucaucgaggaccugcuguucaacaaggugacucuggccgacgccggcuucaucaagcaguacggcgauugccugggggacaucgccgcccgggaccugaucugcgcucagaaguucaacggccugaccgugcugccuccccugcugaccgacgagaugaucgcccaguacaccagcgcccugcuugccggcaccaucaccagcggcuggaccuucggcgccggcgccgcacugcagauccccuucgccaugcagauggccuaccgguucaacggcaucggcgugacccagaacgugcuguacgagaaccagaagcugaucgccaaccaguucaacagcgccaucggcaagauccaggacagccugagcagcaccgccagcgcccugggcaagcugcaggacguggugaaccagaacgcccaggcucugaacacccuggugaagcagcugagcagcaacuucggcgccaucagcucagugcugaacgacauccuggccaggcuggacccacccgaggccgaggugcagaucgaccggcugaucaccggccggcugcagagccugcagaccuacgugacccagcagcugauccgggccgccgagauucgggccagcgccaaucuggcagccaccaagaugagcgagugcgugcugggccagagcaagcggguggacuuuugcggcaagggcuaccaccugaugagcuucccccagagcgcuccccacggcgugguguuccuccacgugaccuacgugcccgcccaggagaagaacuucacaaccgcccccgccaucugccacgacggcaaggcccacuucccccgggagggagucuucgugagcaacggcacccacugguucgugacccagcggaacuucuacgagccccagaucaucaccacccacaacaccuucgugagcggcaacugcgacguggugaucggcaucgugaacaacaccguguacgacccucugcagcccgagcuggacagcuucaaggaggagcuggacaaguacuucaagaaccacaccagccccgacguggaucugggcgacaucagcggcaucaacgccagcguggugaacauccagaaggagaucgaccggcugaacgagguggccaagaaccugaacgagagccugaucgaccugcaggagcugggcaaguacgagcaguacaucaaguggccaugguacaucuggcugggcuucaucgccggccugaucgccaucgugauggugaccaucaugcugugcugcaugaccagcugcuguagcugccugaagggcugcugcagcugcggcagcugcugcaaguucgacgaggacgacagcgagcccgugcugaagggcgugaagcugcacuacaccugaggacuaguuauaagacugacuagcccgaugggccucccaacgggcccuccuccccuccuugcaccgagagaucuaaaaaaaaaaaaaaaaaaaaaaaaaaaaaaaaaaaaaaaaaaaaaaaaaaaaaaaaaaaaaaaaaaaaaaaaaaaaaaaaaaaaaaaaaaaaaaaaaaaa

SEQ ID NO: 26004 - RNA, 4011 nt, Artificial Sequence
  SARS-CoV-2/Wuhan/WIV05/2019__EPI_ISL_402128 spike protein mRNA gc (1-1273)(K986P_V987P_K986P_V987P_K417N_E484K_N501Y_D614G)
aggagaaagcuuaccauguucguguuccuggugcugcugccccuggugagcagccagugcgugaaccugaccacccggacccagcugcccccugccuacaccaacagcuucacccggggcguguacuaccccgacaagguguuccggagcagcgugcugcacagcacccaggaccuguuccugcccuucuucagcaacgugaccugguuccacgccauccacgugagcggcaccaacggcaccaagcgguucgacaacccagugcugcccuucaacgacggcguguacuucgccagcaccgagaagucaaacaucauccggggcuggaucuucggcaccacccuggacagcaagacacagagccugcugaucgugaacaacgccaccaacguggugaucaaggugugcgaguuucaguucugcaacgaccccuuccugggcguguacuaccacaagaacaacaagagcuggauggagagcgaguuccgggucuacagcagcgcuaacaauugcaccuucgaguacgugagccagcccuuccugauggaccucgagggcaagcagggcaacuucaagaaccugcgggaguucguguucaagaacaucgauggcuacuucaagaucuacagcaagcacacccccaucaaccuggugcgggaccugccccagggauucagcgcccuggagccucugguggaccugcccaucggcaucaacaucaccagguuccagacccugcuggcccugcaccggagcuaccugacccccggcgacagcagcagcggcuggaccgccggcgccgccgcauacuacgugggcuaccugcagccacggaccuuccugcugaaguacaacgagaacggcaccaucaccgacgccguggacugcgcccuggacccccugagcgagaccaagugcacccuaaagagcuucaccguggagaagggcaucuaccagaccagcaacuuccgggugcagcccacugagagcaucgugcgguuccccaacauuaccaaccugugucccuucggcgagguguucaacgccacccgguucgccagcguguacgccuggaaccggaagcggaucagcaacugcguggccgacuacagcgugcuguacaacagcgccagcuucagcaccuucaagugcuacggcgugagcccuaccaagcugaacgaccugugcuucaccaacguguacgcugacagcuucgugauccggggcgacgaggugcggcagaucgcccccggccagaccggcaacaucgccgacuacaacuacaagcugcccgacgacuucaccggcugcgugaucgccuggaacagcaacaaccuggacagcaaggugggcggcaacuacaacuaccuguaccggcuguuccguaagagcaaccugaagccauucgagcgggacaucagcaccgagaucuaccaggccggcagcacccccugcaacggugugaagggcuuuaacugcuacuucccccugcagagcuacggcuuccagcccaccuacggcgugggcuaccagcccuaccgggugguggugcugagcuucgagcugcugcacgcccccgccaccgugugcggcccuaaaaagagcaccaaccuggugaagaacaagugcgugaacuucaauuucaacggccugaccggcaccggcgugcugaccgagagcaacaagaaguuccugcccuuccagcaguucggccgggauaucgccgacaccaccgacgcagugcgggacccccagacccuggagauccuggacaucaccccaugcagcuucggcggcgugagcgucaucacccccggcacaaacaccagcaaccagguggccgugcuguaccagggagugaacugcaccgaggugcccguggccauccacgccgaccagcugacccccaccuggcggguguacagcaccggcagcaacguguuccagacccgggccggcugccugaucggcgccgagcacgugaacaacuccuacgagugcgacauccccaucggcgcuggcaucugcgccagcuaccagacccagaccaacagcccccggcgggcccggagcguggccagccagagcaucaucgccuacaccaugagcuuaggcgccgagaacagcguggccuacagcaacaacagcaucgcgaucccuaccaacuucaccaucagcgugaccaccgagauacugcccgugagcaugaccaagaccagcguggacuguaccauguacaucugcggcgacagcaccgagugcagcaaccugcugcugcaguacggcagcuucugcacccagcugaaccgggcccugaccggcaucgccguggagcaggacaagaacacccaagagguguucgcccaggugaagcagaucuacaagacucccccaaucaaggacuucggcggcuucaacuucagccagauccugcccgaccccagcaagcccagcaagcggagcuucaucgaggaccugcuguucaacaaggugacccuggccgacgccggcuucaucaagcaguacggcgacugccugggggauaucgccgcucgggaccugaucugcgcccagaaguucaacggccugaccgugcugcccccucugcugaccgacgagaugaucgcccaguacaccagcgcccugcuugccggcaccaucaccagcggcuggaccuucggcgccggcgcagcccugcagauccccuucgccaugcagauggccuaccgguucaacggcaucggcgugacccagaacgugcuguacgagaaccagaagcugaucgccaaccaguucaacagcgccaucggcaagauccaggacagccugagcagcaccgccagcgcccugggcaagcugcaggacguggugaaccagaacgcucaggcccugaacacccuggugaagcagcugagcagcaacuucggcgccaucagcucagugcugaaugacauccugagcaggcuggaucccccagaggccgaggugcagaucgaccggcugaucaccggccggcugcagagccugcagaccuacgugacccagcagcugauccgggccgccgagauccgggccagcgccaaccuggcagccaccaagaugagcgagugcgugcugggccagagcaagcggguggacuuuugcggcaagggcuaccaccugaugagcuucccccagagcgcuccccacggcgugguguuccuccacgugacauacguccccgcccaggagaagaacuucaccaccgcccccgccauuugccacgacggcaaggcccacuucccccgggagggaguguucgugagcaacggcacccacugguucgugacccagcggaacuucuacgagccucagaucaucaccaccgacaacaccuucgugagcggcaacugcgacguggugaucggcaucgugaacaacaccguguacgacccccugcagcccgagcuggacagcuucaaggaggagcuggacaaguacuucaagaaccacaccagcccagacguggaccugggcgacaucagcggcaucaacgccagcguggugaacauccagaaggagaucgaccggcugaacgagguggccaagaaccugaacgagagccugaucgaccugcaggagcugggcaaguacgagcaguacaucaaguggcccugguacaucuggcugggcuucaucgccggccugaucgccaucgugauggugaccaucaugcugugcugcaugaccagcugcuguagcugccugaagggcugcugcagcugcggcagcugcugcaaguucgacgaggacgacagcgagcccgugcugaagggcgugaagcugcacuacaccugaggacuaguuauaagacugacuagcccgaugggccucccaacgggcccuccuccccuccuugcaccgagagaucuaaaaaaaaaaaaaaaaaaaaaaaaaaaaaaaaaaaaaaaaaaaaaaaaaaaaaaaaaaaaaaaaaaaaaaaaaaaaaaaaaaaaaaaaaaaaaaaaaaaa

SEQ ID NO: 26005 - RNA, 4002 nt, Artificial Sequence
  SARS-CoV-2/Wuhan/WIV05/2019__EPI_ISL_402128 spike protein mRNA gc (1-1273)(K986P_V987P_K986P_V987P_L18F_D80A_D215G_L242del_A243del_ L244del_R246I_K417N_E484K_N501Y_D614G_A701V)
aggagaaagcuuaccauguucguguuccuggugcugcugccccuggugagcagccagugcgugaacuucaccacccggacccagcugcccccugccuacaccaacagcuucacccggggcguguacuaccccgacaagguguuccggagcagcgugcugcacagcacccaggaccuguuccugcccuucuucagcaacgugaccugguuccacgccauccacgugagcggcaccaacggcaccaagcgguucgccaacccagugcugcccuucaacgacggcguguacuucgccagcaccgagaagucaaacaucauccggggcuggaucuuuggcaccacccuggacagcaagacacagagccugcugaucgugaacaacgcuaccaacguggugaucaaggugugcgaguuccaguucugcaacgaccccuuccugggcguguacuaccacaagaacaacaagagcuggauggagagcgaguuccgggucuacagcagcgccaacaauugcaccuucgaguacgugagccagcccuuccugauggaccuggagggcaagcagggcaacuucaagaaccuccgggaguucguguucaagaacaucgacggcuacuucaagaucuacagcaagcacacccccaucaaccuggugcggggacugccccagggcuucagcgcccuggagccucugguggaucugcccaucggcaucaacaucaccagguuccagacccugcacaucagcuaccugacccccggcgacagcagcagcggcuggaccgccggcgccgccgcauacuacgugggcuaccugcagccacggaccuuccugcugaaguacaacgagaacggcaccaucaccgacgccguggacugcgcccuggacccccugagcgagaccaagugcacccuuaagagcuucaccguggagaagggcaucuaccagaccagcaacuuccgggugcagcccacugagagcauugugcgguuccccaacaucaccaaccugugucccuucggcgagguguucaacgccacccgguucgccagcguguacgccuggaaccggaagcggaucagcaacugcguggccgacuacagcgugcuguacaacagcgccagcuucagcaccuucaagugcuacggcgugagcccuaccaagcugaacgaccugugcuucaccaacguguacgcugacagcuucgugauccggggcgacgaggugcggcagaucgcccccggccagaccggcaacaucgccgacuacaacuacaagcugcccgacgacuucaccggcugcgugaucgccuggaacagcaacaaccuggacagcaaggugggcggcaacuacaacuaccuguaccggcuauuccguaagagcaaccugaagccauuugagcgggacaucagcaccgagaucuaccaggccgguagcacccccugcaacggcgugaagggcuucaacugcuacuucccccugcagagcuacggcuuccagcccaccuacggcgugggcuaccagcccuaccgggugguggugcugagcuucgagcugcugcacgcccccgccaccgugugcggcccuaaaaagagcaccaaccuggugaagaacaagugcgugaacuucaauuucaacggccugaccggcaccggcgugcugaccgagagcaacaagaaguuccugcccuuccagcaguucggccgggacaucgccgacaccaccgaugcagugcgggacccccagacccuggagauccuggacaucaccccaugcagcuucggcggcgugagcgucaucacccccggaacaaacaccagcaaccagguggccgugcuguaccagggcgugaacugcaccgaggugcccguggccauccacgccgaccagcugacccccaccuggcggguguacagcaccggcagcaacguguuccagacccgggccggcugccugaucggcgccgagcacgugaacaacuccuacgagugcgacauccccaucggcgcuggcaucugcgccagcuaccagacccagaccaacagcccccggcgggcccggagcguggccagccagagcaucaucgccuacaccaugagccugggcguggagaacagcguggccuacagcaacaacagcaucgccaucccuaccaacuucaccauaagcgugaccaccgagauccugcccgugagcaugaccaagaccagcguggacuguaccauguacaucugcggcgacagcaccgagugcagcaaccuguuacugcaguacggcagcuucugcacccagcugaaccgggcgcugaccggcaucgccguggagcaggacaagaacacccaagagguguucgcccaggugaagcagaucuacaagacucccccaaucaaggacuucggcggcuucaacuucagccagauccugcccgaccccagcaagcccagcaagcggagcuucaucgaggaccugcuguucaacaaggugacccuggccgacgccggcuucaucaagcaguacggggacugccugggcgacaucgccgcccgggaccugaucugcgcucagaaguucaacggccugaccgugcugcccccucugcugaccgaugagaugaucgcccaguacaccagcgcccugcuggccggcaccaucaccagcggcuggaccuucggcgccggcgccgcacugcagauccccuucgccaugcagauggccuaccgguucaacggcaucggcgugacccagaacgugcuguacgagaaccagaagcugaucgccaaccaguucaacagcgccaucggcaagauccaggacagccugagcagcaccgccagcgcccugggcaagcugcaggacguggugaaccagaacgcccaggcucugaacacccuggugaagcagcugagcagcaacuuuggcgccaucagcucagugcugaaugacauccugagccggcuggaucccccagaggccgaggugcagaucgacaggcugaucaccggccggcugcagagccugcagaccuacgugacccagcagcugauccgggccgccgagauucgggccagcgccaaccuggccgcaaccaagaugagcgagugcgugcugggccagagcaagcggguggacuucugcggcaagggcuaccaccugaugagcuucccccagagcgcuccccacggcgugguguuccugcacgucacauacgugcccgcccaggagaagaacuucaccaccgcccccgccaucugccacgacggaaaggcccacuucccccgggagggcguguucgugagcaacggcacccacugguucgugacccagcggaacuucuacgagccucagaucaucaccaccgacaacaccuucgugagcggcaacugcgacguggugaucggcaucgugaacaacaccguguacgacccccugcagcccgagcuggacagcuucaaggaggagcucgacaaguacuucaagaaccacaccagcccagacguggaccugggcgacaucagcggcaucaacgccagcguggugaacauccagaaggagaucgaccggcugaacgagguggccaagaaccugaacgagagccugaucgaccugcaggagcugggcaaguacgagcaguacaucaaguggcccugguacaucuggcugggcuucaucgccggccugaucgccaucgugauggugaccaucaugcugugcugcaugaccagcugcuguagcugccugaagggcugcugcagcugcggcagcugcugcaaguucgacgaggacgacagcgagcccgugcugaagggcgugaagcugcacuacaccugaggacuaguuauaagacugacuagcccgaugggccucccaacgggcccuccuccccuccuugcaccgagagaucuaaaaaaaaaaaaaaaaaaaaaaaaaaaaaaaaaaaaaaaaaaaaaaaaaaaaaaaaaaaaaaaaaaaaaaaaaaaaaaaaaaaaaaaaaaaaaaaaaaaa

SEQ ID NO: 26006 - RNA, 4011 nt, Artificial Sequence
  SARS-CoV-2/Wuhan/WIV05/2019__EPI_ISL_402128 spike protein mRNA gc (1-1273)(K986P_V987P_K986P_V987P_E484K_D614G)
aggagaaagcuuaccauguucguguuccuggugcugcugccccuggugagcagccagugcgugaaccugaccacccggacccagcugcccccugccuacaccaacagcuucacccggggcguguacuaccccgacaagguguuccggagcagcgugcugcacagcacccaggaccuguuccugcccuucuucagcaacgugaccugguuccacgccauccacgugagcggcaccaacggcaccaagcgguucgacaacccagugcugcccuucaacgacggcguguacuucgccagcaccgagaagucaaacaucauccggggcuggaucuucggcaccacccuggacagcaagacacagagccugcugaucgugaacaacgccaccaacguggugaucaaggugugcgaguuucaguucugcaacgaccccuuccugggcguguacuaccacaagaacaacaagagcuggauggagagcgaguuccgggucuacagcagcgcuaacaauugcaccuucgaguacgugagccagcccuuccugauggaccucgagggcaagcagggcaacuucaagaaccugcgggaguucguguucaagaacaucgauggcuacuucaagaucuacagcaagcacacccccaucaaccuggugcgggaccugccccagggauucagcgcccuggagccucugguggaccugcccaucggcaucaacaucaccagguuccagacccugcuggcccugcaccggagcuaccugacccccggcgacagcagcagcggcuggaccgccggcgccgccgcauacuacgugggcuaccugcagccacggaccuuccugcugaaguacaacgagaacggcaccaucaccgacgccguggacugcgcccuggacccccugagcgagaccaagugcacccuaaagagcuucaccguggagaagggcaucuaccagaccagcaacuuccgggugcagcccacugagagcaucgugcgguuccccaacauuaccaaccugugucccuucggcgagguguucaacgccacccgguucgccagcguguacgccuggaaccggaagcggaucagcaacugcguggccgacuacagcgugcuguacaacagcgccagcuucagcaccuucaagugcuacggcgugagcccuaccaagcugaacgaccugugcuucaccaacguguacgcugacagcuucgugauccggggcgacgaggugcggcagaucgcccccggccagaccggcaagaucgccgacuacaacuacaagcugcccgacgacuucaccggcugcgugaucgccuggaacagcaacaaccuggacagcaaggugggcggcaacuacaacuaccuguaccggcuguuccguaagagcaaccugaagccauucgagcgggacaucagcaccgagaucuaccaggccggcagcacccccugcaacggugugaagggcuuuaacugcuacuucccccugcagagcuacggcuuccagcccaccaacggcgugggcuaccagcccuaccgggugguggugcugagcuucgagcugcugcacgcccccgccaccgugugcggcccuaaaaagagcaccaaccuggugaagaacaagugcgugaacuucaauuucaacggccugaccggcaccggcgugcugaccgagagcaacaagaaguuccugcccuuccagcaguucggccgggauaucgccgacaccaccgacgcagugcgggacccccagacccuggagauccuggacaucaccccaugcagcuucggcggcgugagcgucaucacccccggcacaaacaccagcaaccagguggccgugcuguaccagggagugaacugcaccgaggugcccguggccauccacgccgaccagcugacccccaccuggcggguguacagcaccggcagcaacguguuccagacccgggccggcugccugaucggcgccgagcacgugaacaacuccuacgagugcgacauccccaucggcgcuggcaucugcgccagcuaccagacccagaccaacagcccccggcgggcccggagcguggccagccagagcaucaucgccuacaccaugagcuuaggcgccgagaacagcguggccuacagcaacaacagcaucgcgaucccuaccaacuucaccaucagcgugaccaccgagauacugcccgugagcaugaccaagaccagcguggacuguaccauguacaucugcggcgacagcaccgagugcagcaaccugcugcugcaguacggcagcuucugcacccagcugaaccgggcccugaccggcaucgccguggagcaggacaagaacacccaagagguguucgcccaggugaagcagaucuacaagacucccccaaucaaggacuucggcggcuucaacuucagccagauccugcccgaccccagcaagcccagcaagcggagcuucaucgaggaccugcuguucaacaaggugacccuggccgacgccggcuucaucaagcaguacggcgacugccugggggauaucgccgcucgggaccugaucugcgcccagaaguucaacggccugaccgugcugcccccucugcugaccgacgagaugaucgcccaguacaccagcgcccugcuugccggcaccaucaccagcggcuggaccuucggcgccggcgcagcccugcagauccccuucgccaugcagauggccuaccgguucaacggcaucggcgugacccagaacgugcuguacgagaaccagaagcugaucgccaaccaguucaacagcgccaucggcaagauccaggacagccugagcagcaccgccagcgcccugggcaagcugcaggacguggugaaccagaacgcucaggcccugaacacccuggugaagcagcugagcagcaacuucggcgccaucagcucagugcugaaugacauccugagcaggcuggaucccccagaggccgaggugcagaucgaccggcugaucaccggccggcugcagagccugcagaccuacgugacccagcagcugauccgggccgccgagauccgggccagcgccaaccuggcagccaccaagaugagcgagugcgugcugggccagagcaagcggguggacuuuugcggcaagggcuaccaccugaugagcuucccccagagcgcuccccacggcgugguguuccuccacgugacauacguccccgcccaggagaagaacuucaccaccgcccccgccauuugccacgacggcaaggcccacuucccccgggagggaguguucgugagcaacggcacccacugguucgugacccagcggaacuucuacgagccucagaucaucaccaccgacaacaccuucgugagcggcaacugcgacguggugaucggcaucgugaacaacaccguguacgacccccugcagcccgagcuggacagcuucaaggaggagcuggacaaguacuucaagaaccacaccagcccagacguggaccugggcgacaucagcggcaucaacgccagcguggugaacauccagaaggagaucgaccggcugaacgagguggccaagaaccugaacgagagccugaucgaccugcaggagcugggcaaguacgagcaguacaucaaguggcccugguacaucuggcugggcuucaucgccggccugaucgccaucgugauggugaccaucaugcugugcugcaugaccagcugcuguagcugccugaagggcugcugcagcugcggcagcugcugcaaguucgacgaggacgacagcgagcccgugcugaagggcgugaagcugcacuacaccugaggacuaguuauaagacugacuagcccgaugggccucccaacgggcccuccuccccuccuugcaccgagagaucuaaaaaaaaaaaaaaaaaaaaaaaaaaaaaaaaaaaaaaaaaaaaaaaaaaaaaaaaaaaaaaaaaaaaaaaaaaaaaaaaaaaaaaaaaaaaaaaaaaaa

SEQ ID NO: 26007 - RNA, 4011 nt, Artificial Sequence
  SARS-CoV-2/Wuhan/WIV05/2019__EPI_ISL_402128 spike protein mRNA gc (1-1273)(K986P_V987P_K986P_V987P_L18F_T20N_P26S_D138Y_R190S_K417T _E484K_N501Y_D614G_H655Y_T1027I)
aggagaaagcuuaccauguucguguuccuggugcugcugccccuggugagcagccagugcgugaacuucaccaaccggacccagcugcccagcgccuacaccaacagcuucacccggggcguguacuacccugacaagguguuccggagcagcgugcugcacagcacccaggaccuguuccugcccuucuucagcaacgugaccugguuccacgccauccacgugagcggcaccaacggcaccaagcgguucgacaaccccgugcugccauucaacgacggcguguacuucgccagcaccgagaagucaaacaucauccggggcuggaucuuuggcaccacccuggacagcaagacccagagccugcugaucgugaacaacgccacaaacguggugaucaaggugugcgaguuccaguucugcaacuaccccuuccugggcguguacuaccacaagaacaacaagagcuggauggagagcgaguuccgggucuacagcagcgcuaauaacugcaccuucgaguacgugagccagcccuuccugauggaccuggagggcaagcagggcaacuucaagaaccucagcgaguucguguucaagaacaucgacggcuacuucaagaucuacagcaagcacacccccaucaaccuggugcgggaucugccccagggauucagcgcccuggagccccugguggaccugccuaucggcaucaacaucacccgguuccagacccugcuggcccugcacaggagcuaccugacccccggcgacagcagcagcggcuggaccgccggcgccgccgcauacuacgugggcuaccugcagccccggaccuuccugcugaaguacaacgagaacggcaccaucaccgacgccguggacugcgcccuggacccacugagcgagaccaagugcacccuaaagagcuucaccguggagaagggcaucuaccagaccagcaacuuccgggugcagcccaccgagagcaucgugcgguuccccaacauuacuaaccugugucccuucggcgagguguucaacgccacccgguucgccagcguguacgccuggaaccggaagcggaucagcaacugcguggccgacuacagcgugcuguacaacagcgccagcuucagcaccuucaagugcuacggcgugagccccaccaagcugaacgaccugugcuucaccaacguguacgcugacagcuucgugauccggggcgacgaggugcggcagaucgccccuggccagaccggcaccaucgccgacuacaacuacaagcugcccgacgacuucaccggcugcgugaucgccuggaacagcaacaaccuggacagcaaggugggcggcaacuacaacuaccuguaccggcuguuccguaagagcaaccugaagcccuuugagcgggacaucagcaccgagaucuaccaggccggcagcaccccaugcaacggugugaagggcuucaacugcuacuucccccugcagagcuacggcuuccagcccaccuacggcgugggcuaccagcccuaccgggugguggugcugagcuucgagcugcugcacgcccccgccaccgugugcggccccaaaaagagcaccaaccuggugaagaacaagugcgugaacuucaauuucaacggccugaccggcaccggcgugcugaccgagagcaacaagaaguuccugccuuuccagcaguucggccgggacaucgccgauaccaccgacgcagugcgggacccccagacccuggagauccuggacaucacccccugcagcuucggcggcgugagcgucaucaccccaggcacaaacaccagcaaccagguggccgugcuguaccagggagugaacugcaccgaggugcccguggccauccacgccgaccagcugacccccaccuggcggguguacuccaccggcagcaacguguuccagacccgggccggcugccugaucggcgccgaguacgugaacaacagcuacgagugcgacauccccaucggcgcuggcaucugcgccagcuaccagacccagaccaacagcccccggcgggcccggagcguggccagccagagcaucaucgccuacaccaugagccugggcgccgagaacagcguggccuacagcaacaacagcaucgcgauccccaccaacuucaccaucagcgugaccaccgagauauuaccugugagcaugaccaagaccagcguggacuguaccauguacaucugcggcgacagcaccgagugcagcaaccugcugcugcaguacggcagcuucugcacccagcugaaccgggcccugaccggcaucgccguggagcaggacaagaacacccaagagguguucgcccaggugaagcagaucuacaagacuccacccaucaaggacuucggcggcuucaacuucagccagauccugcccgaccccagcaagcccagcaagcggagcuucaucgaggaccugcuguucaacaaggugacccuggccgacgccggcuucaucaagcaguacggcgacugccugggggacaucgccgcucgggaucugaucugcgcccagaaguucaacggccugaccgugcugccuccccugcugaccgacgagaugaucgcccaguacaccagcgcccugcuggccggcaccaucaccagcggcuggaccuucggcgccggcgcagcccuucagauccccuucgccaugcagauggccuaccgguucaacggcaucggcgugacccagaacgugcuguacgagaaccagaagcugaucgccaaccaguucaacagcgccaucggcaagauccaggacagccugagcagcaccgccagcgcccugggcaagcugcaggacguggugaaccagaacgcucaggcccugaacacccuggugaagcagcugagcucaaacuuuggcgccaucagcagcgugcugaaugacauccugagccggcuggacccacccgaggccgaggugcagaucgacaggcugaucaccggccggcugcagagccugcagaccuacgugacccagcagcugauccgggccgccgagauccgggccagcgccaaccuggcagccauuaagaugagcgagugcgugcugggccagagcaagcggguggacuucugcggcaagggcuaccaccugaugagcuucccccagagcgcuccccacggcgugguguuccugcacgugaccuacguccccgcccaggagaagaacuucacaaccgcccccgccaucugccacgacggcaaggcccacuucccccgggagggaguguucgugagcaacggcacccacugguucgugacccagcggaacuucuacgagccccagaucaucaccaccgacaacaccuucgugagcggcaacugcgacguggugaucggcaucgugaacaacaccguguacgacccucuccagcccgagcuggacagcuucaaggaggagcuggacaaguacuucaagaaccacaccagccccgacguggaccugggcgauaucagcggcaucaacgccagcguggugaacauccagaaggagaucgaccggcugaacgagguggccaagaaccugaacgagagccugaucgaccugcaggagcugggcaaguacgagcaguacaucaaguggccaugguacaucuggcugggcuucaucgccggccugaucgccaucgugauggugaccaucaugcugugcugcaugaccagcugcuguagcugccugaagggcugcugcagcugcggcagcugcugcaaguucgacgaggacgacagcgagcccgugcugaagggcgugaagcugcacuacaccugaggacuaguuauaagacugacuagcccgaugggccucccaacgggcccuccuccccuccuugcaccgagagaucuaaaaaaaaaaaaaaaaaaaaaaaaaaaaaaaaaaaaaaaaaaaaaaaaaaaaaaaaaaaaaaaaaaaaaaaaaaaaaaaaaaaaaaaaaaaaaaaaaaaa

SEQ ID NO: 26008 - RNA, 4011 nt, Artificial Sequence
  SARS-CoV-2/Wuhan/WIV05/2019__EPI_ISL_402128 spike protein mRNA gc (1-1273)(K986P_V987P_K986P_V987P_S13I_W152C_L452R_D614G)
aggagaaagcuuaccauguucguguuccuggugcugcugccccuggugagcauccagugcgugaaccugaccacccggacccagcugcccccugccuacaccaacagcuucacccggggcguguacuaccccgacaagguguuccggagcagcgugcugcacagcacccaggaccuguuccugcccuucuucagcaacgugaccugguuccacgccauccacgugagcggcaccaacggcaccaagcgguucgacaacccagugcugcccuucaacgacggcguguacuucgccagcaccgagaagucaaacaucauccggggcuggaucuucggcaccacccuggacagcaagacacagagccugcugaucgugaacaacgccaccaacguggugaucaaggugugcgaguuucaguucugcaacgaccccuuccugggcguguacuaccacaagaacaacaagagcugcauggagagcgaguuccgggucuacagcagcgcuaacaauugcaccuucgaguacgugagccagcccuuccugauggaccucgagggcaagcagggcaacuucaagaaccugcgggaguucguguucaagaacaucgauggcuacuucaagaucuacagcaagcacacccccaucaaccuggugcgggaccugccccagggauucagcgcccuggagccucugguggaccugcccaucggcaucaacaucaccagguuccagacccugcuggcccugcaccggagcuaccugacccccggcgacagcagcagcggcuggaccgccggcgccgccgcauacuacgugggcuaccugcagccacggaccuuccugcugaaguacaacgagaacggcaccaucaccgacgccguggacugcgcccuggacccccugagcgagaccaaguguacccuaaagagcuucaccguggagaagggcaucuaccagaccagcaacuuccgggugcagcccacugagagcauugugcgguuccccaacaucaccaaccugugccccuucggcgagguguucaacgccacccgguucgccagcguguacgccuggaaccggaagcggaucagcaacugcguggccgacuacagcgugcuguacaacagcgccagcuucagcaccuucaagugcuacggcgugagcccuaccaagcugaacgaccugugcuucaccaacguguacgcugacagcuucgugauccggggcgacgaggugcggcagaucgcccccggccagaccggcaagaucgccgacuacaacuacaagcugcccgacgacuucaccggcugcgugaucgccuggaacagcaacaaccuggacagcaaggugggcggcaacuacaacuaccgguaccggcuguuccguaagagcaaccugaagccauucgagcgggacaucagcaccgagaucuaccaggccggcagcacccccugcaacgguguggagggcuuuaacugcuacuucccccugcagagcuacggcuuccagcccaccaacggcgugggcuaccagcccuaccgggugguggugcugagcuucgagcugcugcacgcccccgccaccgugugcggcccuaaaaagagcaccaaccuggugaagaacaagugcgugaacuucaauuucaacggccugaccggcaccggcgugcugaccgagagcaacaagaaguuccugcccuuccagcaguucggccgggauaucgccgacaccaccgacgcagugcgggacccccagacccuggagauccuggacaucaccccaugcagcuucggcggcgugagcgucaucacccccggcacaaacaccagcaaccagguggccgugcuguaccagggagugaacugcaccgaggugcccguggccauccacgccgaccagcugacccccaccuggcggguguacagcaccggcagcaacguguuccagacccgggccggcugccugaucggcgccgagcacgugaacaacagcuacgagugcgacauccccaucggcgcuggcaucugugccuccuaccagacccagaccaacagcccccggcgggcccggagcguggccagccagagcaucaucgccuacaccaugagccugggcgccgagaacagcguggccuacagcaacaacagcaucgcgaucccuaccaacuucaccauaagcgugaccaccgagaucuuacccgugagcaugaccaagaccagcguggacugcaccauguacaucugcggcgacagcaccgagugcagcaaccugcugcugcaguacggcagcuucugcacccagcugaaccgggcccugaccggcaucgccguggagcaggacaagaacacccaagagguguucgcccaggugaagcagaucuacaagacucccccaaucaaggacuucggcggcuucaacuucagccagauccugcccgaccccagcaagcccagcaagcggagcuucaucgaggaccugcuguucaacaaggugacccuggccgacgccggcuucaucaagcaguacggcgacugccugggggauaucgccgcucgggaccugaucugcgcccagaaguucaacggccugaccgugcugcccccucugcugaccgacgagaugaucgcccaguacaccagcgcccugcuggccggcaccaucaccagcggcuggaccuucggcgccggcgcagcccuucagauccccuucgccaugcagauggccuacagguucaacggcaucggcgugacccagaacgugcuguacgagaaccagaagcugaucgccaaccaguucaacagcgccaucggcaagauccaggacagccugagcagcaccgccagcgcccugggcaagcugcaggacguggugaaccagaacgcucaggcccugaacacccuggugaagcagcugagcagcaacuucggcgccaucagcagcgugcugaaugacauccugucacggcuggaucccccagaggccgaggugcagaucgaccggcugaucaccggccggcugcagagccugcagaccuacgugacccagcagcugauccgggccgccgagauucgggccagcgccaaccuggcagccaccaagaugagcgagugcgugcugggccagagcaagcggguggacuuuugcggcaagggcuaccaccugaugagcuucccccagagcgcuccccacggcgugguguuccugcacgugacauacguccccgcccaggagaagaacuucaccaccgcccccgccaucugccacgacggcaaggcccacuucccccgggagggaguguucgugagcaacggcacccacugguucgugacccagcggaacuucuacgagccucagaucaucaccaccgacaacaccuucgugagcggcaacugcgacguggugaucggcaucgugaacaacaccguguacgacccccuccagcccgagcuggacagcuucaaggaggagcuggacaaguacuucaagaaccacaccagcccagacguggaccugggcgacaucagcggcaucaacgccagcguggugaacauccagaaggagaucgaccggcugaacgagguggccaagaaccugaacgagagccugaucgaccugcaggagcugggcaaguacgagcaguacaucaaguggcccugguacaucuggcugggcuucaucgccggccugaucgccaucgugauggugaccaucaugcugugcugcaugaccagcuguugcagcugccugaagggcugcugcagcugcggcagcugcugcaaguucgacgaggacgacagcgagcccgugcugaagggcgugaagcugcacuacaccugaggacuaguuauaagacugacuagcccgaugggccucccaacgggcccuccuccccuccuugcaccgagagaucuaaaaaaaaaaaaaaaaaaaaaaaaaaaaaaaaaaaaaaaaaaaaaaaaaaaaaaaaaaaaaaaaaaaaaaaaaaaaaaaaaaaaaaaaaaaaaaaaaaaa

SEQ ID NO: 26009 - RNA, 4011 nt, Artificial Sequence
  SARS-CoV-2/Wuhan/WIV05/2019__EPI_ISL_402128 spike protein mRNA gc mod (1-1273)(K986P_V987P)
aggagaaagcuuaccauguucguguuucuggugcugcugccccugguguccagccagugugugaaccugaccaccagaacacagcugccuccagccuacaccaacagcuucaccagaggcguguacuaccccgacaagguguucagauccagcgugcugcacucuacccaggaccuguuccugccuuucuucagcaacgugaccugguuccacgccauccacguguccggcaccaauggcaccaagagauucgacaaccccgugcugcccuucaacgacgggguguacuuugccagcaccgagaaguccaacaucaucagaggcuggaucuucggcaccacacuggacagcaagacccagagccugcugaucgugaacaacgccaccaacguggucaucaaagugugcgaguuccaguucugcaacgaccccuuccugggcgucuacuaccacaagaacaacaagagcuggauggaaagcgaguuccggguguacagcagcgccaacaacugcaccuucgaguacgugucccagccuuuccugauggaccuggaaggcaagcagggcaacuucaagaaccugcgcgaguucguguucaagaacaucgacggcuacuucaaaaucuacagcaagcacaccccuaucaaccucgugcgggaucugccucagggcuucucugcucuggaaccccugguggaucugcccaucggcaucaacaucacccgguuucagacacugcuggcccugcacagaagcuaccugacaccuggcgauagcagcagcggauggacagcuggugccgccgcuuacuaugugggcuaccugcagccuagaaccuuccugcugaaguacaacgagaacggcaccaucaccgacgccguggauugugcucuggauccucugagcgagacaaagugcacccugaaguccuucaccguggaaaagggcaucuaccagaccagcaacuuccgggugcagcccaccgaauccaucgugcgguuccccaauaucaccaaucugugccccuucggcgagguguucaaugccaccagauucgccucuguguacgccuggaaccggaagcggaucagcaauugcguggccgacuacuccgugcuguacaacuccgccagcuucagcaccuucaagugcuacggcguguccccuaccaagcugaacgaccugugcuucacaaacguguacgccgacagcuucgugauccggggagaugaagugcggcagauugccccuggacagacaggcaagaucgccgacuacaacuacaagcugcccgacgacuucaccggcugugugauugccuggaacagcaacaaccuggacuccaaagucggcggcaacuacaauuaccuguaccggcuguuccggaaguccaaucugaagcccuucgagcgggacaucagcaccgaaaucuaucaggccggcagcaccccuugcaacggcguggaaggcuucaacugcuacuucccacugcaguccuacggcuuucagcccacaaauggcgugggcuaucagcccuacagagugguggugcugagcuucgaacugcugcaugcuccugccacagugugcggcccuaagaaaagcaccaaucucgugaagaacaaaugcgugaacuucaacuucaacggccugaccggcaccggcgugcugacagagagcaacaagaaguuccugccauuccagcaguuuggccgggauaucgccgauaccacagacgccguuagagauccccagacacuggaaauccuggacaucaccccaugcagcuucggcggagugucugugaucaccccuggcaccaacaccagcaaucagguggcagugcuguaccaggacgugaacuguaccgaagugcccguggccauucacgccgaucagcugacaccuacauggcggguguacuccaccggcagcaauguguuucagaccagagccggcugucugaucggagccgagcacgugaacaauagcuacgagugcgacauccccaucggcgcuggcaucugugccagcuaccagacacagacaaacagccccagacgggcuagaagcguggccagccagagcaucauugccuacacaaugucucugggcgccgagaacagcguggccuacuccaacaacucuaucgcuauccccaccaacuucaccaucagcgugaccaccgagauccugccuguguccaugaccaagaccagcguggacugcaccauguacaucugcggcgauuccaccgagugcuccaaccugcugcugcaguacggcagcuucugcacccagcugaauagagcccugacagggaucgccguggaacaggacaagaacacccaagagguguucgcccaagugaagcaaaucuacaagaccccuccuaucaaggacuucggcggcuucaauuucagccagauucugcccgauccuagcaagcccagcaagcggagcuucaucgaggaccugcuguucaacaaagugacacuggccgacgccggcuucaucaagcaguauggcgauugucugggcgacauugccgccagggaucugauuugcgcccagaaguuuaacggacugacagugcugccuccucugcugaccgaugagaugaucgcccaguacacaucugcccugcuggccggcacaaucacaagcggcuggacauuuggagcuggcgccgcucugcagauccccuuugcuaugcagauggccuaccgguucaacggcaucggagugacccagaaugugcuguacgagaaccagaagcugaucgccaaccaguucaacagcgccaucggcaagauccaggacagccugagcagcacagcaagcgcccugggaaagcugcaggacguggucaaccagaaugcccaggcacugaacacccuggucaagcagcuguccuccaacuucggcgccaucagcucugugcugaacgauauccugagcagacuggacccuccugaggccgaggugcagaucgacagacugaucacaggcagacugcagagccuccagacauacgugacccagcagcugaucagagccgccgagauuagagccucugccaaucuggccgccaccaagaugucugagugugugcugggccagagcaagagaguggacuuuugcggcaagggcuaccaccugaugagcuucccucagucugccccucacggcgugguguuucugcacgugacauaugugcccgcucaagagaagaauuucaccaccgcuccagccaucugccacgacggcaaagcccacuuuccuagagaaggcguguucguguccaacggcacccauugguucgugacacagcggaacuucuacgagccccagaucaucaccaccgacaacaccuucgugucuggcaacugcgacguugugaucggcauugugaacaauaccguguacgacccucugcagcccgagcuggacagcuucaaagaggaacuggacaaguacuuuaagaaccacacaagccccgacguggaccugggcgauaucagcggaaucaaugccagcgucgugaacauccagaaagagaucgaccggcugaacgagguggccaagaaucugaacgagagccugaucgaccugcaagaacuggggaaguacgagcaguacaucaaguggcccugguacaucuggcugggcuuuaucgccggacugauugccaucgugauggucacaaucaugcuguguugcaugaccagcugcuguagcugccugaagggcuguuguagcuguggcagcugcugcaaguucgacgaggacgauucugagcccgugcugaagggcgugaaacugcacuacaccugaggacuaguuauaagacugacuagcccgaugggccucccaacgggcccuccuccccuccuugcaccgagagaucuaaaaaaaaaaaaaaaaaaaaaaaaaaaaaaaaaaaaaaaaaaaaaaaaaaaaaaaaaaaaaaaaaaaaaaaaaaaaaaaaaaaaaaaaaaaaaaaaaaaa

SEQ ID NO: 26010 - RNA, 4011 nt, Artificial Sequence
  SARS-CoV-2/Wuhan/WIV05/2019__EPI_ISL_402128 spike protein mRNA gc mod (1-1273)(K986P_V987P_ D614G)
aggagaaagcuuaccauguucguguuucuggugcugcugccccugguguccagccagugugugaaccugaccaccagaacacagcugccuccagccuacaccaacagcuucaccagaggcguguacuaccccgacaagguguucagauccagcgugcugcacucuacccaggaccuguuccugccuuucuucagcaacgugaccugguuccacgccauccacguguccggcaccaauggcaccaagagauucgacaaccccgugcugcccuucaacgacgggguguacuuugccagcaccgagaaguccaacaucaucagaggcuggaucuucggcaccacacuggacagcaagacccagagccugcugaucgugaacaacgccaccaacguggucaucaaagugugcgaguuccaguucugcaacgaccccuuccugggcgucuacuaccacaagaacaacaagagcuggauggaaagcgaguuccggguguacagcagcgccaacaacugcaccuucgaguacgugucccagccuuuccugauggaccuggaaggcaagcagggcaacuucaagaaccugcgcgaguucguguucaagaacaucgacggcuacuucaaaaucuacagcaagcacaccccuaucaaccucgugcgggaucugccucagggcuucucugcucuggaaccccugguggaucugcccaucggcaucaacaucacccgguuucagacacugcuggcccugcacagaagcuaccugacaccuggcgauagcagcagcggauggacagcuggugccgccgcuuacuaugugggcuaccugcagccuagaaccuuccugcugaaguacaacgagaacggcaccaucaccgacgccguggauugugcucuggauccucugagcgagacaaagugcacccugaaguccuucaccguggaaaagggcaucuaccagaccagcaacuuccgggugcagcccaccgaauccaucgugcgguuccccaauaucaccaaucugugccccuucggcgagguguucaaugccaccagauucgccucuguguacgccuggaaccggaagcggaucagcaauugcguggccgacuacuccgugcuguacaacuccgccagcuucagcaccuucaagugcuacggcguguccccuaccaagcugaacgaccugugcuucacaaacguguacgccgacagcuucgugauccggggagaugaagugcggcagauugccccuggacagacaggcaagaucgccgacuacaacuacaagcugcccgacgacuucaccggcugugugauugccuggaacagcaacaaccuggacuccaaagucggcggcaacuacaauuaccuguaccggcuguuccggaaguccaaucugaagcccuucgagcgggacaucagcaccgaaaucuaucaggccggcagcaccccuugcaacggcguggaaggcuucaacugcuacuucccacugcaguccuacggcuuucagcccacaaauggcgugggcuaucagcccuacagagugguggugcugagcuucgaacugcugcaugcuccugccacagugugcggcccuaagaaaagcaccaaucucgugaagaacaaaugcgugaacuucaacuucaacggccugaccggcaccggcgugcugacagagagcaacaagaaguuccugccauuccagcaguuuggccgggauaucgccgauaccacagacgccguuagagauccccagacacuggaaauccuggacaucaccccaugcagcuucggcggagugucugugaucaccccuggcaccaacaccagcaaucagguggcagugcuguaccagggcgugaacuguaccgaagugcccguggccauucacgccgaucagcugacaccuacauggcggguguacuccaccggcagcaauguguuucagaccagagccggcugucugaucggagccgagcacgugaacaauagcuacgagugcgacauccccaucggcgcuggcaucugugccagcuaccagacacagacaaacagccccagacgggcuagaagcguggccagccagagcaucauugccuacacaaugucucugggcgccgagaacagcguggccuacuccaacaacucuaucgcuauccccaccaacuucaccaucagcgugaccaccgagauccugccuguguccaugaccaagaccagcguggacugcaccauguacaucugcggcgauuccaccgagugcuccaaccugcugcugcaguacggcagcuucugcacccagcugaauagagcccugacagggaucgccguggaacaggacaagaacacccaagagguguucgcccaagugaagcaaaucuacaagaccccuccuaucaaggacuucggcggcuucaauuucagccagauucugcccgauccuagcaagcccagcaagcggagcuucaucgaggaccugcuguucaacaaagugacacuggccgacgccggcuucaucaagcaguauggcgauugucugggcgacauugccgccagggaucugauuugcgcccagaaguuuaacggacugacagugcugccuccucugcugaccgaugagaugaucgcccaguacacaucugcccugcuggccggcacaaucacaagcggcuggacauuuggagcuggcgccgcucugcagauccccuuugcuaugcagauggccuaccgguucaacggcaucggagugacccagaaugugcuguacgagaaccagaagcugaucgccaaccaguucaacagcgccaucggcaagauccaggacagccugagcagcacagcaagcgcccugggaaagcugcaggacguggucaaccagaaugcccaggcacugaacacccuggucaagcagcuguccuccaacuucggcgccaucagcucugugcugaacgauauccugagcagacuggacccuccugaggccgaggugcagaucgacagacugaucacaggcagacugcagagccuccagacauacgugacccagcagcugaucagagccgccgagauuagagccucugccaaucuggccgccaccaagaugucugagugugugcugggccagagcaagagaguggacuuuugcggcaagggcuaccaccugaugagcuucccucagucugccccucacggcgugguguuucugcacgugacauaugugcccgcucaagagaagaauuucaccaccgcuccagccaucugccacgacggcaaagcccacuuuccuagagaaggcguguucguguccaacggcacccauugguucgugacacagcggaacuucuacgagccccagaucaucaccaccgacaacaccuucgugucuggcaacugcgacguugugaucggcauugugaacaauaccguguacgacccucugcagcccgagcuggacagcuucaaagaggaacuggacaaguacuuuaagaaccacacaagccccgacguggaccugggcgauaucagcggaaucaaugccagcgucgugaacauccagaaagagaucgaccggcugaacgagguggccaagaaucugaacgagagccugaucgaccugcaagaacuggggaaguacgagcaguacaucaaguggcccugguacaucuggcugggcuuuaucgccggacugauugccaucgugauggucacaaucaugcuguguugcaugaccagcugcuguagcugccugaagggcuguuguagcuguggcagcugcugcaaguucgacgaggacgauucugagcccgugcugaagggcgugaaacugcacuacaccugaggacuaguuauaagacugacuagcccgaugggccucccaacgggcccuccuccccuccuugcaccgagagaucuaaaaaaaaaaaaaaaaaaaaaaaaaaaaaaaaaaaaaaaaaaaaaaaaaaaaaaaaaaaaaaaaaaaaaaaaaaaaaaaaaaaaaaaaaaaaaaaaaaaa

SEQ ID NO: 26011 - RNA, 4011 nt, Artificial Sequence
  SARS-CoV-2/Wuhan/WIV05/2019__EPI_ISL_402128 spike protein mRNA gc mod (1-1273)(K986P_V987P_A222V_D614G)
aggagaaagcuuaccauguucguguuucuggugcugcugccccugguguccagccagugugugaaccugaccaccagaacacagcugccuccagccuacaccaacagcuucaccagaggcguguacuaccccgacaagguguucagauccagcgugcugcacucuacccaggaccuguuccugccuuucuucagcaacgugaccugguuccacgccauccacguguccggcaccaauggcaccaagagauucgacaaccccgugcugcccuucaacgacgggguguacuuugccagcaccgagaaguccaacaucaucagaggcuggaucuucggcaccacacuggacagcaagacccagagccugcugaucgugaacaacgccaccaacguggucaucaaagugugcgaguuccaguucugcaacgaccccuuccugggcgucuacuaccacaagaacaacaagagcuggauggaaagcgaguuccggguguacagcagcgccaacaacugcaccuucgaguacgugucccagccuuuccugauggaccuggaaggcaagcagggcaacuucaagaaccugcgcgaguucguguucaagaacaucgacggcuacuucaaaaucuacagcaagcacaccccuaucaaccucgugcgggaucugccucagggcuucucugugcuggaaccccugguggaucugcccaucggcaucaacaucacccgguuucagacacugcuggcccugcacagaagcuaccugacaccuggcgauagcagcagcggauggacagcuggugccgccgcuuacuaugugggcuaccugcagccuagaaccuuccugcugaaguacaacgagaacggcaccaucaccgacgccguggauugugcucuggauccucugagcgagacaaagugcacccugaaguccuucaccguggaaaagggcaucuaccagaccagcaacuuccgggugcagcccaccgaauccaucgugcgguuccccaauaucaccaaucugugccccuucggcgagguguucaaugccaccagauucgccucuguguacgccuggaaccggaagcggaucagcaauugcguggccgacuacuccgugcuguacaacuccgccagcuucagcaccuucaagugcuacggcguguccccuaccaagcugaacgaccugugcuucacaaacguguacgccgacagcuucgugauccggggagaugaagugcggcagauugccccuggacagacaggcaagaucgccgacuacaacuacaagcugcccgacgacuucaccggcugugugauugccuggaacagcaacaaccuggacuccaaagucggcggcaacuacaauuaccuguaccggcuguuccggaaguccaaucugaagcccuucgagcgggacaucagcaccgaaaucuaucaggccggcagcaccccuugcaacggcguggaaggcuucaacugcuacuucccacugcaguccuacggcuuucagcccacaaauggcgugggcuaucagcccuacagagugguggugcugagcuucgaacugcugcaugcuccugccacagugugcggcccuaagaaaagcaccaaucucgugaagaacaaaugcgugaacuucaacuucaacggccugaccggcaccggcgugcugacagagagcaacaagaaguuccugccauuccagcaguuuggccgggauaucgccgauaccacagacgccguuagagauccccagacacuggaaauccuggacaucaccccaugcagcuucggcggagugucugugaucaccccuggcaccaacaccagcaaucagguggcagugcuguaccagggcgugaacuguaccgaagugcccguggccauucacgccgaucagcugacaccuacauggcggguguacuccaccggcagcaauguguuucagaccagagccggcugucugaucggagccgagcacgugaacaauagcuacgagugcgacauccccaucggcgcuggcaucugugccagcuaccagacacagacaaacagccccagacgggcuagaagcguggccagccagagcaucauugccuacacaaugucucugggcgccgagaacagcguggccuacuccaacaacucuaucgcuauccccaccaacuucaccaucagcgugaccaccgagauccugccuguguccaugaccaagaccagcguggacugcaccauguacaucugcggcgauuccaccgagugcuccaaccugcugcugcaguacggcagcuucugcacccagcugaauagagcccugacagggaucgccguggaacaggacaagaacacccaagagguguucgcccaagugaagcaaaucuacaagaccccuccuaucaaggacuucggcggcuucaauuucagccagauucugcccgauccuagcaagcccagcaagcggagcuucaucgaggaccugcuguucaacaaagugacacuggccgacgccggcuucaucaagcaguauggcgauugucugggcgacauugccgccagggaucugauuugcgcccagaaguuuaacggacugacagugcugccuccucugcugaccgaugagaugaucgcccaguacacaucugcccugcuggccggcacaaucacaagcggcuggacauuuggagcuggcgccgcucugcagauccccuuugcuaugcagauggccuaccgguucaacggcaucggagugacccagaaugugcuguacgagaaccagaagcugaucgccaaccaguucaacagcgccaucggcaagauccaggacagccugagcagcacagcaagcgcccugggaaagcugcaggacguggucaaccagaaugcccaggcacugaacacccuggucaagcagcuguccuccaacuucggcgccaucagcucugugcugaacgauauccugagcagacuggacccuccugaggccgaggugcagaucgacagacugaucacaggcagacugcagagccuccagacauacgugacccagcagcugaucagagccgccgagauuagagccucugccaaucuggccgccaccaagaugucugagugugugcugggccagagcaagagaguggacuuuugcggcaagggcuaccaccugaugagcuucccucagucugccccucacggcgugguguuucugcacgugacauaugugcccgcucaagagaagaauuucaccaccgcuccagccaucugccacgacggcaaagcccacuuuccuagagaaggcguguucguguccaacggcacccauugguucgugacacagcggaacuucuacgagccccagaucaucaccaccgacaacaccuucgugucuggcaacugcgacguugugaucggcauugugaacaauaccguguacgacccucugcagcccgagcuggacagcuucaaagaggaacuggacaaguacuuuaagaaccacacaagccccgacguggaccugggcgauaucagcggaaucaaugccagcgucgugaacauccagaaagagaucgaccggcugaacgagguggccaagaaucugaacgagagccugaucgaccugcaagaacuggggaaguacgagcaguacaucaaguggcccugguacaucuggcugggcuuuaucgccggacugauugccaucgugauggucacaaucaugcuguguugcaugaccagcugcuguagcugccugaagggcuguuguagcuguggcagcugcugcaaguucgacgaggacgauucugagcccgugcugaagggcgugaaacugcacuacaccugaggacuaguuauaagacugacuagcccgaugggccucccaacgggcccuccuccccuccuugcaccgagagaucuaaaaaaaaaaaaaaaaaaaaaaaaaaaaaaaaaaaaaaaaaaaaaaaaaaaaaaaaaaaaaaaaaaaaaaaaaaaaaaaaaaaaaaaaaaaaaaaaaaaa

SEQ ID NO: 26012 - RNA, 4011 nt, Artificial Sequence
  SARS-CoV-2/Wuhan/WIV05/2019__EPI_ISL_402128 spike protein mRNA gc mod (1-1273)(K986P_V987P_N439K_D614G)
aggagaaagcuuaccauguucguguuucuggugcugcugccccugguguccagccagugugugaaccugaccaccagaacacagcugccuccagccuacaccaacagcuucaccagaggcguguacuaccccgacaagguguucagauccagcgugcugcacucuacccaggaccuguuccugccuuucuucagcaacgugaccugguuccacgccauccacguguccggcaccaauggcaccaagagauucgacaaccccgugcugcccuucaacgacgggguguacuuugccagcaccgagaaguccaacaucaucagaggcuggaucuucggcaccacacuggacagcaagacccagagccugcugaucgugaacaacgccaccaacguggucaucaaagugugcgaguuccaguucugcaacgaccccuuccugggcgucuacuaccacaagaacaacaagagcuggauggaaagcgaguuccggguguacagcagcgccaacaacugcaccuucgaguacgugucccagccuuuccugauggaccuggaaggcaagcagggcaacuucaagaaccugcgcgaguucguguucaagaacaucgacggcuacuucaaaaucuacagcaagcacaccccuaucaaccucgugcgggaucugccucagggcuucucugcucuggaaccccugguggaucugcccaucggcaucaacaucacccgguuucagacacugcuggcccugcacagaagcuaccugacaccuggcgauagcagcagcggauggacagcuggugccgccgcuuacuaugugggcuaccugcagccuagaaccuuccugcugaaguacaacgagaacggcaccaucaccgacgccguggauugugcucuggauccucugagcgagacaaagugcacccugaaguccuucaccguggaaaagggcaucuaccagaccagcaacuuccgggugcagcccaccgaauccaucgugcgguuccccaauaucaccaaucugugccccuucggcgagguguucaaugccaccagauucgccucuguguacgccuggaaccggaagcggaucagcaauugcguggccgacuacuccgugcuguacaacuccgccagcuucagcaccuucaagugcuacggcguguccccuaccaagcugaacgaccugugcuucacaaacguguacgccgacagcuucgugauccggggagaugaagugcggcagauugccccuggacagacaggcaagaucgccgacuacaacuacaagcugcccgacgacuucaccggcugugugauugccuggaacagcaagaaccuggacuccaaagucggcggcaacuacaauuaccuguaccggcuguuccggaaguccaaucugaagcccuucgagcgggacaucagcaccgaaaucuaucaggccggcagcaccccuugcaacggcguggaaggcuucaacugcuacuucccacugcaguccuacggcuuucagcccacaaauggcgugggcuaucagcccuacagagugguggugcugagcuucgaacugcugcaugcuccugccacagugugcggcccuaagaaaagcaccaaucucgugaagaacaaaugcgugaacuucaacuucaacggccugaccggcaccggcgugcugacagagagcaacaagaaguuccugccauuccagcaguuuggccgggauaucgccgauaccacagacgccguuagagauccccagacacuggaaauccuggacaucaccccaugcagcuucggcggagugucugugaucaccccuggcaccaacaccagcaaucagguggcagugcuguaccagggcgugaacuguaccgaagugcccguggccauucacgccgaucagcugacaccuacauggcggguguacuccaccggcagcaauguguuucagaccagagccggcugucugaucggagccgagcacgugaacaauagcuacgagugcgacauccccaucggcgcuggcaucugugccagcuaccagacacagacaaacagccccagacgggcuagaagcguggccagccagagcaucauugccuacacaaugucucugggcgccgagaacagcguggccuacuccaacaacucuaucgcuauccccaccaacuucaccaucagcgugaccaccgagauccugccuguguccaugaccaagaccagcguggacugcaccauguacaucugcggcgauuccaccgagugcuccaaccugcugcugcaguacggcagcuucugcacccagcugaauagagcccugacagggaucgccguggaacaggacaagaacacccaagagguguucgcccaagugaagcaaaucuacaagaccccuccuaucaaggacuucggcggcuucaauuucagccagauucugcccgauccuagcaagcccagcaagcggagcuucaucgaggaccugcuguucaacaaagugacacuggccgacgccggcuucaucaagcaguauggcgauugucugggcgacauugccgccagggaucugauuugcgcccagaaguuuaacggacugacagugcugccuccucugcugaccgaugagaugaucgcccaguacacaucugcccugcuggccggcacaaucacaagcggcuggacauuuggagcuggcgccgcucugcagauccccuuugcuaugcagauggccuaccgguucaacggcaucggagugacccagaaugugcuguacgagaaccagaagcugaucgccaaccaguucaacagcgccaucggcaagauccaggacagccugagcagcacagcaagcgcccugggaaagcugcaggacguggucaaccagaaugcccaggcacugaacacccuggucaagcagcuguccuccaacuucggcgccaucagcucugugcugaacgauauccugagcagacuggacccuccugaggccgaggugcagaucgacagacugaucacaggcagacugcagagccuccagacauacgugacccagcagcugaucagagccgccgagauuagagccucugccaaucuggccgccaccaagaugucugagugugugcugggccagagcaagagaguggacuuuugcggcaagggcuaccaccugaugagcuucccucagucugccccucacggcgugguguuucugcacgugacauaugugcccgcucaagagaagaauuucaccaccgcuccagccaucugccacgacggcaaagcccacuuuccuagagaaggcguguucguguccaacggcacccauugguucgugacacagcggaacuucuacgagccccagaucaucaccaccgacaacaccuucgugucuggcaacugcgacguugugaucggcauugugaacaauaccguguacgacccucugcagcccgagcuggacagcuucaaagaggaacuggacaaguacuuuaagaaccacacaagccccgacguggaccugggcgauaucagcggaaucaaugccagcgucgugaacauccagaaagagaucgaccggcugaacgagguggccaagaaucugaacgagagccugaucgaccugcaagaacuggggaaguacgagcaguacaucaaguggcccugguacaucuggcugggcuuuaucgccggacugauugccaucgugauggucacaaucaugcuguguugcaugaccagcugcuguagcugccugaagggcuguuguagcuguggcagcugcugcaaguucgacgaggacgauucugagcccgugcugaagggcgugaaacugcacuacaccugaggacuaguuauaagacugacuagcccgaugggccucccaacgggcccuccuccccuccuugcaccgagagaucuaaaaaaaaaaaaaaaaaaaaaaaaaaaaaaaaaaaaaaaaaaaaaaaaaaaaaaaaaaaaaaaaaaaaaaaaaaaaaaaaaaaaaaaaaaaaaaaaaaaa

SEQ ID NO: 26013 - RNA, 4011 nt, Artificial Sequence
  SARS-CoV-2/Wuhan/WIV05/2019__EPI_ISL_402128 spike protein mRNA gc mod (1-1273)(K986P_V987P_S477N_D614G)
aggagaaagcuuaccauguucguguuucuggugcugcugccccugguguccagccagugugugaaccugaccaccagaacacagcugccuccagccuacaccaacagcuucaccagaggcguguacuaccccgacaagguguucagauccagcgugcugcacucuacccaggaccuguuccugccuuucuucagcaacgugaccugguuccacgccauccacguguccggcaccaauggcaccaagagauucgacaaccccgugcugcccuucaacgacgggguguacuuugccagcaccgagaaguccaacaucaucagaggcuggaucuucggcaccacacuggacagcaagacccagagccugcugaucgugaacaacgccaccaacguggucaucaaagugugcgaguuccaguucugcaacgaccccuuccugggcgucuacuaccacaagaacaacaagagcuggauggaaagcgaguuccggguguacagcagcgccaacaacugcaccuucgaguacgugucccagccuuuccugauggaccuggaaggcaagcagggcaacuucaagaaccugcgcgaguucguguucaagaacaucgacggcuacuucaaaaucuacagcaagcacaccccuaucaaccucgugcgggaucugccucagggcuucucugcucuggaaccccugguggaucugcccaucggcaucaacaucacccgguuucagacacugcuggcccugcacagaagcuaccugacaccuggcgauagcagcagcggauggacagcuggugccgccgcuuacuaugugggcuaccugcagccuagaaccuuccugcugaaguacaacgagaacggcaccaucaccgacgccguggauugugcucuggauccucugagcgagacaaagugcacccugaaguccuucaccguggaaaagggcaucuaccagaccagcaacuuccgggugcagcccaccgaauccaucgugcgguuccccaauaucaccaaucugugccccuucggcgagguguucaaugccaccagauucgccucuguguacgccuggaaccggaagcggaucagcaauugcguggccgacuacuccgugcuguacaacuccgccagcuucagcaccuucaagugcuacggcguguccccuaccaagcugaacgaccugugcuucacaaacguguacgccgacagcuucgugauccggggagaugaagugcggcagauugccccuggacagacaggcaagaucgccgacuacaacuacaagcugcccgacgacuucaccggcugugugauugccuggaacagcaacaaccuggacuccaaagucggcggcaacuacaauuaccuguaccggcuguuccggaaguccaaucugaagcccuucgagcgggacaucagcaccgaaaucuaucaggccggcaacaccccuugcaacggcguggaaggcuucaacugcuacuucccacugcaguccuacggcuuucagcccacaaauggcgugggcuaucagcccuacagagugguggugcugagcuucgaacugcugcaugcuccugccacagugugcggcccuaagaaaagcaccaaucucgugaagaacaaaugcgugaacuucaacuucaacggccugaccggcaccggcgugcugacagagagcaacaagaaguuccugccauuccagcaguuuggccgggauaucgccgauaccacagacgccguuagagauccccagacacuggaaauccuggacaucaccccaugcagcuucggcggagugucugugaucaccccuggcaccaacaccagcaaucagguggcagugcuguaccagggcgugaacuguaccgaagugcccguggccauucacgccgaucagcugacaccuacauggcggguguacuccaccggcagcaauguguuucagaccagagccggcugucugaucggagccgagcacgugaacaauagcuacgagugcgacauccccaucggcgcuggcaucugugccagcuaccagacacagacaaacagccccagacgggcuagaagcguggccagccagagcaucauugccuacacaaugucucugggcgccgagaacagcguggccuacuccaacaacucuaucgcuauccccaccaacuucaccaucagcgugaccaccgagauccugccuguguccaugaccaagaccagcguggacugcaccauguacaucugcggcgauuccaccgagugcuccaaccugcugcugcaguacggcagcuucugcacccagcugaauagagcccugacagggaucgccguggaacaggacaagaacacccaagagguguucgcccaagugaagcaaaucuacaagaccccuccuaucaaggacuucggcggcuucaauuucagccagauucugcccgauccuagcaagcccagcaagcggagcuucaucgaggaccugcuguucaacaaagugacacuggccgacgccggcuucaucaagcaguauggcgauugucugggcgacauugccgccagggaucugauuugcgcccagaaguuuaacggacugacagugcugccuccucugcugaccgaugagaugaucgcccaguacacaucugcccugcuggccggcacaaucacaagcggcuggacauuuggagcuggcgccgcucugcagauccccuuugcuaugcagauggccuaccgguucaacggcaucggagugacccagaaugugcuguacgagaaccagaagcugaucgccaaccaguucaacagcgccaucggcaagauccaggacagccugagcagcacagcaagcgcccugggaaagcugcaggacguggucaaccagaaugcccaggcacugaacacccuggucaagcagcuguccuccaacuucggcgccaucagcucugugcugaacgauauccugagcagacuggacccuccugaggccgaggugcagaucgacagacugaucacaggcagacugcagagccuccagacauacgugacccagcagcugaucagagccgccgagauuagagccucugccaaucuggccgccaccaagaugucugagugugugcugggccagagcaagagaguggacuuuugcggcaagggcuaccaccugaugagcuucccucagucugccccucacggcgugguguuucugcacgugacauaugugcccgcucaagagaagaauuucaccaccgcuccagccaucugccacgacggcaaagcccacuuuccuagagaaggcguguucguguccaacggcacccauugguucgugacacagcggaacuucuacgagccccagaucaucaccaccgacaacaccuucgugucuggcaacugcgacguugugaucggcauugugaacaauaccguguacgacccucugcagcccgagcuggacagcuucaaagaggaacuggacaaguacuuuaagaaccacacaagccccgacguggaccugggcgauaucagcggaaucaaugccagcgucgugaacauccagaaagagaucgaccggcugaacgagguggccaagaaucugaacgagagccugaucgaccugcaagaacuggggaaguacgagcaguacaucaaguggcccugguacaucuggcugggcuuuaucgccggacugauugccaucgugauggucacaaucaugcuguguugcaugaccagcugcuguagcugccugaagggcuguuguagcuguggcagcugcugcaaguucgacgaggacgauucugagcccgugcugaagggcgugaaacugcacuacaccugaggacuaguuauaagacugacuagcccgaugggccucccaacgggcccuccuccccuccuugcaccgagagaucuaaaaaaaaaaaaaaaaaaaaaaaaaaaaaaaaaaaaaaaaaaaaaaaaaaaaaaaaaaaaaaaaaaaaaaaaaaaaaaaaaaaaaaaaaaaaaaaaaaaa

SEQ ID NO: 26014 - RNA, 4011 nt, Artificial Sequence
  SARS-CoV-2/Wuhan/WIV05/2019__EPI_ISL_402128 spike protein mRNA gc mod (1-1273)(K986P_V987P_N501Y_D614G)
aggagaaagcuuaccauguucguguuucuggugcugcugccccugguguccagccagugugugaaccugaccaccagaacacagcugccuccagccuacaccaacagcuucaccagaggcguguacuaccccgacaagguguucagauccagcgugcugcacucuacccaggaccuguuccugccuuucuucagcaacgugaccugguuccacgccauccacguguccggcaccaauggcaccaagagauucgacaaccccgugcugcccuucaacgacgggguguacuuugccagcaccgagaaguccaacaucaucagaggcuggaucuucggcaccacacuggacagcaagacccagagccugcugaucgugaacaacgccaccaacguggucaucaaagugugcgaguuccaguucugcaacgaccccuuccugggcgucuacuaccacaagaacaacaagagcuggauggaaagcgaguuccggguguacagcagcgccaacaacugcaccuucgaguacgugucccagccuuuccugauggaccuggaaggcaagcagggcaacuucaagaaccugcgcgaguucguguucaagaacaucgacggcuacuucaaaaucuacagcaagcacaccccuaucaaccucgugcgggaucugccucagggcuucucugcucuggaaccccugguggaucugcccaucggcaucaacaucacccgguuucagacacugcuggcccugcacagaagcuaccugacaccuggcgauagcagcagcggauggacagcuggugccgccgcuuacuaugugggcuaccugcagccuagaaccuuccugcugaaguacaacgagaacggcaccaucaccgacgccguggauugugcucuggauccucugagcgagacaaagugcacccugaaguccuucaccguggaaaagggcaucuaccagaccagcaacuuccgggugcagcccaccgaauccaucgugcgguuccccaauaucaccaaucugugccccuucggcgagguguucaaugccaccagauucgccucuguguacgccuggaaccggaagcggaucagcaauugcguggccgacuacuccgugcuguacaacuccgccagcuucagcaccuucaagugcuacggcguguccccuaccaagcugaacgaccugugcuucacaaacguguacgccgacagcuucgugauccggggagaugaagugcggcagauugccccuggacagacaggcaagaucgccgacuacaacuacaagcugcccgacgacuucaccggcugugugauugccuggaacagcaacaaccuggacuccaaagucggcggcaacuacaauuaccuguaccggcuguuccggaaguccaaucugaagcccuucgagcgggacaucagcaccgaaaucuaucaggccggcagcaccccuugcaacggcguggaaggcuucaacugcuacuucccacugcaguccuacggcuuucagcccacauacggcgugggcuaucagcccuacagagugguggugcugagcuucgaacugcugcaugcuccugccacagugugcggcccuaagaaaagcaccaaucucgugaagaacaaaugcgugaacuucaacuucaacggccugaccggcaccggcgugcugacagagagcaacaagaaguuccugccauuccagcaguuuggccgggauaucgccgauaccacagacgccguuagagauccccagacacuggaaauccuggacaucaccccaugcagcuucggcggagugucugugaucaccccuggcaccaacaccagcaaucagguggcagugcuguaccagggcgugaacuguaccgaagugcccguggccauucacgccgaucagcugacaccuacauggcggguguacuccaccggcagcaauguguuucagaccagagccggcugucugaucggagccgagcacgugaacaauagcuacgagugcgacauccccaucggcgcuggcaucugugccagcuaccagacacagacaaacagccccagacgggcuagaagcguggccagccagagcaucauugccuacacaaugucucugggcgccgagaacagcguggccuacuccaacaacucuaucgcuauccccaccaacuucaccaucagcgugaccaccgagauccugccuguguccaugaccaagaccagcguggacugcaccauguacaucugcggcgauuccaccgagugcuccaaccugcugcugcaguacggcagcuucugcacccagcugaauagagcccugacagggaucgccguggaacaggacaagaacacccaagagguguucgcccaagugaagcaaaucuacaagaccccuccuaucaaggacuucggcggcuucaauuucagccagauucugcccgauccuagcaagcccagcaagcggagcuucaucgaggaccugcuguucaacaaagugacacuggccgacgccggcuucaucaagcaguauggcgauugucugggcgacauugccgccagggaucugauuugcgcccagaaguuuaacggacugacagugcugccuccucugcugaccgaugagaugaucgcccaguacacaucugcccugcuggccggcacaaucacaagcggcuggacauuuggagcuggcgccgcucugcagauccccuuugcuaugcagauggccuaccgguucaacggcaucggagugacccagaaugugcuguacgagaaccagaagcugaucgccaaccaguucaacagcgccaucggcaagauccaggacagccugagcagcacagcaagcgcccugggaaagcugcaggacguggucaaccagaaugcccaggcacugaacacccuggucaagcagcuguccuccaacuucggcgccaucagcucugugcugaacgauauccugagcagacuggacccuccugaggccgaggugcagaucgacagacugaucacaggcagacugcagagccuccagacauacgugacccagcagcugaucagagccgccgagauuagagccucugccaaucuggccgccaccaagaugucugagugugugcugggccagagcaagagaguggacuuuugcggcaagggcuaccaccugaugagcuucccucagucugccccucacggcgugguguuucugcacgugacauaugugcccgcucaagagaagaauuucaccaccgcuccagccaucugccacgacggcaaagcccacuuuccuagagaaggcguguucguguccaacggcacccauugguucgugacacagcggaacuucuacgagccccagaucaucaccaccgacaacaccuucgugucuggcaacugcgacguugugaucggcauugugaacaauaccguguacgacccucugcagcccgagcuggacagcuucaaagaggaacuggacaaguacuuuaagaaccacacaagccccgacguggaccugggcgauaucagcggaaucaaugccagcgucgugaacauccagaaagagaucgaccggcugaacgagguggccaagaaucugaacgagagccugaucgaccugcaagaacuggggaaguacgagcaguacaucaaguggcccugguacaucuggcugggcuuuaucgccggacugauugccaucgugauggucacaaucaugcuguguugcaugaccagcugcuguagcugccugaagggcuguuguagcuguggcagcugcugcaaguucgacgaggacgauucugagcccgugcugaagggcgugaaacugcacuacaccugaggacuaguuauaagacugacuagcccgaugggccucccaacgggcccuccuccccuccuugcaccgagagaucuaaaaaaaaaaaaaaaaaaaaaaaaaaaaaaaaaaaaaaaaaaaaaaaaaaaaaaaaaaaaaaaaaaaaaaaaaaaaaaaaaaaaaaaaaaaaaaaaaaaa

SEQ ID NO: 26015 - RNA, 4005 nt, Artificial Sequence
  SARS-CoV-2/Wuhan/WIV05/2019__EPI_ISL_402128 spike protein mRNA gc mod (1-1273)(K986P_V987P_H69del_V70del_D614G)
aggagaaagcuuaccauguucguguuucuggugcugcugccccugguguccagccagugugugaaccugaccaccagaacacagcugccuccagccuacaccaacagcuucaccagaggcguguacuaccccgacaagguguucagauccagcgugcugcacucuacccaggaccuguuccugccuuucuucagcaacgugaccugguuccacgccaucuccggcaccaauggcaccaagagauucgacaaccccgugcugcccuucaacgacgggguguacuuugccagcaccgagaaguccaacaucaucagaggcuggaucuucggcaccacacuggacagcaagacccagagccugcugaucgugaacaacgccaccaacguggucaucaaagugugcgaguuccaguucugcaacgaccccuuccugggcgucuacuaccacaagaacaacaagagcuggauggaaagcgaguuccggguguacagcagcgccaacaacugcaccuucgaguacgugucccagccuuuccugauggaccuggaaggcaagcagggcaacuucaagaaccugcgcgaguucguguucaagaacaucgacggcuacuucaaaaucuacagcaagcacaccccuaucaaccucgugcgggaucugccucagggcuucucugcucuggaaccccugguggaucugcccaucggcaucaacaucacccgguuucagacacugcuggcccugcacagaagcuaccugacaccuggcgauagcagcagcggauggacagcuggugccgccgcuuacuaugugggcuaccugcagccuagaaccuuccugcugaaguacaacgagaacggcaccaucaccgacgccguggauugugcucuggauccucugagcgagacaaagugcacccugaaguccuucaccguggaaaagggcaucuaccagaccagcaacuuccgggugcagcccaccgaauccaucgugcgguuccccaauaucaccaaucugugccccuucggcgagguguucaaugccaccagauucgccucuguguacgccuggaaccggaagcggaucagcaauugcguggccgacuacuccgugcuguacaacuccgccagcuucagcaccuucaagugcuacggcguguccccuaccaagcugaacgaccugugcuucacaaacguguacgccgacagcuucgugauccggggagaugaagugcggcagauugccccuggacagacaggcaagaucgccgacuacaacuacaagcugcccgacgacuucaccggcugugugauugccuggaacagcaacaaccuggacuccaaagucggcggcaacuacaauuaccuguaccggcuguuccggaaguccaaucugaagcccuucgagcgggacaucagcaccgaaaucuaucaggccggcagcaccccuugcaacggcguggaaggcuucaacugcuacuucccacugcaguccuacggcuuucagcccacaaauggcgugggcuaucagcccuacagagugguggugcugagcuucgaacugcugcaugcuccugccacagugugcggcccuaagaaaagcaccaaucucgugaagaacaaaugcgugaacuucaacuucaacggccugaccggcaccggcgugcugacagagagcaacaagaaguuccugccauuccagcaguuuggccgggauaucgccgauaccacagacgccguuagagauccccagacacuggaaauccuggacaucaccccaugcagcuucggcggagugucugugaucaccccuggcaccaacaccagcaaucagguggcagugcuguaccagggcgugaacuguaccgaagugcccguggccauucacgccgaucagcugacaccuacauggcggguguacuccaccggcagcaauguguuucagaccagagccggcugucugaucggagccgagcacgugaacaauagcuacgagugcgacauccccaucggcgcuggcaucugugccagcuaccagacacagacaaacagccccagacgggcuagaagcguggccagccagagcaucauugccuacacaaugucucugggcgccgagaacagcguggccuacuccaacaacucuaucgcuauccccaccaacuucaccaucagcgugaccaccgagauccugccuguguccaugaccaagaccagcguggacugcaccauguacaucugcggcgauuccaccgagugcuccaaccugcugcugcaguacggcagcuucugcacccagcugaauagagcccugacagggaucgccguggaacaggacaagaacacccaagagguguucgcccaagugaagcaaaucuacaagaccccuccuaucaaggacuucggcggcuucaauuucagccagauucugcccgauccuagcaagcccagcaagcggagcuucaucgaggaccugcuguucaacaaagugacacuggccgacgccggcuucaucaagcaguauggcgauugucugggcgacauugccgccagggaucugauuugcgcccagaaguuuaacggacugacagugcugccuccucugcugaccgaugagaugaucgcccaguacacaucugcccugcuggccggcacaaucacaagcggcuggacauuuggagcuggcgccgcucugcagauccccuuugcuaugcagauggccuaccgguucaacggcaucggagugacccagaaugugcuguacgagaaccagaagcugaucgccaaccaguucaacagcgccaucggcaagauccaggacagccugagcagcacagcaagcgcccugggaaagcugcaggacguggucaaccagaaugcccaggcacugaacacccuggucaagcagcuguccuccaacuucggcgccaucagcucugugcugaacgauauccugagcagacuggacccuccugaggccgaggugcagaucgacagacugaucacaggcagacugcagagccuccagacauacgugacccagcagcugaucagagccgccgagauuagagccucugccaaucuggccgccaccaagaugucugagugugugcugggccagagcaagagaguggacuuuugcggcaagggcuaccaccugaugagcuucccucagucugccccucacggcgugguguuucugcacgugacauaugugcccgcucaagagaagaauuucaccaccgcuccagccaucugccacgacggcaaagcccacuuuccuagagaaggcguguucguguccaacggcacccauugguucgugacacagcggaacuucuacgagccccagaucaucaccaccgacaacaccuucgugucuggcaacugcgacguugugaucggcauugugaacaauaccguguacgacccucugcagcccgagcuggacagcuucaaagaggaacuggacaaguacuuuaagaaccacacaagccccgacguggaccugggcgauaucagcggaaucaaugccagcgucgugaacauccagaaagagaucgaccggcugaacgagguggccaagaaucugaacgagagccugaucgaccugcaagaacuggggaaguacgagcaguacaucaaguggcccugguacaucuggcugggcuuuaucgccggacugauugccaucgugauggucacaaucaugcuguguugcaugaccagcugcuguagcugccugaagggcuguuguagcuguggcagcugcugcaaguucgacgaggacgauucugagcccgugcugaagggcgugaaacugcacuacaccugaggacuaguuauaagacugacuagcccgaugggccucccaacgggcccuccuccccuccuugcaccgagagaucuaaaaaaaaaaaaaaaaaaaaaaaaaaaaaaaaaaaaaaaaaaaaaaaaaaaaaaaaaaaaaaaaaaaaaaaaaaaaaaaaaaaaaaaaaaaaaaaaaaaa

SEQ ID NO: 26016 - RNA, 4011 nt, Artificial Sequence
  SARS-CoV-2/Wuhan/WIV05/2019__EPI_ISL_402128 spike protein mRNA gc mod (1-1273)(K986P_V987P_Y453F_D614G)
aggagaaagcuuaccauguucguguuucuggugcugcugccccugguguccagccagugugugaaccugaccaccagaacacagcugccuccagccuacaccaacagcuucaccagaggcguguacuaccccgacaagguguucagauccagcgugcugcacucuacccaggaccuguuccugccuuucuucagcaacgugaccugguuccacgccauccacguguccggcaccaauggcaccaagagauucgacaaccccgugcugcccuucaacgacgggguguacuuugccagcaccgagaaguccaacaucaucagaggcuggaucuucggcaccacacuggacagcaagacccagagccugcugaucgugaacaacgccaccaacguggucaucaaagugugcgaguuccaguucugcaacgaccccuuccugggcgucuacuaccacaagaacaacaagagcuggauggaaagcgaguuccggguguacagcagcgccaacaacugcaccuucgaguacgugucccagccuuuccugauggaccuggaaggcaagcagggcaacuucaagaaccugcgcgaguucguguucaagaacaucgacggcuacuucaaaaucuacagcaagcacaccccuaucaaccucgugcgggaucugccucagggcuucucugcucuggaaccccugguggaucugcccaucggcaucaacaucacccgguuucagacacugcuggcccugcacagaagcuaccugacaccuggcgauagcagcagcggauggacagcuggugccgccgcuuacuaugugggcuaccugcagccuagaaccuuccugcugaaguacaacgagaacggcaccaucaccgacgccguggauugugcucuggauccucugagcgagacaaagugcacccugaaguccuucaccguggaaaagggcaucuaccagaccagcaacuuccgggugcagcccaccgaauccaucgugcgguuccccaauaucaccaaucugugccccuucggcgagguguucaaugccaccagauucgccucuguguacgccuggaaccggaagcggaucagcaauugcguggccgacuacuccgugcuguacaacuccgccagcuucagcaccuucaagugcuacggcguguccccuaccaagcugaacgaccugugcuucacaaacguguacgccgacagcuucgugauccggggagaugaagugcggcagauugccccuggacagacaggcaagaucgccgacuacaacuacaagcugcccgacgacuucaccggcugugugauugccuggaacagcaacaaccuggacuccaaagucggcggcaacuacaauuaccuguuccggcuguuccggaaguccaaucugaagcccuucgagcgggacaucagcaccgaaaucuaucaggccggcagcaccccuugcaacggcguggaaggcuucaacugcuacuucccacugcaguccuacggcuuucagcccacaaauggcgugggcuaucagcccuacagagugguggugcugagcuucgaacugcugcaugcuccugccacagugugcggcccuaagaaaagcaccaaucucgugaagaacaaaugcgugaacuucaacuucaacggccugaccggcaccggcgugcugacagagagcaacaagaaguuccugccauuccagcaguuuggccgggauaucgccgauaccacagacgccguuagagauccccagacacuggaaauccuggacaucaccccaugcagcuucggcggagugucugugaucaccccuggcaccaacaccagcaaucagguggcagugcuguaccagggcgugaacuguaccgaagugcccguggccauucacgccgaucagcugacaccuacauggcggguguacuccaccggcagcaauguguuucagaccagagccggcugucugaucggagccgagcacgugaacaauagcuacgagugcgacauccccaucggcgcuggcaucugugccagcuaccagacacagacaaacagccccagacgggcuagaagcguggccagccagagcaucauugccuacacaaugucucugggcgccgagaacagcguggccuacuccaacaacucuaucgcuauccccaccaacuucaccaucagcgugaccaccgagauccugccuguguccaugaccaagaccagcguggacugcaccauguacaucugcggcgauuccaccgagugcuccaaccugcugcugcaguacggcagcuucugcacccagcugaauagagcccugacagggaucgccguggaacaggacaagaacacccaagagguguucgcccaagugaagcaaaucuacaagaccccuccuaucaaggacuucggcggcuucaauuucagccagauucugcccgauccuagcaagcccagcaagcggagcuucaucgaggaccugcuguucaacaaagugacacuggccgacgccggcuucaucaagcaguauggcgauugucugggcgacauugccgccagggaucugauuugcgcccagaaguuuaacggacugacagugcugccuccucugcugaccgaugagaugaucgcccaguacacaucugcccugcuggccggcacaaucacaagcggcuggacauuuggagcuggcgccgcucugcagauccccuuugcuaugcagauggccuaccgguucaacggcaucggagugacccagaaugugcuguacgagaaccagaagcugaucgccaaccaguucaacagcgccaucggcaagauccaggacagccugagcagcacagcaagcgcccugggaaagcugcaggacguggucaaccagaaugcccaggcacugaacacccuggucaagcagcuguccuccaacuucggcgccaucagcucugugcugaacgauauccugagcagacuggacccuccugaggccgaggugcagaucgacagacugaucacaggcagacugcagagccuccagacauacgugacccagcagcugaucagagccgccgagauuagagccucugccaaucuggccgccaccaagaugucugagugugugcugggccagagcaagagaguggacuuuugcggcaagggcuaccaccugaugagcuucccucagucugccccucacggcgugguguuucugcacgugacauaugugcccgcucaagagaagaauuucaccaccgcuccagccaucugccacgacggcaaagcccacuuuccuagagaaggcguguucguguccaacggcacccauugguucgugacacagcggaacuucuacgagccccagaucaucaccaccgacaacaccuucgugucuggcaacugcgacguugugaucggcauugugaacaauaccguguacgacccucugcagcccgagcuggacagcuucaaagaggaacuggacaaguacuuuaagaaccacacaagccccgacguggaccugggcgauaucagcggaaucaaugccagcgucgugaacauccagaaagagaucgaccggcugaacgagguggccaagaaucugaacgagagccugaucgaccugcaagaacuggggaaguacgagcaguacaucaaguggcccugguacaucuggcugggcuuuaucgccggacugauugccaucgugauggucacaaucaugcuguguugcaugaccagcugcuguagcugccugaagggcuguuguagcuguggcagcugcugcaaguucgacgaggacgauucugagcccgugcugaagggcgugaaacugcacuacaccugaggacuaguuauaagacugacuagcccgaugggccucccaacgggcccuccuccccuccuugcaccgagagaucuaaaaaaaaaaaaaaaaaaaaaaaaaaaaaaaaaaaaaaaaaaaaaaaaaaaaaaaaaaaaaaaaaaaaaaaaaaaaaaaaaaaaaaaaaaaaaaaaaaaa

SEQ ID NO: 26017 - RNA, 4011 nt, Artificial Sequence
  SARS-CoV-2/Wuhan/WIV05/2019__EPI_ISL_402128 spike protein mRNA gc mod (1-1273)(K986P_V987P_D614G_I692V)
aggagaaagcuuaccauguucguguuucuggugcugcugccccugguguccagccagugugugaaccugaccaccagaacacagcugccuccagccuacaccaacagcuucaccagaggcguguacuaccccgacaagguguucagauccagcgugcugcacucuacccaggaccuguuccugccuuucuucagcaacgugaccugguuccacgccauccacguguccggcaccaauggcaccaagagauucgacaaccccgugcugcccuucaacgacgggguguacuuugccagcaccgagaaguccaacaucaucagaggcuggaucuucggcaccacacuggacagcaagacccagagccugcugaucgugaacaacgccaccaacguggucaucaaagugugcgaguuccaguucugcaacgaccccuuccugggcgucuacuaccacaagaacaacaagagcuggauggaaagcgaguuccggguguacagcagcgccaacaacugcaccuucgaguacgugucccagccuuuccugauggaccuggaaggcaagcagggcaacuucaagaaccugcgcgaguucguguucaagaacaucgacggcuacuucaaaaucuacagcaagcacaccccuaucaaccucgugcgggaucugccucagggcuucucugcucuggaaccccugguggaucugcccaucggcaucaacaucacccgguuucagacacugcuggcccugcacagaagcuaccugacaccuggcgauagcagcagcggauggacagcuggugccgccgcuuacuaugugggcuaccugcagccuagaaccuuccugcugaaguacaacgagaacggcaccaucaccgacgccguggauugugcucuggauccucugagcgagacaaagugcacccugaaguccuucaccguggaaaagggcaucuaccagaccagcaacuuccgggugcagcccaccgaauccaucgugcgguuccccaauaucaccaaucugugccccuucggcgagguguucaaugccaccagauucgccucuguguacgccuggaaccggaagcggaucagcaauugcguggccgacuacuccgugcuguacaacuccgccagcuucagcaccuucaagugcuacggcguguccccuaccaagcugaacgaccugugcuucacaaacguguacgccgacagcuucgugauccggggagaugaagugcggcagauugccccuggacagacaggcaagaucgccgacuacaacuacaagcugcccgacgacuucaccggcugugugauugccuggaacagcaacaaccuggacuccaaagucggcggcaacuacaauuaccuguaccggcuguuccggaaguccaaucugaagcccuucgagcgggacaucagcaccgaaaucuaucaggccggcagcaccccuugcaacggcguggaaggcuucaacugcuacuucccacugcaguccuacggcuuucagcccacaaauggcgugggcuaucagcccuacagagugguggugcugagcuucgaacugcugcaugcuccugccacagugugcggcccuaagaaaagcaccaaucucgugaagaacaaaugcgugaacuucaacuucaacggccugaccggcaccggcgugcugacagagagcaacaagaaguuccugccauuccagcaguuuggccgggauaucgccgauaccacagacgccguuagagauccccagacacuggaaauccuggacaucaccccaugcagcuucggcggagugucugugaucaccccuggcaccaacaccagcaaucagguggcagugcuguaccagggcgugaacuguaccgaagugcccguggccauucacgccgaucagcugacaccuacauggcggguguacuccaccggcagcaauguguuucagaccagagccggcugucugaucggagccgagcacgugaacaauagcuacgagugcgacauccccaucggcgcuggcaucugugccagcuaccagacacagacaaacagccccagacgggcuagaagcguggccagccagagcgugauugccuacacaaugucucugggcgccgagaacagcguggccuacuccaacaacucuaucgcuauccccaccaacuucaccaucagcgugaccaccgagauccugccuguguccaugaccaagaccagcguggacugcaccauguacaucugcggcgauuccaccgagugcuccaaccugcugcugcaguacggcagcuucugcacccagcugaauagagcccugacagggaucgccguggaacaggacaagaacacccaagagguguucgcccaagugaagcaaaucuacaagaccccuccuaucaaggacuucggcggcuucaauuucagccagauucugcccgauccuagcaagcccagcaagcggagcuucaucgaggaccugcuguucaacaaagugacacuggccgacgccggcuucaucaagcaguauggcgauugucugggcgacauugccgccagggaucugauuugcgcccagaaguuuaacggacugacagugcugccuccucugcugaccgaugagaugaucgcccaguacacaucugcccugcuggccggcacaaucacaagcggcuggacauuuggagcuggcgccgcucugcagauccccuuugcuaugcagauggccuaccgguucaacggcaucggagugacccagaaugugcuguacgagaaccagaagcugaucgccaaccaguucaacagcgccaucggcaagauccaggacagccugagcagcacagcaagcgcccugggaaagcugcaggacguggucaaccagaaugcccaggcacugaacacccuggucaagcagcuguccuccaacuucggcgccaucagcucugugcugaacgauauccugagcagacuggacccuccugaggccgaggugcagaucgacagacugaucacaggcagacugcagagccuccagacauacgugacccagcagcugaucagagccgccgagauuagagccucugccaaucuggccgccaccaagaugucugagugugugcugggccagagcaagagaguggacuuuugcggcaagggcuaccaccugaugagcuucccucagucugccccucacggcgugguguuucugcacgugacauaugugcccgcucaagagaagaauuucaccaccgcuccagccaucugccacgacggcaaagcccacuuuccuagagaaggcguguucguguccaacggcacccauugguucgugacacagcggaacuucuacgagccccagaucaucaccaccgacaacaccuucgugucuggcaacugcgacguugugaucggcauugugaacaauaccguguacgacccucugcagcccgagcuggacagcuucaaagaggaacuggacaaguacuuuaagaaccacacaagccccgacguggaccugggcgauaucagcggaaucaaugccagcgucgugaacauccagaaagagaucgaccggcugaacgagguggccaagaaucugaacgagagccugaucgaccugcaagaacuggggaaguacgagcaguacaucaaguggcccugguacaucuggcugggcuuuaucgccggacugauugccaucgugauggucacaaucaugcuguguugcaugaccagcugcuguagcugccugaagggcuguuguagcuguggcagcugcugcaaguucgacgaggacgauucugagcccgugcugaagggcgugaaacugcacuacaccugaggacuaguuauaagacugacuagcccgaugggccucccaacgggcccuccuccccuccuugcaccgagagaucuaaaaaaaaaaaaaaaaaaaaaaaaaaaaaaaaaaaaaaaaaaaaaaaaaaaaaaaaaaaaaaaaaaaaaaaaaaaaaaaaaaaaaaaaaaaaaaaaaaaa

SEQ ID NO: 26018 - RNA, 4011 nt, Artificial Sequence
  SARS-CoV-2/Wuhan/WIV05/2019__EPI_ISL_402128 spike protein mRNA gc mod (1-1273)(K986P_V987P_D614G_M1229I)
aggagaaagcuuaccauguucguguuucuggugcugcugccccugguguccagccagugugugaaccugaccaccagaacacagcugccuccagccuacaccaacagcuucaccagaggcguguacuaccccgacaagguguucagauccagcgugcugcacucuacccaggaccuguuccugccuuucuucagcaacgugaccugguuccacgccauccacguguccggcaccaauggcaccaagagauucgacaaccccgugcugcccuucaacgacgggguguacuuugccagcaccgagaaguccaacaucaucagaggcuggaucuucggcaccacacuggacagcaagacccagagccugcugaucgugaacaacgccaccaacguggucaucaaagugugcgaguuccaguucugcaacgaccccuuccugggcgucuacuaccacaagaacaacaagagcuggauggaaagcgaguuccggguguacagcagcgccaacaacugcaccuucgaguacgugucccagccuuuccugauggaccuggaaggcaagcagggcaacuucaagaaccugcgcgaguucguguucaagaacaucgacggcuacuucaaaaucuacagcaagcacaccccuaucaaccucgugcgggaucugccucagggcuucucugcucuggaaccccugguggaucugcccaucggcaucaacaucacccgguuucagacacugcuggcccugcacagaagcuaccugacaccuggcgauagcagcagcggauggacagcuggugccgccgcuuacuaugugggcuaccugcagccuagaaccuuccugcugaaguacaacgagaacggcaccaucaccgacgccguggauugugcucuggauccucugagcgagacaaagugcacccugaaguccuucaccguggaaaagggcaucuaccagaccagcaacuuccgggugcagcccaccgaauccaucgugcgguuccccaauaucaccaaucugugccccuucggcgagguguucaaugccaccagauucgccucuguguacgccuggaaccggaagcggaucagcaauugcguggccgacuacuccgugcuguacaacuccgccagcuucagcaccuucaagugcuacggcguguccccuaccaagcugaacgaccugugcuucacaaacguguacgccgacagcuucgugauccggggagaugaagugcggcagauugccccuggacagacaggcaagaucgccgacuacaacuacaagcugcccgacgacuucaccggcugugugauugccuggaacagcaacaaccuggacuccaaagucggcggcaacuacaauuaccuguaccggcuguuccggaaguccaaucugaagcccuucgagcgggacaucagcaccgaaaucuaucaggccggcagcaccccuugcaacggcguggaaggcuucaacugcuacuucccacugcaguccuacggcuuucagcccacaaauggcgugggcuaucagcccuacagagugguggugcugagcuucgaacugcugcaugcuccugccacagugugcggcccuaagaaaagcaccaaucucgugaagaacaaaugcgugaacuucaacuucaacggccugaccggcaccggcgugcugacagagagcaacaagaaguuccugccauuccagcaguuuggccgggauaucgccgauaccacagacgccguuagagauccccagacacuggaaauccuggacaucaccccaugcagcuucggcggagugucugugaucaccccuggcaccaacaccagcaaucagguggcagugcuguaccagggcgugaacuguaccgaagugcccguggccauucacgccgaucagcugacaccuacauggcggguguacuccaccggcagcaauguguuucagaccagagccggcugucugaucggagccgagcacgugaacaauagcuacgagugcgacauccccaucggcgcuggcaucugugccagcuaccagacacagacaaacagccccagacgggcuagaagcguggccagccagagcaucauugccuacacaaugucucugggcgccgagaacagcguggccuacuccaacaacucuaucgcuauccccaccaacuucaccaucagcgugaccaccgagauccugccuguguccaugaccaagaccagcguggacugcaccauguacaucugcggcgauuccaccgagugcuccaaccugcugcugcaguacggcagcuucugcacccagcugaauagagcccugacagggaucgccguggaacaggacaagaacacccaagagguguucgcccaagugaagcaaaucuacaagaccccuccuaucaaggacuucggcggcuucaauuucagccagauucugcccgauccuagcaagcccagcaagcggagcuucaucgaggaccugcuguucaacaaagugacacuggccgacgccggcuucaucaagcaguauggcgauugucugggcgacauugccgccagggaucugauuugcgcccagaaguuuaacggacugacagugcugccuccucugcugaccgaugagaugaucgcccaguacacaucugcccugcuggccggcacaaucacaagcggcuggacauuuggagcuggcgccgcucugcagauccccuuugcuaugcagauggccuaccgguucaacggcaucggagugacccagaaugugcuguacgagaaccagaagcugaucgccaaccaguucaacagcgccaucggcaagauccaggacagccugagcagcacagcaagcgcccugggaaagcugcaggacguggucaaccagaaugcccaggcacugaacacccuggucaagcagcuguccuccaacuucggcgccaucagcucugugcugaacgauauccugagcagacuggacccuccugaggccgaggugcagaucgacagacugaucacaggcagacugcagagccuccagacauacgugacccagcagcugaucagagccgccgagauuagagccucugccaaucuggccgccaccaagaugucugagugugugcugggccagagcaagagaguggacuuuugcggcaagggcuaccaccugaugagcuucccucagucugccccucacggcgugguguuucugcacgugacauaugugcccgcucaagagaagaauuucaccaccgcuccagccaucugccacgacggcaaagcccacuuuccuagagaaggcguguucguguccaacggcacccauugguucgugacacagcggaacuucuacgagccccagaucaucaccaccgacaacaccuucgugucuggcaacugcgacguugugaucggcauugugaacaauaccguguacgacccucugcagcccgagcuggacagcuucaaagaggaacuggacaaguacuuuaagaaccacacaagccccgacguggaccugggcgauaucagcggaaucaaugccagcgucgugaacauccagaaagagaucgaccggcugaacgagguggccaagaaucugaacgagagccugaucgaccugcaagaacuggggaaguacgagcaguacaucaaguggcccugguacaucuggcugggcuuuaucgccggacugauugccaucgugaucgucacaaucaugcuguguugcaugaccagcugcuguagcugccugaagggcuguuguagcuguggcagcugcugcaaguucgacgaggacgauucugagcccgugcugaagggcgugaaacugcacuacaccugaggacuaguuauaagacugacuagcccgaugggccucccaacgggcccuccuccccuccuugcaccgagagaucuaaaaaaaaaaaaaaaaaaaaaaaaaaaaaaaaaaaaaaaaaaaaaaaaaaaaaaaaaaaaaaaaaaaaaaaaaaaaaaaaaaaaaaaaaaaaaaaaaaaa

SEQ ID NO: 26019 - RNA, 4005 nt, Artificial Sequence
  SARS-CoV-2/Wuhan/WIV05/2019__EPI_ISL_402128 spike protein mRNA gc mod (1-1273)(K986P_V987P_H69del_V70del_A222V_Y453F_S477N_D614G_I692V)
aggagaaagcuuaccauguucguguuucuggugcugcugccccugguguccagccagugugugaaccugaccaccagaacacagcugccuccagccuacaccaacagcuucaccagaggcguguacuaccccgacaagguguucagauccagcgugcugcacucuacccaggaccuguuccugccuuucuucagcaacgugaccugguuccacgccaucuccggcaccaauggcaccaagagauucgacaaccccgugcugcccuucaacgacgggguguacuuugccagcaccgagaaguccaacaucaucagaggcuggaucuucggcaccacacuggacagcaagacccagagccugcugaucgugaacaacgccaccaacguggucaucaaagugugcgaguuccaguucugcaacgaccccuuccugggcgucuacuaccacaagaacaacaagagcuggauggaaagcgaguuccggguguacagcagcgccaacaacugcaccuucgaguacgugucccagccuuuccugauggaccuggaaggcaagcagggcaacuucaagaaccugcgcgaguucguguucaagaacaucgacggcuacuucaaaaucuacagcaagcacaccccuaucaaccucgugcgggaucugccucagggcuucucugugcuggaaccccugguggaucugcccaucggcaucaacaucacccgguuucagacacugcuggcccugcacagaagcuaccugacaccuggcgauagcagcagcggauggacagcuggugccgccgcuuacuaugugggcuaccugcagccuagaaccuuccugcugaaguacaacgagaacggcaccaucaccgacgccguggauugugcucuggauccucugagcgagacaaagugcacccugaaguccuucaccguggaaaagggcaucuaccagaccagcaacuuccgggugcagcccaccgaauccaucgugcgguuccccaauaucaccaaucugugccccuucggcgagguguucaaugccaccagauucgccucuguguacgccuggaaccggaagcggaucagcaauugcguggccgacuacuccgugcuguacaacuccgccagcuucagcaccuucaagugcuacggcguguccccuaccaagcugaacgaccugugcuucacaaacguguacgccgacagcuucgugauccggggagaugaagugcggcagauugccccuggacagacaggcaagaucgccgacuacaacuacaagcugcccgacgacuucaccggcugugugauugccuggaacagcaacaaccuggacuccaaagucggcggcaacuacaauuaccuguuccggcuguuccggaaguccaaucugaagcccuucgagcgggacaucagcaccgaaaucuaucaggccggcaacaccccuugcaacggcguggaaggcuucaacugcuacuucccacugcaguccuacggcuuucagcccacaaauggcgugggcuaucagcccuacagagugguggugcugagcuucgaacugcugcaugcuccugccacagugugcggcccuaagaaaagcaccaaucucgugaagaacaaaugcgugaacuucaacuucaacggccugaccggcaccggcgugcugacagagagcaacaagaaguuccugccauuccagcaguuuggccgggauaucgccgauaccacagacgccguuagagauccccagacacuggaaauccuggacaucaccccaugcagcuucggcggagugucugugaucaccccuggcaccaacaccagcaaucagguggcagugcuguaccagggcgugaacuguaccgaagugcccguggccauucacgccgaucagcugacaccuacauggcggguguacuccaccggcagcaauguguuucagaccagagccggcugucugaucggagccgagcacgugaacaauagcuacgagugcgacauccccaucggcgcuggcaucugugccagcuaccagacacagacaaacagccccagacgggcuagaagcguggccagccagagcgugauugccuacacaaugucucugggcgccgagaacagcguggccuacuccaacaacucuaucgcuauccccaccaacuucaccaucagcgugaccaccgagauccugccuguguccaugaccaagaccagcguggacugcaccauguacaucugcggcgauuccaccgagugcuccaaccugcugcugcaguacggcagcuucugcacccagcugaauagagcccugacagggaucgccguggaacaggacaagaacacccaagagguguucgcccaagugaagcaaaucuacaagaccccuccuaucaaggacuucggcggcuucaauuucagccagauucugcccgauccuagcaagcccagcaagcggagcuucaucgaggaccugcuguucaacaaagugacacuggccgacgccggcuucaucaagcaguauggcgauugucugggcgacauugccgccagggaucugauuugcgcccagaaguuuaacggacugacagugcugccuccucugcugaccgaugagaugaucgcccaguacacaucugcccugcuggccggcacaaucacaagcggcuggacauuuggagcuggcgccgcucugcagauccccuuugcuaugcagauggccuaccgguucaacggcaucggagugacccagaaugugcuguacgagaaccagaagcugaucgccaaccaguucaacagcgccaucggcaagauccaggacagccugagcagcacagcaagcgcccugggaaagcugcaggacguggucaaccagaaugcccaggcacugaacacccuggucaagcagcuguccuccaacuucggcgccaucagcucugugcugaacgauauccugagcagacuggacccuccugaggccgaggugcagaucgacagacugaucacaggcagacugcagagccuccagacauacgugacccagcagcugaucagagccgccgagauuagagccucugccaaucuggccgccaccaagaugucugagugugugcugggccagagcaagagaguggacuuuugcggcaagggcuaccaccugaugagcuucccucagucugccccucacggcgugguguuucugcacgugacauaugugcccgcucaagagaagaauuucaccaccgcuccagccaucugccacgacggcaaagcccacuuuccuagagaaggcguguucguguccaacggcacccauugguucgugacacagcggaacuucuacgagccccagaucaucaccaccgacaacaccuucgugucuggcaacugcgacguugugaucggcauugugaacaauaccguguacgacccucugcagcccgagcuggacagcuucaaagaggaacuggacaaguacuuuaagaaccacacaagccccgacguggaccugggcgauaucagcggaaucaaugccagcgucgugaacauccagaaagagaucgaccggcugaacgagguggccaagaaucugaacgagagccugaucgaccugcaagaacuggggaaguacgagcaguacaucaaguggcccugguacaucuggcugggcuuuaucgccggacugauugccaucgugauggucacaaucaugcuguguugcaugaccagcugcuguagcugccugaagggcuguuguagcuguggcagcugcugcaaguucgacgaggacgauucugagcccgugcugaagggcgugaaacugcacuacaccugaggacuaguuauaagacugacuagcccgaugggccucccaacgggcccuccuccccuccuugcaccgagagaucuaaaaaaaaaaaaaaaaaaaaaaaaaaaaaaaaaaaaaaaaaaaaaaaaaaaaaaaaaaaaaaaaaaaaaaaaaaaaaaaaaaaaaaaaaaaaaaaaaaaa

SEQ ID NO: 26020 - RNA, 4005 nt, Artificial Sequence
  SARS-CoV-2/Wuhan/WIV05/2019__EPI_ISL_402128 spike protein mRNA gc mod (1-1273)(K986P_V987P_H69del_V70del_Y453F_D614G_I692V_M1229I)
aggagaaagcuuaccauguucguguuucuggugcugcugccccugguguccagccagugugugaaccugaccaccagaacacagcugccuccagccuacaccaacagcuucaccagaggcguguacuaccccgacaagguguucagauccagcgugcugcacucuacccaggaccuguuccugccuuucuucagcaacgugaccugguuccacgccaucuccggcaccaauggcaccaagagauucgacaaccccgugcugcccuucaacgacgggguguacuuugccagcaccgagaaguccaacaucaucagaggcuggaucuucggcaccacacuggacagcaagacccagagccugcugaucgugaacaacgccaccaacguggucaucaaagugugcgaguuccaguucugcaacgaccccuuccugggcgucuacuaccacaagaacaacaagagcuggauggaaagcgaguuccggguguacagcagcgccaacaacugcaccuucgaguacgugucccagccuuuccugauggaccuggaaggcaagcagggcaacuucaagaaccugcgcgaguucguguucaagaacaucgacggcuacuucaaaaucuacagcaagcacaccccuaucaaccucgugcgggaucugccucagggcuucucugcucuggaaccccugguggaucugcccaucggcaucaacaucacccgguuucagacacugcuggcccugcacagaagcuaccugacaccuggcgauagcagcagcggauggacagcuggugccgccgcuuacuaugugggcuaccugcagccuagaaccuuccugcugaaguacaacgagaacggcaccaucaccgacgccguggauugugcucuggauccucugagcgagacaaagugcacccugaaguccuucaccguggaaaagggcaucuaccagaccagcaacuuccgggugcagcccaccgaauccaucgugcgguuccccaauaucaccaaucugugccccuucggcgagguguucaaugccaccagauucgccucuguguacgccuggaaccggaagcggaucagcaauugcguggccgacuacuccgugcuguacaacuccgccagcuucagcaccuucaagugcuacggcguguccccuaccaagcugaacgaccugugcuucacaaacguguacgccgacagcuucgugauccggggagaugaagugcggcagauugccccuggacagacaggcaagaucgccgacuacaacuacaagcugcccgacgacuucaccggcugugugauugccuggaacagcaacaaccuggacuccaaagucggcggcaacuacaauuaccuguuccggcuguuccggaaguccaaucugaagcccuucgagcgggacaucagcaccgaaaucuaucaggccggcagcaccccuugcaacggcguggaaggcuucaacugcuacuucccacugcaguccuacggcuuucagcccacaaauggcgugggcuaucagcccuacagagugguggugcugagcuucgaacugcugcaugcuccugccacagugugcggcccuaagaaaagcaccaaucucgugaagaacaaaugcgugaacuucaacuucaacggccugaccggcaccggcgugcugacagagagcaacaagaaguuccugccauuccagcaguuuggccgggauaucgccgauaccacagacgccguuagagauccccagacacuggaaauccuggacaucaccccaugcagcuucggcggagugucugugaucaccccuggcaccaacaccagcaaucagguggcagugcuguaccagggcgugaacuguaccgaagugcccguggccauucacgccgaucagcugacaccuacauggcggguguacuccaccggcagcaauguguuucagaccagagccggcugucugaucggagccgagcacgugaacaauagcuacgagugcgacauccccaucggcgcuggcaucugugccagcuaccagacacagacaaacagccccagacgggcuagaagcguggccagccagagcgugauugccuacacaaugucucugggcgccgagaacagcguggccuacuccaacaacucuaucgcuauccccaccaacuucaccaucagcgugaccaccgagauccugccuguguccaugaccaagaccagcguggacugcaccauguacaucugcggcgauuccaccgagugcuccaaccugcugcugcaguacggcagcuucugcacccagcugaauagagcccugacagggaucgccguggaacaggacaagaacacccaagagguguucgcccaagugaagcaaaucuacaagaccccuccuaucaaggacuucggcggcuucaauuucagccagauucugcccgauccuagcaagcccagcaagcggagcuucaucgaggaccugcuguucaacaaagugacacuggccgacgccggcuucaucaagcaguauggcgauugucugggcgacauugccgccagggaucugauuugcgcccagaaguuuaacggacugacagugcugccuccucugcugaccgaugagaugaucgcccaguacacaucugcccugcuggccggcacaaucacaagcggcuggacauuuggagcuggcgccgcucugcagauccccuuugcuaugcagauggccuaccgguucaacggcaucggagugacccagaaugugcuguacgagaaccagaagcugaucgccaaccaguucaacagcgccaucggcaagauccaggacagccugagcagcacagcaagcgcccugggaaagcugcaggacguggucaaccagaaugcccaggcacugaacacccuggucaagcagcuguccuccaacuucggcgccaucagcucugugcugaacgauauccugagcagacuggacccuccugaggccgaggugcagaucgacagacugaucacaggcagacugcagagccuccagacauacgugacccagcagcugaucagagccgccgagauuagagccucugccaaucuggccgccaccaagaugucugagugugugcugggccagagcaagagaguggacuuuugcggcaagggcuaccaccugaugagcuucccucagucugccccucacggcgugguguuucugcacgugacauaugugcccgcucaagagaagaauuucaccaccgcuccagccaucugccacgacggcaaagcccacuuuccuagagaaggcguguucguguccaacggcacccauugguucgugacacagcggaacuucuacgagccccagaucaucaccaccgacaacaccuucgugucuggcaacugcgacguugugaucggcauugugaacaauaccguguacgacccucugcagcccgagcuggacagcuucaaagaggaacuggacaaguacuuuaagaaccacacaagccccgacguggaccugggcgauaucagcggaaucaaugccagcgucgugaacauccagaaagagaucgaccggcugaacgagguggccaagaaucugaacgagagccugaucgaccugcaagaacuggggaaguacgagcaguacaucaaguggcccugguacaucuggcugggcuuuaucgccggacugauugccaucgugaucgucacaaucaugcuguguugcaugaccagcugcuguagcugccugaagggcuguuguagcuguggcagcugcugcaaguucgacgaggacgauucugagcccgugcugaagggcgugaaacugcacuacaccugaggacuaguuauaagacugacuagcccgaugggccucccaacgggcccuccuccccuccuugcaccgagagaucuaaaaaaaaaaaaaaaaaaaaaaaaaaaaaaaaaaaaaaaaaaaaaaaaaaaaaaaaaaaaaaaaaaaaaaaaaaaaaaaaaaaaaaaaaaaaaaaaaaaa

SEQ ID NO: 26021 - RNA, 4002 nt, Artificial Sequence
  SARS-CoV-2/Wuhan/WIV05/2019__EPI_ISL_402128 spike protein mRNA gc mod (1-1273)(K986P_V987P_K986P_V987P_H69del_V70del_Y144del_N501Y_A570 D_D614G_P681H_T716I_S982A_D1118H)
aggagaaagcuuaccauguucguguuucuggugcugcugccccugguguccagccagugugugaaccugaccaccagaacacagcugccuccagccuacaccaacagcuucaccagaggcguguacuaccccgacaagguguucagauccagcgugcugcacucuacccaggaccuguuccugccuuucuucagcaacgugaccugguuccacgccaucuccggcaccaauggcaccaagagauucgacaaccccgugcugcccuucaacgacgggguguacuuugccagcaccgagaaguccaacaucaucagaggcuggaucuucggcaccacacuggacagcaagacccagagccugcugaucgugaacaacgccaccaacguggucaucaaagugugcgaguuccaguucugcaacgaccccuuccugggcgucuaccacaagaacaacaagagcuggauggaaagcgaguuccggguguacagcagcgccaacaacugcaccuucgaguacgugucccagccuuuccugauggaccuggaaggcaagcagggcaacuucaagaaccugcgcgaguucguguucaagaacaucgacggcuacuucaaaaucuacagcaagcacaccccuaucaaccucgugcgggaucugccucagggcuucucugcucuggaaccccugguggaucugcccaucggcaucaacaucacccgguuucagacacugcuggcccugcacagaagcuaccugacaccuggcgauagcagcagcggauggacagcuggugccgccgcuuacuaugugggcuaccugcagccuagaaccuuccugcugaaguacaacgagaacggcaccaucaccgacgccguggauugugcucuggauccucugagcgagacaaagugcacccugaaguccuucaccguggaaaagggcaucuaccagaccagcaacuuccgggugcagcccaccgaauccaucgugcgguuccccaauaucaccaaucugugccccuucggcgagguguucaaugccaccagauucgccucuguguacgccuggaaccggaagcggaucagcaauugcguggccgacuacuccgugcuguacaacuccgccagcuucagcaccuucaagugcuacggcguguccccuaccaagcugaacgaccugugcuucacaaacguguacgccgacagcuucgugauccggggagaugaagugcggcagauugccccuggacagacaggcaagaucgccgacuacaacuacaagcugcccgacgacuucaccggcugugugauugccuggaacagcaacaaccuggacuccaaagucggcggcaacuacaauuaccuguaccggcuguuccggaaguccaaucugaagcccuucgagcgggacaucagcaccgaaaucuaucaggccggcagcaccccuugcaacggcguggaaggcuucaacugcuacuucccacugcaguccuacggcuuucagcccacauacggcgugggcuaucagcccuacagagugguggugcugagcuucgaacugcugcaugcuccugccacagugugcggcccuaagaaaagcaccaaucucgugaagaacaaaugcgugaacuucaacuucaacggccugaccggcaccggcgugcugacagagagcaacaagaaguuccugccauuccagcaguuuggccgggauaucgacgauaccacagacgccguuagagauccccagacacuggaaauccuggacaucaccccaugcagcuucggcggagugucugugaucaccccuggcaccaacaccagcaaucagguggcagugcuguaccagggcgugaacuguaccgaagugcccguggccauucacgccgaucagcugacaccuacauggcggguguacuccaccggcagcaauguguuucagaccagagccggcugucugaucggagccgagcacgugaacaauagcuacgagugcgacauccccaucggcgcuggcaucugugccagcuaccagacacagacaaacagccacagacgggcuagaagcguggccagccagagcaucauugccuacacaaugucucugggcgccgagaacagcguggccuacuccaacaacucuaucgcuauccccaucaacuucaccaucagcgugaccaccgagauccugccuguguccaugaccaagaccagcguggacugcaccauguacaucugcggcgauuccaccgagugcuccaaccugcugcugcaguacggcagcuucugcacccagcugaauagagcccugacagggaucgccguggaacaggacaagaacacccaagagguguucgcccaagugaagcaaaucuacaagaccccuccuaucaaggacuucggcggcuucaauuucagccagauucugcccgauccuagcaagcccagcaagcggagcuucaucgaggaccugcuguucaacaaagugacacuggccgacgccggcuucaucaagcaguauggcgauugucugggcgacauugccgccagggaucugauuugcgcccagaaguuuaacggacugacagugcugccuccucugcugaccgaugagaugaucgcccaguacacaucugcccugcuggccggcacaaucacaagcggcuggacauuuggagcuggcgccgcucugcagauccccuuugcuaugcagauggccuaccgguucaacggcaucggagugacccagaaugugcuguacgagaaccagaagcugaucgccaaccaguucaacagcgccaucggcaagauccaggacagccugagcagcacagcaagcgcccugggaaagcugcaggacguggucaaccagaaugcccaggcacugaacacccuggucaagcagcuguccuccaacuucggcgccaucagcucugugcugaacgauauccuggccagacuggacccuccugaggccgaggugcagaucgacagacugaucacaggcagacugcagagccuccagacauacgugacccagcagcugaucagagccgccgagauuagagccucugccaaucuggccgccaccaagaugucugagugugugcugggccagagcaagagaguggacuuuugcggcaagggcuaccaccugaugagcuucccucagucugccccucacggcgugguguuucugcacgugacauaugugcccgcucaagagaagaauuucaccaccgcuccagccaucugccacgacggcaaagcccacuuuccuagagaaggcguguucguguccaacggcacccauugguucgugacacagcggaacuucuacgagccccagaucaucaccacccacaacaccuucgugucuggcaacugcgacguugugaucggcauugugaacaauaccguguacgacccucugcagcccgagcuggacagcuucaaagaggaacuggacaaguacuuuaagaaccacacaagccccgacguggaccugggcgauaucagcggaaucaaugccagcgucgugaacauccagaaagagaucgaccggcugaacgagguggccaagaaucugaacgagagccugaucgaccugcaagaacuggggaaguacgagcaguacaucaaguggcccugguacaucuggcugggcuuuaucgccggacugauugccaucgugauggucacaaucaugcuguguugcaugaccagcugcuguagcugccugaagggcuguuguagcuguggcagcugcugcaaguucgacgaggacgauucugagcccgugcugaagggcgugaaacugcacuacaccugaggacuaguuauaagacugacuagcccgaugggccucccaacgggcccuccuccccuccuugcaccgagagaucuaaaaaaaaaaaaaaaaaaaaaaaaaaaaaaaaaaaaaaaaaaaaaaaaaaaaaaaaaaaaaaaaaaaaaaaaaaaaaaaaaaaaaaaaaaaaaaaaaaaa

SEQ ID NO: 26022 - RNA, 4011 nt, Artificial Sequence
  SARS-CoV-2/Wuhan/WIV05/2019__EPI_ISL_402128 spike protein mRNA gc mod (1-1273)(K986P_V987P_K986P_V987P_K417N_E484K_N501Y_D614G)
aggagaaagcuuaccauguucguguuucuggugcugcugccccugguguccagccagugugugaaccugaccaccagaacacagcugccuccagccuacaccaacagcuucaccagaggcguguacuaccccgacaagguguucagauccagcgugcugcacucuacccaggaccuguuccugccuuucuucagcaacgugaccugguuccacgccauccacguguccggcaccaauggcaccaagagauucgacaaccccgugcugcccuucaacgacgggguguacuuugccagcaccgagaaguccaacaucaucagaggcuggaucuucggcaccacacuggacagcaagacccagagccugcugaucgugaacaacgccaccaacguggucaucaaagugugcgaguuccaguucugcaacgaccccuuccugggcgucuacuaccacaagaacaacaagagcuggauggaaagcgaguuccggguguacagcagcgccaacaacugcaccuucgaguacgugucccagccuuuccugauggaccuggaaggcaagcagggcaacuucaagaaccugcgcgaguucguguucaagaacaucgacggcuacuucaaaaucuacagcaagcacaccccuaucaaccucgugcgggaucugccucagggcuucucugcucuggaaccccugguggaucugcccaucggcaucaacaucacccgguuucagacacugcuggcccugcacagaagcuaccugacaccuggcgauagcagcagcggauggacagcuggugccgccgcuuacuaugugggcuaccugcagccuagaaccuuccugcugaaguacaacgagaacggcaccaucaccgacgccguggauugugcucuggauccucugagcgagacaaagugcacccugaaguccuucaccguggaaaagggcaucuaccagaccagcaacuuccgggugcagcccaccgaauccaucgugcgguuccccaauaucaccaaucugugccccuucggcgagguguucaaugccaccagauucgccucuguguacgccuggaaccggaagcggaucagcaauugcguggccgacuacuccgugcuguacaacuccgccagcuucagcaccuucaagugcuacggcguguccccuaccaagcugaacgaccugugcuucacaaacguguacgccgacagcuucgugauccggggagaugaagugcggcagauugccccuggacagacaggcaacaucgccgacuacaacuacaagcugcccgacgacuucaccggcugugugauugccuggaacagcaacaaccuggacuccaaagucggcggcaacuacaauuaccuguaccggcuguuccggaaguccaaucugaagcccuucgagcgggacaucagcaccgaaaucuaucaggccggcagcaccccuugcaacggcgugaagggcuucaacugcuacuucccacugcaguccuacggcuuucagcccacauacggcgugggcuaucagcccuacagagugguggugcugagcuucgaacugcugcaugcuccugccacagugugcggcccuaagaaaagcaccaaucucgugaagaacaaaugcgugaacuucaacuucaacggccugaccggcaccggcgugcugacagagagcaacaagaaguuccugccauuccagcaguuuggccgggauaucgccgauaccacagacgccguuagagauccccagacacuggaaauccuggacaucaccccaugcagcuucggcggagugucugugaucaccccuggcaccaacaccagcaaucagguggcagugcuguaccagggcgugaacuguaccgaagugcccguggccauucacgccgaucagcugacaccuacauggcggguguacuccaccggcagcaauguguuucagaccagagccggcugucugaucggagccgagcacgugaacaauagcuacgagugcgacauccccaucggcgcuggcaucugugccagcuaccagacacagacaaacagccccagacgggcuagaagcguggccagccagagcaucauugccuacacaaugucucugggcgccgagaacagcguggccuacuccaacaacucuaucgcuauccccaccaacuucaccaucagcgugaccaccgagauccugccuguguccaugaccaagaccagcguggacugcaccauguacaucugcggcgauuccaccgagugcuccaaccugcugcugcaguacggcagcuucugcacccagcugaauagagcccugacagggaucgccguggaacaggacaagaacacccaagagguguucgcccaagugaagcaaaucuacaagaccccuccuaucaaggacuucggcggcuucaauuucagccagauucugcccgauccuagcaagcccagcaagcggagcuucaucgaggaccugcuguucaacaaagugacacuggccgacgccggcuucaucaagcaguauggcgauugucugggcgacauugccgccagggaucugauuugcgcccagaaguuuaacggacugacagugcugccuccucugcugaccgaugagaugaucgcccaguacacaucugcccugcuggccggcacaaucacaagcggcuggacauuuggagcuggcgccgcucugcagauccccuuugcuaugcagauggccuaccgguucaacggcaucggagugacccagaaugugcuguacgagaaccagaagcugaucgccaaccaguucaacagcgccaucggcaagauccaggacagccugagcagcacagcaagcgcccugggaaagcugcaggacguggucaaccagaaugcccaggcacugaacacccuggucaagcagcuguccuccaacuucggcgccaucagcucugugcugaacgauauccugagcagacuggacccuccugaggccgaggugcagaucgacagacugaucacaggcagacugcagagccuccagacauacgugacccagcagcugaucagagccgccgagauuagagccucugccaaucuggccgccaccaagaugucugagugugugcugggccagagcaagagaguggacuuuugcggcaagggcuaccaccugaugagcuucccucagucugccccucacggcgugguguuucugcacgugacauaugugcccgcucaagagaagaauuucaccaccgcuccagccaucugccacgacggcaaagcccacuuuccuagagaaggcguguucguguccaacggcacccauugguucgugacacagcggaacuucuacgagccccagaucaucaccaccgacaacaccuucgugucuggcaacugcgacguugugaucggcauugugaacaauaccguguacgacccucugcagcccgagcuggacagcuucaaagaggaacuggacaaguacuuuaagaaccacacaagccccgacguggaccugggcgauaucagcggaaucaaugccagcgucgugaacauccagaaagagaucgaccggcugaacgagguggccaagaaucugaacgagagccugaucgaccugcaagaacuggggaaguacgagcaguacaucaaguggcccugguacaucuggcugggcuuuaucgccggacugauugccaucgugauggucacaaucaugcuguguugcaugaccagcugcuguagcugccugaagggcuguuguagcuguggcagcugcugcaaguucgacgaggacgauucugagcccgugcugaagggcgugaaacugcacuacaccugaggacuaguuauaagacugacuagcccgaugggccucccaacgggcccuccuccccuccuugcaccgagagaucuaaaaaaaaaaaaaaaaaaaaaaaaaaaaaaaaaaaaaaaaaaaaaaaaaaaaaaaaaaaaaaaaaaaaaaaaaaaaaaaaaaaaaaaaaaaaaaaaaaaa

SEQ ID NO: 26023 - RNA, 4002 nt, Artificial Sequence
  SARS-CoV-2/Wuhan/WIV05/2019__EPI_ISL_402128 spike protein mRNA gc mod (1-1273)(K986P_V987P_K986P_V987P_L18F_D80A_D215G_L242del_A243del_ L244del_R246I_K417N_E484K_N501Y_D614G_A701V)
aggagaaagcuuaccauguucguguuucuggugcugcugccccugguguccagccagugugugaacuucaccaccagaacacagcugccuccagccuacaccaacagcuucaccagaggcguguacuaccccgacaagguguucagauccagcgugcugcacucuacccaggaccuguuccugccuuucuucagcaacgugaccugguuccacgccauccacguguccggcaccaauggcaccaagagauucgccaaccccgugcugcccuucaacgacgggguguacuuugccagcaccgagaaguccaacaucaucagaggcuggaucuucggcaccacacuggacagcaagacccagagccugcugaucgugaacaacgccaccaacguggucaucaaagugugcgaguuccaguucugcaacgaccccuuccugggcgucuacuaccacaagaacaacaagagcuggauggaaagcgaguuccggguguacagcagcgccaacaacugcaccuucgaguacgugucccagccuuuccugauggaccuggaaggcaagcagggcaacuucaagaaccugcgcgaguucguguucaagaacaucgacggcuacuucaaaaucuacagcaagcacaccccuaucaaccucgugcggggccugccucagggcuucucugcucuggaaccccugguggaucugcccaucggcaucaacaucacccgguuucagacacugcacaucagcuaccugacaccuggcgauagcagcagcggauggacagcuggugccgccgcuuacuaugugggcuaccugcagccuagaaccuuccugcugaaguacaacgagaacggcaccaucaccgacgccguggauugugcucuggauccucugagcgagacaaagugcacccugaaguccuucaccguggaaaagggcaucuaccagaccagcaacuuccgggugcagcccaccgaauccaucgugcgguuccccaauaucaccaaucugugccccuucggcgagguguucaaugccaccagauucgccucuguguacgccuggaaccggaagcggaucagcaauugcguggccgacuacuccgugcuguacaacuccgccagcuucagcaccuucaagugcuacggcguguccccuaccaagcugaacgaccugugcuucacaaacguguacgccgacagcuucgugauccggggagaugaagugcggcagauugccccuggacagacaggcaacaucgccgacuacaacuacaagcugcccgacgacuucaccggcugugugauugccuggaacagcaacaaccuggacuccaaagucggcggcaacuacaauuaccuguaccggcuguuccggaaguccaaucugaagcccuucgagcgggacaucagcaccgaaaucuaucaggccggcagcaccccuugcaacggcgugaagggcuucaacugcuacuucccacugcaguccuacggcuuucagcccacauacggcgugggcuaucagcccuacagagugguggugcugagcuucgaacugcugcaugcuccugccacagugugcggcccuaagaaaagcaccaaucucgugaagaacaaaugcgugaacuucaacuucaacggccugaccggcaccggcgugcugacagagagcaacaagaaguuccugccauuccagcaguuuggccgggauaucgccgauaccacagacgccguuagagauccccagacacuggaaauccuggacaucaccccaugcagcuucggcggagugucugugaucaccccuggcaccaacaccagcaaucagguggcagugcuguaccagggcgugaacuguaccgaagugcccguggccauucacgccgaucagcugacaccuacauggcggguguacuccaccggcagcaauguguuucagaccagagccggcugucugaucggagccgagcacgugaacaauagcuacgagugcgacauccccaucggcgcuggcaucugugccagcuaccagacacagacaaacagccccagacgggcuagaagcguggccagccagagcaucauugccuacacaaugucucugggcguggagaacagcguggccuacuccaacaacucuaucgcuauccccaccaacuucaccaucagcgugaccaccgagauccugccuguguccaugaccaagaccagcguggacugcaccauguacaucugcggcgauuccaccgagugcuccaaccugcugcugcaguacggcagcuucugcacccagcugaauagagcccugacagggaucgccguggaacaggacaagaacacccaagagguguucgcccaagugaagcaaaucuacaagaccccuccuaucaaggacuucggcggcuucaauuucagccagauucugcccgauccuagcaagcccagcaagcggagcuucaucgaggaccugcuguucaacaaagugacacuggccgacgccggcuucaucaagcaguauggcgauugucugggcgacauugccgccagggaucugauuugcgcccagaaguuuaacggacugacagugcugccuccucugcugaccgaugagaugaucgcccaguacacaucugcccugcuggccggcacaaucacaagcggcuggacauuuggagcuggcgccgcucugcagauccccuuugcuaugcagauggccuaccgguucaacggcaucggagugacccagaaugugcuguacgagaaccagaagcugaucgccaaccaguucaacagcgccaucggcaagauccaggacagccugagcagcacagcaagcgcccugggaaagcugcaggacguggucaaccagaaugcccaggcacugaacacccuggucaagcagcuguccuccaacuucggcgccaucagcucugugcugaacgauauccugagcagacuggacccuccugaggccgaggugcagaucgacagacugaucacaggcagacugcagagccuccagacauacgugacccagcagcugaucagagccgccgagauuagagccucugccaaucuggccgccaccaagaugucugagugugugcugggccagagcaagagaguggacuuuugcggcaagggcuaccaccugaugagcuucccucagucugccccucacggcgugguguuucugcacgugacauaugugcccgcucaagagaagaauuucaccaccgcuccagccaucugccacgacggcaaagcccacuuuccuagagaaggcguguucguguccaacggcacccauugguucgugacacagcggaacuucuacgagccccagaucaucaccaccgacaacaccuucgugucuggcaacugcgacguugugaucggcauugugaacaauaccguguacgacccucugcagcccgagcuggacagcuucaaagaggaacuggacaaguacuuuaagaaccacacaagccccgacguggaccugggcgauaucagcggaaucaaugccagcgucgugaacauccagaaagagaucgaccggcugaacgagguggccaagaaucugaacgagagccugaucgaccugcaagaacuggggaaguacgagcaguacaucaaguggcccugguacaucuggcugggcuuuaucgccggacugauugccaucgugauggucacaaucaugcuguguugcaugaccagcugcuguagcugccugaagggcuguuguagcuguggcagcugcugcaaguucgacgaggacgauucugagcccgugcugaagggcgugaaacugcacuacaccugaggacuaguuauaagacugacuagcccgaugggccucccaacgggcccuccuccccuccuugcaccgagagaucuaaaaaaaaaaaaaaaaaaaaaaaaaaaaaaaaaaaaaaaaaaaaaaaaaaaaaaaaaaaaaaaaaaaaaaaaaaaaaaaaaaaaaaaaaaaaaaaaaaaa

SEQ ID NO: 26024 - RNA, 4011 nt, Artificial Sequence
  SARS-CoV-2/Wuhan/WIV05/2019__EPI_ISL_402128 spike protein mRNA gc mod (1-1273)(K986P_V987P_K986P_V987P_E484K_D614G)
aggagaaagcuuaccauguucguguuucuggugcugcugccccugguguccagccagugugugaaccugaccaccagaacacagcugccuccagccuacaccaacagcuucaccagaggcguguacuaccccgacaagguguucagauccagcgugcugcacucuacccaggaccuguuccugccuuucuucagcaacgugaccugguuccacgccauccacguguccggcaccaauggcaccaagagauucgacaaccccgugcugcccuucaacgacgggguguacuuugccagcaccgagaaguccaacaucaucagaggcuggaucuucggcaccacacuggacagcaagacccagagccugcugaucgugaacaacgccaccaacguggucaucaaagugugcgaguuccaguucugcaacgaccccuuccugggcgucuacuaccacaagaacaacaagagcuggauggaaagcgaguuccggguguacagcagcgccaacaacugcaccuucgaguacgugucccagccuuuccugauggaccuggaaggcaagcagggcaacuucaagaaccugcgcgaguucguguucaagaacaucgacggcuacuucaaaaucuacagcaagcacaccccuaucaaccucgugcgggaucugccucagggcuucucugcucuggaaccccugguggaucugcccaucggcaucaacaucacccgguuucagacacugcuggcccugcacagaagcuaccugacaccuggcgauagcagcagcggauggacagcuggugccgccgcuuacuaugugggcuaccugcagccuagaaccuuccugcugaaguacaacgagaacggcaccaucaccgacgccguggauugugcucuggauccucugagcgagacaaagugcacccugaaguccuucaccguggaaaagggcaucuaccagaccagcaacuuccgggugcagcccaccgaauccaucgugcgguuccccaauaucaccaaucugugccccuucggcgagguguucaaugccaccagauucgccucuguguacgccuggaaccggaagcggaucagcaauugcguggccgacuacuccgugcuguacaacuccgccagcuucagcaccuucaagugcuacggcguguccccuaccaagcugaacgaccugugcuucacaaacguguacgccgacagcuucgugauccggggagaugaagugcggcagauugccccuggacagacaggcaagaucgccgacuacaacuacaagcugcccgacgacuucaccggcugugugauugccuggaacagcaacaaccuggacuccaaagucggcggcaacuacaauuaccuguaccggcuguuccggaaguccaaucugaagcccuucgagcgggacaucagcaccgaaaucuaucaggccggcagcaccccuugcaacggcgugaagggcuucaacugcuacuucccacugcaguccuacggcuuucagcccacaaauggcgugggcuaucagcccuacagagugguggugcugagcuucgaacugcugcaugcuccugccacagugugcggcccuaagaaaagcaccaaucucgugaagaacaaaugcgugaacuucaacuucaacggccugaccggcaccggcgugcugacagagagcaacaagaaguuccugccauuccagcaguuuggccgggauaucgccgauaccacagacgccguuagagauccccagacacuggaaauccuggacaucaccccaugcagcuucggcggagugucugugaucaccccuggcaccaacaccagcaaucagguggcagugcuguaccagggcgugaacuguaccgaagugcccguggccauucacgccgaucagcugacaccuacauggcggguguacuccaccggcagcaauguguuucagaccagagccggcugucugaucggagccgagcacgugaacaauagcuacgagugcgacauccccaucggcgcuggcaucugugccagcuaccagacacagacaaacagccccagacgggcuagaagcguggccagccagagcaucauugccuacacaaugucucugggcgccgagaacagcguggccuacuccaacaacucuaucgcuauccccaccaacuucaccaucagcgugaccaccgagauccugccuguguccaugaccaagaccagcguggacugcaccauguacaucugcggcgauuccaccgagugcuccaaccugcugcugcaguacggcagcuucugcacccagcugaauagagcccugacagggaucgccguggaacaggacaagaacacccaagagguguucgcccaagugaagcaaaucuacaagaccccuccuaucaaggacuucggcggcuucaauuucagccagauucugcccgauccuagcaagcccagcaagcggagcuucaucgaggaccugcuguucaacaaagugacacuggccgacgccggcuucaucaagcaguauggcgauugucugggcgacauugccgccagggaucugauuugcgcccagaaguuuaacggacugacagugcugccuccucugcugaccgaugagaugaucgcccaguacacaucugcccugcuggccggcacaaucacaagcggcuggacauuuggagcuggcgccgcucugcagauccccuuugcuaugcagauggccuaccgguucaacggcaucggagugacccagaaugugcuguacgagaaccagaagcugaucgccaaccaguucaacagcgccaucggcaagauccaggacagccugagcagcacagcaagcgcccugggaaagcugcaggacguggucaaccagaaugcccaggcacugaacacccuggucaagcagcuguccuccaacuucggcgccaucagcucugugcugaacgauauccugagcagacuggacccuccugaggccgaggugcagaucgacagacugaucacaggcagacugcagagccuccagacauacgugacccagcagcugaucagagccgccgagauuagagccucugccaaucuggccgccaccaagaugucugagugugugcugggccagagcaagagaguggacuuuugcggcaagggcuaccaccugaugagcuucccucagucugccccucacggcgugguguuucugcacgugacauaugugcccgcucaagagaagaauuucaccaccgcuccagccaucugccacgacggcaaagcccacuuuccuagagaaggcguguucguguccaacggcacccauugguucgugacacagcggaacuucuacgagccccagaucaucaccaccgacaacaccuucgugucuggcaacugcgacguugugaucggcauugugaacaauaccguguacgacccucugcagcccgagcuggacagcuucaaagaggaacuggacaaguacuuuaagaaccacacaagccccgacguggaccugggcgauaucagcggaaucaaugccagcgucgugaacauccagaaagagaucgaccggcugaacgagguggccaagaaucugaacgagagccugaucgaccugcaagaacuggggaaguacgagcaguacaucaaguggcccugguacaucuggcugggcuuuaucgccggacugauugccaucgugauggucacaaucaugcuguguugcaugaccagcugcuguagcugccugaagggcuguuguagcuguggcagcugcugcaaguucgacgaggacgauucugagcccgugcugaagggcgugaaacugcacuacaccugaggacuaguuauaagacugacuagcccgaugggccucccaacgggcccuccuccccuccuugcaccgagagaucuaaaaaaaaaaaaaaaaaaaaaaaaaaaaaaaaaaaaaaaaaaaaaaaaaaaaaaaaaaaaaaaaaaaaaaaaaaaaaaaaaaaaaaaaaaaaaaaaaaaa

SEQ ID NO: 26025 - RNA, 4011 nt, Artificial Sequence
  SARS-CoV-2/Wuhan/WIV05/2019__EPI_ISL_402128 spike protein mRNA gc mod (1-1273)(K986P_V987P_K986P_V987P_L18F_T20N_P26S_D138Y_R190S_K417T _E484K_N501Y_D614G_H655Y_T1027I)
aggagaaagcuuaccauguucguguuucuggugcugcugccccugguguccagccagugugugaacuucaccaacagaacacagcugccuagcgccuacaccaacagcuucaccagaggcguguacuaccccgacaagguguucagauccagcgugcugcacucuacccaggaccuguuccugccuuucuucagcaacgugaccugguuccacgccauccacguguccggcaccaauggcaccaagagauucgacaaccccgugcugcccuucaacgacgggguguacuuugccagcaccgagaaguccaacaucaucagaggcuggaucuucggcaccacacuggacagcaagacccagagccugcugaucgugaacaacgccaccaacguggucaucaaagugugcgaguuccaguucugcaacuaccccuuccugggcgucuacuaccacaagaacaacaagagcuggauggaaagcgaguuccggguguacagcagcgccaacaacugcaccuucgaguacgugucccagccuuuccugauggaccuggaaggcaagcagggcaacuucaagaaccugagcgaguucguguucaagaacaucgacggcuacuucaaaaucuacagcaagcacaccccuaucaaccucgugcgggaucugccucagggcuucucugcucuggaaccccugguggaucugcccaucggcaucaacaucacccgguuucagacacugcuggcccugcacagaagcuaccugacaccuggcgauagcagcagcggauggacagcuggugccgccgcuuacuaugugggcuaccugcagccuagaaccuuccugcugaaguacaacgagaacggcaccaucaccgacgccguggauugugcucuggauccucugagcgagacaaagugcacccugaaguccuucaccguggaaaagggcaucuaccagaccagcaacuuccgggugcagcccaccgaauccaucgugcgguuccccaauaucaccaaucugugccccuucggcgagguguucaaugccaccagauucgccucuguguacgccuggaaccggaagcggaucagcaauugcguggccgacuacuccgugcuguacaacuccgccagcuucagcaccuucaagugcuacggcguguccccuaccaagcugaacgaccugugcuucacaaacguguacgccgacagcuucgugauccggggagaugaagugcggcagauugccccuggacagacaggcaccaucgccgacuacaacuacaagcugcccgacgacuucaccggcugugugauugccuggaacagcaacaaccuggacuccaaagucggcggcaacuacaauuaccuguaccggcuguuccggaaguccaaucugaagcccuucgagcgggacaucagcaccgaaaucuaucaggccggcagcaccccuugcaacggcgugaagggcuucaacugcuacuucccacugcaguccuacggcuuucagcccacauacggcgugggcuaucagcccuacagagugguggugcugagcuucgaacugcugcaugcuccugccacagugugcggcccuaagaaaagcaccaaucucgugaagaacaaaugcgugaacuucaacuucaacggccugaccggcaccggcgugcugacagagagcaacaagaaguuccugccauuccagcaguuuggccgggauaucgccgauaccacagacgccguuagagauccccagacacuggaaauccuggacaucaccccaugcagcuucggcggagugucugugaucaccccuggcaccaacaccagcaaucagguggcagugcuguaccagggcgugaacuguaccgaagugcccguggccauucacgccgaucagcugacaccuacauggcggguguacuccaccggcagcaauguguuucagaccagagccggcugucugaucggagccgaguacgugaacaauagcuacgagugcgacauccccaucggcgcuggcaucugugccagcuaccagacacagacaaacagccccagacgggcuagaagcguggccagccagagcaucauugccuacacaaugucucugggcgccgagaacagcguggccuacuccaacaacucuaucgcuauccccaccaacuucaccaucagcgugaccaccgagauccugccuguguccaugaccaagaccagcguggacugcaccauguacaucugcggcgauuccaccgagugcuccaaccugcugcugcaguacggcagcuucugcacccagcugaauagagcccugacagggaucgccguggaacaggacaagaacacccaagagguguucgcccaagugaagcaaaucuacaagaccccuccuaucaaggacuucggcggcuucaauuucagccagauucugcccgauccuagcaagcccagcaagcggagcuucaucgaggaccugcuguucaacaaagugacacuggccgacgccggcuucaucaagcaguauggcgauugucugggcgacauugccgccagggaucugauuugcgcccagaaguuuaacggacugacagugcugccuccucugcugaccgaugagaugaucgcccaguacacaucugcccugcuggccggcacaaucacaagcggcuggacauuuggagcuggcgccgcucugcagauccccuuugcuaugcagauggccuaccgguucaacggcaucggagugacccagaaugugcuguacgagaaccagaagcugaucgccaaccaguucaacagcgccaucggcaagauccaggacagccugagcagcacagcaagcgcccugggaaagcugcaggacguggucaaccagaaugcccaggcacugaacacccuggucaagcagcuguccuccaacuucggcgccaucagcucugugcugaacgauauccugagcagacuggacccuccugaggccgaggugcagaucgacagacugaucacaggcagacugcagagccuccagacauacgugacccagcagcugaucagagccgccgagauuagagccucugccaaucuggccgccaucaagaugucugagugugugcugggccagagcaagagaguggacuuuugcggcaagggcuaccaccugaugagcuucccucagucugccccucacggcgugguguuucugcacgugacauaugugcccgcucaagagaagaauuucaccaccgcuccagccaucugccacgacggcaaagcccacuuuccuagagaaggcguguucguguccaacggcacccauugguucgugacacagcggaacuucuacgagccccagaucaucaccaccgacaacaccuucgugucuggcaacugcgacguugugaucggcauugugaacaauaccguguacgacccucugcagcccgagcuggacagcuucaaagaggaacuggacaaguacuuuaagaaccacacaagccccgacguggaccugggcgauaucagcggaaucaaugccagcgucgugaacauccagaaagagaucgaccggcugaacgagguggccaagaaucugaacgagagccugaucgaccugcaagaacuggggaaguacgagcaguacaucaaguggcccugguacaucuggcugggcuuuaucgccggacugauugccaucgugauggucacaaucaugcuguguugcaugaccagcugcuguagcugccugaagggcuguuguagcuguggcagcugcugcaaguucgacgaggacgauucugagcccgugcugaagggcgugaaacugcacuacaccugaggacuaguuauaagacugacuagcccgaugggccucccaacgggcccuccuccccuccuugcaccgagagaucuaaaaaaaaaaaaaaaaaaaaaaaaaaaaaaaaaaaaaaaaaaaaaaaaaaaaaaaaaaaaaaaaaaaaaaaaaaaaaaaaaaaaaaaaaaaaaaaaaaaa

SEQ ID NO: 26026 - RNA, 4011 nt, Artificial Sequence
  SARS-CoV-2/Wuhan/WIV05/2019__EPI_ISL_402128 spike protein mRNA gc mod (1-1273)(K986P_V987P_K986P_V987P_S13I_W152C_L452R_D614G)
aggagaaagcuuaccauguucguguuucuggugcugcugccccugguguccauccagugugugaaccugaccaccagaacacagcugccuccagccuacaccaacagcuucaccagaggcguguacuaccccgacaagguguucagauccagcgugcugcacucuacccaggaccuguuccugccuuucuucagcaacgugaccugguuccacgccauccacguguccggcaccaauggcaccaagagauucgacaaccccgugcugcccuucaacgacgggguguacuuugccagcaccgagaaguccaacaucaucagaggcuggaucuucggcaccacacuggacagcaagacccagagccugcugaucgugaacaacgccaccaacguggucaucaaagugugcgaguuccaguucugcaacgaccccuuccugggcgucuacuaccacaagaacaacaagagcugcauggaaagcgaguuccggguguacagcagcgccaacaacugcaccuucgaguacgugucccagccuuuccugauggaccuggaaggcaagcagggcaacuucaagaaccugcgcgaguucguguucaagaacaucgacggcuacuucaaaaucuacagcaagcacaccccuaucaaccucgugcgggaucugccucagggcuucucugcucuggaaccccugguggaucugcccaucggcaucaacaucacccgguuucagacacugcuggcccugcacagaagcuaccugacaccuggcgauagcagcagcggauggacagcuggugccgccgcuuacuaugugggcuaccugcagccuagaaccuuccugcugaaguacaacgagaacggcaccaucaccgacgccguggauugugcucuggauccucugagcgagacaaagugcacccugaaguccuucaccguggaaaagggcaucuaccagaccagcaacuuccgggugcagcccaccgaauccaucgugcgguuccccaauaucaccaaucugugccccuucggcgagguguucaaugccaccagauucgccucuguguacgccuggaaccggaagcggaucagcaauugcguggccgacuacuccgugcuguacaacuccgccagcuucagcaccuucaagugcuacggcguguccccuaccaagcugaacgaccugugcuucacaaacguguacgccgacagcuucgugauccggggagaugaagugcggcagauugccccuggacagacaggcaagaucgccgacuacaacuacaagcugcccgacgacuucaccggcugugugauugccuggaacagcaacaaccuggacuccaaagucggcggcaacuacaauuaccgcuaccggcuguuccggaaguccaaucugaagcccuucgagcgggacaucagcaccgaaaucuaucaggccggcagcaccccuugcaacggcguggaaggcuucaacugcuacuucccacugcaguccuacggcuuucagcccacaaauggcgugggcuaucagcccuacagagugguggugcugagcuucgaacugcugcaugcuccugccacagugugcggcccuaagaaaagcaccaaucucgugaagaacaaaugcgugaacuucaacuucaacggccugaccggcaccggcgugcugacagagagcaacaagaaguuccugccauuccagcaguuuggccgggauaucgccgauaccacagacgccguuagagauccccagacacuggaaauccuggacaucaccccaugcagcuucggcggagugucugugaucaccccuggcaccaacaccagcaaucagguggcagugcuguaccagggcgugaacuguaccgaagugcccguggccauucacgccgaucagcugacaccuacauggcggguguacuccaccggcagcaauguguuucagaccagagccggcugucugaucggagccgagcacgugaacaauagcuacgagugcgacauccccaucggcgcuggcaucugugccagcuaccagacacagacaaacagccccagacgggcuagaagcguggccagccagagcaucauugccuacacaaugucucugggcgccgagaacagcguggccuacuccaacaacucuaucgcuauccccaccaacuucaccaucagcgugaccaccgagauccugccuguguccaugaccaagaccagcguggacugcaccauguacaucugcggcgauuccaccgagugcuccaaccugcugcugcaguacggcagcuucugcacccagcugaauagagcccugacagggaucgccguggaacaggacaagaacacccaagagguguucgcccaagugaagcaaaucuacaagaccccuccuaucaaggacuucggcggcuucaauuucagccagauucugcccgauccuagcaagcccagcaagcggagcuucaucgaggaccugcuguucaacaaagugacacuggccgacgccggcuucaucaagcaguauggcgauugucugggcgacauugccgccagggaucugauuugcgcccagaaguuuaacggacugacagugcugccuccucugcugaccgaugagaugaucgcccaguacacaucugcccugcuggccggcacaaucacaagcggcuggacauuuggagcuggcgccgcucugcagauccccuuugcuaugcagauggccuaccgguucaacggcaucggagugacccagaaugugcuguacgagaaccagaagcugaucgccaaccaguucaacagcgccaucggcaagauccaggacagccugagcagcacagcaagcgcccugggaaagcugcaggacguggucaaccagaaugcccaggcacugaacacccuggucaagcagcuguccuccaacuucggcgccaucagcucugugcugaacgauauccugagcagacuggacccuccugaggccgaggugcagaucgacagacugaucacaggcagacugcagagccuccagacauacgugacccagcagcugaucagagccgccgagauuagagccucugccaaucuggccgccaccaagaugucugagugugugcugggccagagcaagagaguggacuuuugcggcaagggcuaccaccugaugagcuucccucagucugccccucacggcgugguguuucugcacgugacauaugugcccgcucaagagaagaauuucaccaccgcuccagccaucugccacgacggcaaagcccacuuuccuagagaaggcguguucguguccaacggcacccauugguucgugacacagcggaacuucuacgagccccagaucaucaccaccgacaacaccuucgugucuggcaacugcgacguugugaucggcauugugaacaauaccguguacgacccucugcagcccgagcuggacagcuucaaagaggaacuggacaaguacuuuaagaaccacacaagccccgacguggaccugggcgauaucagcggaaucaaugccagcgucgugaacauccagaaagagaucgaccggcugaacgagguggccaagaaucugaacgagagccugaucgaccugcaagaacuggggaaguacgagcaguacaucaaguggcccugguacaucuggcugggcuuuaucgccggacugauugccaucgugauggucacaaucaugcuguguugcaugaccagcugcuguagcugccugaagggcuguuguagcuguggcagcugcugcaaguucgacgaggacgauucugagcccgugcugaagggcgugaaacugcacuacaccugaggacuaguuauaagacugacuagcccgaugggccucccaacgggcccuccuccccuccuugcaccgagagaucuaaaaaaaaaaaaaaaaaaaaaaaaaaaaaaaaaaaaaaaaaaaaaaaaaaaaaaaaaaaaaaaaaaaaaaaaaaaaaaaaaaaaaaaaaaaaaaaaaaaa

SEQ ID NO: 26027 - RNA, 4011 nt, Artificial Sequence
  SARS-CoV-2/Wuhan/WIV05/2019__EPI_ISL_402128 spike protein mRNA gc mod (1-1273)(K986P_V987P)
aggagaaagcuuaccauguucguguuccuggugcugcugccucugguguccagccagugugugaaccugaccaccagaacacagcugccuccagccuacaccaacagcuuuaccagaggcguguacuaccccgacaagguguucagauccagcgugcugcacucuacccaggaccuguuccugccuuucuucagcaacgugaccugguuccacgccauccacguguccggcaccaauggcaccaagagauucgacaaccccgugcugcccuucaacgacgggguguacuuugccagcaccgagaaguccaacaucaucagaggcuggaucuucggcaccacacuggacagcaagacccagagccugcugaucgugaacaacgccaccaacguggucaucaaagugugcgaguuccaguucugcaacgaccccuuccugggcgucuacuaccacaagaacaacaagagcuggauggaaagcgaguuccggguguacagcagcgccaacaacugcaccuucgaguacgugucccagccuuuccugauggaccuggaaggcaagcagggcaacuucaagaaccugcgcgaguucguguuuaagaacaucgacggcuacuucaagaucuacagcaagcacaccccuaucaaccucgugcgggaucugccucagggcuucucugcucuggaaccccugguggaucugcccaucggcaucaacaucacccgguuucagacacugcuggcccugcacagaagcuaccugacaccuggcgauagcagcagcggauggacagcuggugccgccgcuuacuaugugggcuaccugcagccuagaaccuuccugcugaaguacaacgagaacggcaccaucaccgacgccguggauugugcucuggauccucugagcgagacaaagugcacccugaaguccuucaccguggaaaagggcaucuaccagaccagcaacuuccgggugcagcccaccgaauccaucgugcgguuccccaauaucaccaaucugugccccuucggcgagguguucaaugccaccagauucgccucuguguacgccuggaaccggaagcggaucagcaauugcguggccgacuacuccgugcuguacaacuccgccagcuucagcaccuucaagugcuacggcguguccccuaccaagcugaacgaccugugcuucacaaacguguacgccgacagcuucgugauccggggagaugaagugcggcagauugccccuggacagacaggcaagaucgccgacuacaacuacaagcugcccgacgacuucaccggcugugugauugccuggaacagcaacaaccuggacuccaaagucggcggcaacuacaauuaccuguaccggcuguuccggaaguccaaucugaagcccuucgagcgggacaucuccaccgagaucuaucaggccggcagcaccccuuguaacggcguggaaggcuucaacugcuacuucccacugcaguccuacggcuuucagcccacaaauggcgugggcuaucagcccuacagagugguggugcugagcuucgaacugcugcaugccccugccacagugugcggcccuaagaaaagcaccaaucucgugaagaacaaaugcgugaacuucaacuucaacggccugaccggcaccggcgugcugacagagagcaacaagaaguuccugccauuccagcaguuuggccgggauaucgccgauaccacagacgccguuagagauccccagacacuggaaauccuggacaucaccccuugcagcuucggcggagugucugugaucaccccuggcaccaacaccagcaaucagguggcagugcuguaccaggacgugaacuguaccgaagugcccguggccauucacgccgaucagcugacaccuacauggcggguguacuccaccggcagcaauguguuucagaccagagccggcugucugaucggagccgagcacgugaacaauagcuacgagugcgacauccccaucggcgcuggaaucugcgccagcuaccagacacagacaaacagcccucggagagccagaagcguggccagccagagcaucauugccuacacaaugucucugggcgccgagaacagcguggccuacuccaacaacucuaucgcuauccccaccaacuucaccaucagcgugaccacagagauccugccuguguccaugaccaagaccagcguggacugcaccauguacaucugcggcgauuccaccgagugcuccaaccugcugcugcaguacggcagcuucugcacccagcugaauagagcccugacagggaucgccguggaacaggacaagaacacccaagagguguucgcccaagugaagcagaucuacaagaccccuccuaucaaggacuucggcggcuucaauuucagccagauucugcccgauccuagcaagcccagcaagcggagcuucaucgaggaccugcuguucaacaaagugacacuggccgacgccggcuucaucaagcaguauggcgauugucugggcgacauugccgccagggaucugauuugcgcccagaaguuuaacggacugacagugcugccuccucugcugaccgaugagaugaucgcccaguacacaucugcccugcuggccggcacaaucacaagcggcuggacauuuggagcaggcgccgcucugcagauccccuuugcuaugcagauggccuaccgguucaacggcaucggagugacccagaaugugcuguacgagaaccagaagcugaucgccaaccaguucaacagcgccaucggcaagauccaggacagccugagcagcacagcaagcgcccugggaaagcugcaggacguggucaaccagaaugcccaggcacugaacacccuggucaagcagcuguccuccaacuucggcgccaucagcucugugcugaacgauauccugagcagacuggacccuccugaggccgaggugcagaucgacagacugaucacaggcagacugcagagccuccagacauacgugacccagcagcugaucagagccgccgagauuagagccucugccaaucuggccgccaccaagaugucugagugugugcugggccagagcaagagaguggacuuuugcggcaagggcuaccaccugaugagcuucccucagucugccccucacggcgugguguuucugcacgugacauaugugcccgcucaagagaagaauuucaccaccgcuccagccaucugccacgacggcaaagcccacuuuccuagagaaggcguguucguguccaacggcacccauugguucgugacacagcggaacuucuacgagccccagaucaucaccaccgacaacaccuucgugucuggcaacugcgacgucgugaucggcauugugaacaauaccguguacgacccucugcagcccgagcuggacagcuucaaagaggaacuggacaaguacuuuaagaaccacacaagccccgacguggaccugggcgauaucagcggaaucaaugccagcgucgugaacauccagaaagagaucgaccggcugaacgagguggccaagaaucugaacgagagccugaucgaccugcaagaacuggggaaguacgagcaguacaucaaguggcccugguacaucuggcugggcuuuaucgccggacugauugccaucgugauggucacaaucaugcuguguugcaugaccagcugcuguagcugccugaagggcuguuguagcuguggcagcugcugcaaguucgacgaggacgauucugagcccgugcugaagggcgugaaacugcacuacacaugaggacuaguuauaagacugacuagcccgaugggccucccaacgggcccuccuccccuccuugcaccgagagaucuaaaaaaaaaaaaaaaaaaaaaaaaaaaaaaaaaaaaaaaaaaaaaaaaaaaaaaaaaaaaaaaaaaaaaaaaaaaaaaaaaaaaaaaaaaaaaaaaaaaa

SEQ ID NO: 26028 - RNA, 4011 nt, Artificial Sequence
  SARS-CoV-2/Wuhan/WIV05/2019__EPI_ISL_402128 spike protein mRNA gc mod (1-1273)(K986P_V987P_ D614G)
aggagaaagcuuaccauguucguguuccuggugcugcugccucugguguccagccagugugugaaccugaccaccagaacacagcugccuccagccuacaccaacagcuuuaccagaggcguguacuaccccgacaagguguucagauccagcgugcugcacucuacccaggaccuguuccugccuuucuucagcaacgugaccugguuccacgccauccacguguccggcaccaauggcaccaagagauucgacaaccccgugcugcccuucaacgacgggguguacuuugccagcaccgagaaguccaacaucaucagaggcuggaucuucggcaccacacuggacagcaagacccagagccugcugaucgugaacaacgccaccaacguggucaucaaagugugcgaguuccaguucugcaacgaccccuuccugggcgucuacuaccacaagaacaacaagagcuggauggaaagcgaguuccggguguacagcagcgccaacaacugcaccuucgaguacgugucccagccuuuccugauggaccuggaaggcaagcagggcaacuucaagaaccugcgcgaguucguguuuaagaacaucgacggcuacuucaagaucuacagcaagcacaccccuaucaaccucgugcgggaucugccucagggcuucucugcucuggaaccccugguggaucugcccaucggcaucaacaucacccgguuucagacacugcuggcccugcacagaagcuaccugacaccuggcgauagcagcagcggauggacagcuggugccgccgcuuacuaugugggcuaccugcagccuagaaccuuccugcugaaguacaacgagaacggcaccaucaccgacgccguggauugugcucuggauccucugagcgagacaaagugcacccugaaguccuucaccguggaaaagggcaucuaccagaccagcaacuuccgggugcagcccaccgaauccaucgugcgguuccccaauaucaccaaucugugccccuucggcgagguguucaaugccaccagauucgccucuguguacgccuggaaccggaagcggaucagcaauugcguggccgacuacuccgugcuguacaacuccgccagcuucagcaccuucaagugcuacggcguguccccuaccaagcugaacgaccugugcuucacaaacguguacgccgacagcuucgugauccggggagaugaagugcggcagauugccccuggacagacaggcaagaucgccgacuacaacuacaagcugcccgacgacuucaccggcugugugauugccuggaacagcaacaaccuggacuccaaagucggcggcaacuacaauuaccuguaccggcuguuccggaaguccaaucugaagcccuucgagcgggacaucuccaccgagaucuaucaggccggcagcaccccuuguaacggcguggaaggcuucaacugcuacuucccacugcaguccuacggcuuucagcccacaaauggcgugggcuaucagcccuacagagugguggugcugagcuucgaacugcugcaugccccugccacagugugcggcccuaagaaaagcaccaaucucgugaagaacaaaugcgugaacuucaacuucaacggccugaccggcaccggcgugcugacagagagcaacaagaaguuccugccauuccagcaguuuggccgggauaucgccgauaccacagacgccguuagagauccccagacacuggaaauccuggacaucaccccuugcagcuucggcggagugucugugaucaccccuggcaccaacaccagcaaucagguggcagugcuguaccagggcgugaacuguaccgaagugcccguggccauucacgccgaucagcugacaccuacauggcggguguacuccaccggcagcaauguguuucagaccagagccggcugucugaucggagccgagcacgugaacaauagcuacgagugcgacauccccaucggcgcuggaaucugcgccagcuaccagacacagacaaacagcccucggagagccagaagcguggccagccagagcaucauugccuacacaaugucucugggcgccgagaacagcguggccuacuccaacaacucuaucgcuauccccaccaacuucaccaucagcgugaccacagagauccugccuguguccaugaccaagaccagcguggacugcaccauguacaucugcggcgauuccaccgagugcuccaaccugcugcugcaguacggcagcuucugcacccagcugaauagagcccugacagggaucgccguggaacaggacaagaacacccaagagguguucgcccaagugaagcagaucuacaagaccccuccuaucaaggacuucggcggcuucaauuucagccagauucugcccgauccuagcaagcccagcaagcggagcuucaucgaggaccugcuguucaacaaagugacacuggccgacgccggcuucaucaagcaguauggcgauugucugggcgacauugccgccagggaucugauuugcgcccagaaguuuaacggacugacagugcugccuccucugcugaccgaugagaugaucgcccaguacacaucugcccugcuggccggcacaaucacaagcggcuggacauuuggagcaggcgccgcucugcagauccccuuugcuaugcagauggccuaccgguucaacggcaucggagugacccagaaugugcuguacgagaaccagaagcugaucgccaaccaguucaacagcgccaucggcaagauccaggacagccugagcagcacagcaagcgcccugggaaagcugcaggacguggucaaccagaaugcccaggcacugaacacccuggucaagcagcuguccuccaacuucggcgccaucagcucugugcugaacgauauccugagcagacuggacccuccugaggccgaggugcagaucgacagacugaucacaggcagacugcagagccuccagacauacgugacccagcagcugaucagagccgccgagauuagagccucugccaaucuggccgccaccaagaugucugagugugugcugggccagagcaagagaguggacuuuugcggcaagggcuaccaccugaugagcuucccucagucugccccucacggcgugguguuucugcacgugacauaugugcccgcucaagagaagaauuucaccaccgcuccagccaucugccacgacggcaaagcccacuuuccuagagaaggcguguucguguccaacggcacccauugguucgugacacagcggaacuucuacgagccccagaucaucaccaccgacaacaccuucgugucuggcaacugcgacgucgugaucggcauugugaacaauaccguguacgacccucugcagcccgagcuggacagcuucaaagaggaacuggacaaguacuuuaagaaccacacaagccccgacguggaccugggcgauaucagcggaaucaaugccagcgucgugaacauccagaaagagaucgaccggcugaacgagguggccaagaaucugaacgagagccugaucgaccugcaagaacuggggaaguacgagcaguacaucaaguggcccugguacaucuggcugggcuuuaucgccggacugauugccaucgugauggucacaaucaugcuguguugcaugaccagcugcuguagcugccugaagggcuguuguagcuguggcagcugcugcaaguucgacgaggacgauucugagcccgugcugaagggcgugaaacugcacuacacaugaggacuaguuauaagacugacuagcccgaugggccucccaacgggcccuccuccccuccuugcaccgagagaucuaaaaaaaaaaaaaaaaaaaaaaaaaaaaaaaaaaaaaaaaaaaaaaaaaaaaaaaaaaaaaaaaaaaaaaaaaaaaaaaaaaaaaaaaaaaaaaaaaaaa

SEQ ID NO: 26029 - RNA, 4011 nt, Artificial Sequence
  SARS-CoV-2/Wuhan/WIV05/2019__EPI_ISL_402128 spike protein mRNA gc mod (1-1273)(K986P_V987P_A222V_D614G)
aggagaaagcuuaccauguucguguuccuggugcugcugccucugguguccagccagugugugaaccugaccaccagaacacagcugccuccagccuacaccaacagcuuuaccagaggcguguacuaccccgacaagguguucagauccagcgugcugcacucuacccaggaccuguuccugccuuucuucagcaacgugaccugguuccacgccauccacguguccggcaccaauggcaccaagagauucgacaaccccgugcugcccuucaacgacgggguguacuuugccagcaccgagaaguccaacaucaucagaggcuggaucuucggcaccacacuggacagcaagacccagagccugcugaucgugaacaacgccaccaacguggucaucaaagugugcgaguuccaguucugcaacgaccccuuccugggcgucuacuaccacaagaacaacaagagcuggauggaaagcgaguuccggguguacagcagcgccaacaacugcaccuucgaguacgugucccagccuuuccugauggaccuggaaggcaagcagggcaacuucaagaaccugcgcgaguucguguuuaagaacaucgacggcuacuucaagaucuacagcaagcacaccccuaucaaccucgugcgggaucugccucagggcuucucugugcuggaaccccugguggaucugcccaucggcaucaacaucacccgguuucagacacugcuggcccugcacagaagcuaccugacaccuggcgauagcagcagcggauggacagcuggugccgccgcuuacuaugugggcuaccugcagccuagaaccuuccugcugaaguacaacgagaacggcaccaucaccgacgccguggauugugcucuggauccucugagcgagacaaagugcacccugaaguccuucaccguggaaaagggcaucuaccagaccagcaacuuccgggugcagcccaccgaauccaucgugcgguuccccaauaucaccaaucugugccccuucggcgagguguucaaugccaccagauucgccucuguguacgccuggaaccggaagcggaucagcaauugcguggccgacuacuccgugcuguacaacuccgccagcuucagcaccuucaagugcuacggcguguccccuaccaagcugaacgaccugugcuucacaaacguguacgccgacagcuucgugauccggggagaugaagugcggcagauugccccuggacagacaggcaagaucgccgacuacaacuacaagcugcccgacgacuucaccggcugugugauugccuggaacagcaacaaccuggacuccaaagucggcggcaacuacaauuaccuguaccggcuguuccggaaguccaaucugaagcccuucgagcgggacaucuccaccgagaucuaucaggccggcagcaccccuuguaacggcguggaaggcuucaacugcuacuucccacugcaguccuacggcuuucagcccacaaauggcgugggcuaucagcccuacagagugguggugcugagcuucgaacugcugcaugccccugccacagugugcggcccuaagaaaagcaccaaucucgugaagaacaaaugcgugaacuucaacuucaacggccugaccggcaccggcgugcugacagagagcaacaagaaguuccugccauuccagcaguuuggccgggauaucgccgauaccacagacgccguuagagauccccagacacuggaaauccuggacaucaccccuugcagcuucggcggagugucugugaucaccccuggcaccaacaccagcaaucagguggcagugcuguaccagggcgugaacuguaccgaagugcccguggccauucacgccgaucagcugacaccuacauggcggguguacuccaccggcagcaauguguuucagaccagagccggcugucugaucggagccgagcacgugaacaauagcuacgagugcgacauccccaucggcgcuggaaucugcgccagcuaccagacacagacaaacagcccucggagagccagaagcguggccagccagagcaucauugccuacacaaugucucugggcgccgagaacagcguggccuacuccaacaacucuaucgcuauccccaccaacuucaccaucagcgugaccacagagauccugccuguguccaugaccaagaccagcguggacugcaccauguacaucugcggcgauuccaccgagugcuccaaccugcugcugcaguacggcagcuucugcacccagcugaauagagcccugacagggaucgccguggaacaggacaagaacacccaagagguguucgcccaagugaagcagaucuacaagaccccuccuaucaaggacuucggcggcuucaauuucagccagauucugcccgauccuagcaagcccagcaagcggagcuucaucgaggaccugcuguucaacaaagugacacuggccgacgccggcuucaucaagcaguauggcgauugucugggcgacauugccgccagggaucugauuugcgcccagaaguuuaacggacugacagugcugccuccucugcugaccgaugagaugaucgcccaguacacaucugcccugcuggccggcacaaucacaagcggcuggacauuuggagcaggcgccgcucugcagauccccuuugcuaugcagauggccuaccgguucaacggcaucggagugacccagaaugugcuguacgagaaccagaagcugaucgccaaccaguucaacagcgccaucggcaagauccaggacagccugagcagcacagcaagcgcccugggaaagcugcaggacguggucaaccagaaugcccaggcacugaacacccuggucaagcagcuguccuccaacuucggcgccaucagcucugugcugaacgauauccugagcagacuggacccuccugaggccgaggugcagaucgacagacugaucacaggcagacugcagagccuccagacauacgugacccagcagcugaucagagccgccgagauuagagccucugccaaucuggccgccaccaagaugucugagugugugcugggccagagcaagagaguggacuuuugcggcaagggcuaccaccugaugagcuucccucagucugccccucacggcgugguguuucugcacgugacauaugugcccgcucaagagaagaauuucaccaccgcuccagccaucugccacgacggcaaagcccacuuuccuagagaaggcguguucguguccaacggcacccauugguucgugacacagcggaacuucuacgagccccagaucaucaccaccgacaacaccuucgugucuggcaacugcgacgucgugaucggcauugugaacaauaccguguacgacccucugcagcccgagcuggacagcuucaaagaggaacuggacaaguacuuuaagaaccacacaagccccgacguggaccugggcgauaucagcggaaucaaugccagcgucgugaacauccagaaagagaucgaccggcugaacgagguggccaagaaucugaacgagagccugaucgaccugcaagaacuggggaaguacgagcaguacaucaaguggcccugguacaucuggcugggcuuuaucgccggacugauugccaucgugauggucacaaucaugcuguguugcaugaccagcugcuguagcugccugaagggcuguuguagcuguggcagcugcugcaaguucgacgaggacgauucugagcccgugcugaagggcgugaaacugcacuacacaugaggacuaguuauaagacugacuagcccgaugggccucccaacgggcccuccuccccuccuugcaccgagagaucuaaaaaaaaaaaaaaaaaaaaaaaaaaaaaaaaaaaaaaaaaaaaaaaaaaaaaaaaaaaaaaaaaaaaaaaaaaaaaaaaaaaaaaaaaaaaaaaaaaaa

SEQ ID NO: 26030 - RNA, 4011 nt, Artificial Sequence
  SARS-CoV-2/Wuhan/WIV05/2019__EPI_ISL_402128 spike protein mRNA gc mod (1-1273)(K986P_V987P_N439K_D614G)
aggagaaagcuuaccauguucguguuccuggugcugcugccucugguguccagccagugugugaaccugaccaccagaacacagcugccuccagccuacaccaacagcuuuaccagaggcguguacuaccccgacaagguguucagauccagcgugcugcacucuacccaggaccuguuccugccuuucuucagcaacgugaccugguuccacgccauccacguguccggcaccaauggcaccaagagauucgacaaccccgugcugcccuucaacgacgggguguacuuugccagcaccgagaaguccaacaucaucagaggcuggaucuucggcaccacacuggacagcaagacccagagccugcugaucgugaacaacgccaccaacguggucaucaaagugugcgaguuccaguucugcaacgaccccuuccugggcgucuacuaccacaagaacaacaagagcuggauggaaagcgaguuccggguguacagcagcgccaacaacugcaccuucgaguacgugucccagccuuuccugauggaccuggaaggcaagcagggcaacuucaagaaccugcgcgaguucguguuuaagaacaucgacggcuacuucaagaucuacagcaagcacaccccuaucaaccucgugcgggaucugccucagggcuucucugcucuggaaccccugguggaucugcccaucggcaucaacaucacccgguuucagacacugcuggcccugcacagaagcuaccugacaccuggcgauagcagcagcggauggacagcuggugccgccgcuuacuaugugggcuaccugcagccuagaaccuuccugcugaaguacaacgagaacggcaccaucaccgacgccguggauugugcucuggauccucugagcgagacaaagugcacccugaaguccuucaccguggaaaagggcaucuaccagaccagcaacuuccgggugcagcccaccgaauccaucgugcgguuccccaauaucaccaaucugugccccuucggcgagguguucaaugccaccagauucgccucuguguacgccuggaaccggaagcggaucagcaauugcguggccgacuacuccgugcuguacaacuccgccagcuucagcaccuucaagugcuacggcguguccccuaccaagcugaacgaccugugcuucacaaacguguacgccgacagcuucgugauccggggagaugaagugcggcagauugccccuggacagacaggcaagaucgccgacuacaacuacaagcugcccgacgacuucaccggcugugugauugccuggaacagcaagaaccuggacuccaaagucggcggcaacuacaauuaccuguaccggcuguuccggaaguccaaucugaagcccuucgagcgggacaucuccaccgagaucuaucaggccggcagcaccccuuguaacggcguggaaggcuucaacugcuacuucccacugcaguccuacggcuuucagcccacaaauggcgugggcuaucagcccuacagagugguggugcugagcuucgaacugcugcaugccccugccacagugugcggcccuaagaaaagcaccaaucucgugaagaacaaaugcgugaacuucaacuucaacggccugaccggcaccggcgugcugacagagagcaacaagaaguuccugccauuccagcaguuuggccgggauaucgccgauaccacagacgccguuagagauccccagacacuggaaauccuggacaucaccccuugcagcuucggcggagugucugugaucaccccuggcaccaacaccagcaaucagguggcagugcuguaccagggcgugaacuguaccgaagugcccguggccauucacgccgaucagcugacaccuacauggcggguguacuccaccggcagcaauguguuucagaccagagccggcugucugaucggagccgagcacgugaacaauagcuacgagugcgacauccccaucggcgcuggaaucugcgccagcuaccagacacagacaaacagcccucggagagccagaagcguggccagccagagcaucauugccuacacaaugucucugggcgccgagaacagcguggccuacuccaacaacucuaucgcuauccccaccaacuucaccaucagcgugaccacagagauccugccuguguccaugaccaagaccagcguggacugcaccauguacaucugcggcgauuccaccgagugcuccaaccugcugcugcaguacggcagcuucugcacccagcugaauagagcccugacagggaucgccguggaacaggacaagaacacccaagagguguucgcccaagugaagcagaucuacaagaccccuccuaucaaggacuucggcggcuucaauuucagccagauucugcccgauccuagcaagcccagcaagcggagcuucaucgaggaccugcuguucaacaaagugacacuggccgacgccggcuucaucaagcaguauggcgauugucugggcgacauugccgccagggaucugauuugcgcccagaaguuuaacggacugacagugcugccuccucugcugaccgaugagaugaucgcccaguacacaucugcccugcuggccggcacaaucacaagcggcuggacauuuggagcaggcgccgcucugcagauccccuuugcuaugcagauggccuaccgguucaacggcaucggagugacccagaaugugcuguacgagaaccagaagcugaucgccaaccaguucaacagcgccaucggcaagauccaggacagccugagcagcacagcaagcgcccugggaaagcugcaggacguggucaaccagaaugcccaggcacugaacacccuggucaagcagcuguccuccaacuucggcgccaucagcucugugcugaacgauauccugagcagacuggacccuccugaggccgaggugcagaucgacagacugaucacaggcagacugcagagccuccagacauacgugacccagcagcugaucagagccgccgagauuagagccucugccaaucuggccgccaccaagaugucugagugugugcugggccagagcaagagaguggacuuuugcggcaagggcuaccaccugaugagcuucccucagucugccccucacggcgugguguuucugcacgugacauaugugcccgcucaagagaagaauuucaccaccgcuccagccaucugccacgacggcaaagcccacuuuccuagagaaggcguguucguguccaacggcacccauugguucgugacacagcggaacuucuacgagccccagaucaucaccaccgacaacaccuucgugucuggcaacugcgacgucgugaucggcauugugaacaauaccguguacgacccucugcagcccgagcuggacagcuucaaagaggaacuggacaaguacuuuaagaaccacacaagccccgacguggaccugggcgauaucagcggaaucaaugccagcgucgugaacauccagaaagagaucgaccggcugaacgagguggccaagaaucugaacgagagccugaucgaccugcaagaacuggggaaguacgagcaguacaucaaguggcccugguacaucuggcugggcuuuaucgccggacugauugccaucgugauggucacaaucaugcuguguugcaugaccagcugcuguagcugccugaagggcuguuguagcuguggcagcugcugcaaguucgacgaggacgauucugagcccgugcugaagggcgugaaacugcacuacacaugaggacuaguuauaagacugacuagcccgaugggccucccaacgggcccuccuccccuccuugcaccgagagaucuaaaaaaaaaaaaaaaaaaaaaaaaaaaaaaaaaaaaaaaaaaaaaaaaaaaaaaaaaaaaaaaaaaaaaaaaaaaaaaaaaaaaaaaaaaaaaaaaaaaa

SEQ ID NO: 26031 - RNA, 4011 nt, Artificial Sequence
  SARS-CoV-2/Wuhan/WIV05/2019__EPI_ISL_402128 spike protein mRNA gc mod (1-1273)(K986P_V987P_S477N_D614G)
aggagaaagcuuaccauguucguguuccuggugcugcugccucugguguccagccagugugugaaccugaccaccagaacacagcugccuccagccuacaccaacagcuuuaccagaggcguguacuaccccgacaagguguucagauccagcgugcugcacucuacccaggaccuguuccugccuuucuucagcaacgugaccugguuccacgccauccacguguccggcaccaauggcaccaagagauucgacaaccccgugcugcccuucaacgacgggguguacuuugccagcaccgagaaguccaacaucaucagaggcuggaucuucggcaccacacuggacagcaagacccagagccugcugaucgugaacaacgccaccaacguggucaucaaagugugcgaguuccaguucugcaacgaccccuuccugggcgucuacuaccacaagaacaacaagagcuggauggaaagcgaguuccggguguacagcagcgccaacaacugcaccuucgaguacgugucccagccuuuccugauggaccuggaaggcaagcagggcaacuucaagaaccugcgcgaguucguguuuaagaacaucgacggcuacuucaagaucuacagcaagcacaccccuaucaaccucgugcgggaucugccucagggcuucucugcucuggaaccccugguggaucugcccaucggcaucaacaucacccgguuucagacacugcuggcccugcacagaagcuaccugacaccuggcgauagcagcagcggauggacagcuggugccgccgcuuacuaugugggcuaccugcagccuagaaccuuccugcugaaguacaacgagaacggcaccaucaccgacgccguggauugugcucuggauccucugagcgagacaaagugcacccugaaguccuucaccguggaaaagggcaucuaccagaccagcaacuuccgggugcagcccaccgaauccaucgugcgguuccccaauaucaccaaucugugccccuucggcgagguguucaaugccaccagauucgccucuguguacgccuggaaccggaagcggaucagcaauugcguggccgacuacuccgugcuguacaacuccgccagcuucagcaccuucaagugcuacggcguguccccuaccaagcugaacgaccugugcuucacaaacguguacgccgacagcuucgugauccggggagaugaagugcggcagauugccccuggacagacaggcaagaucgccgacuacaacuacaagcugcccgacgacuucaccggcugugugauugccuggaacagcaacaaccuggacuccaaagucggcggcaacuacaauuaccuguaccggcuguuccggaaguccaaucugaagcccuucgagcgggacaucuccaccgagaucuaucaggccggcaacaccccuuguaacggcguggaaggcuucaacugcuacuucccacugcaguccuacggcuuucagcccacaaauggcgugggcuaucagcccuacagagugguggugcugagcuucgaacugcugcaugccccugccacagugugcggcccuaagaaaagcaccaaucucgugaagaacaaaugcgugaacuucaacuucaacggccugaccggcaccggcgugcugacagagagcaacaagaaguuccugccauuccagcaguuuggccgggauaucgccgauaccacagacgccguuagagauccccagacacuggaaauccuggacaucaccccuugcagcuucggcggagugucugugaucaccccuggcaccaacaccagcaaucagguggcagugcuguaccagggcgugaacuguaccgaagugcccguggccauucacgccgaucagcugacaccuacauggcggguguacuccaccggcagcaauguguuucagaccagagccggcugucugaucggagccgagcacgugaacaauagcuacgagugcgacauccccaucggcgcuggaaucugcgccagcuaccagacacagacaaacagcccucggagagccagaagcguggccagccagagcaucauugccuacacaaugucucugggcgccgagaacagcguggccuacuccaacaacucuaucgcuauccccaccaacuucaccaucagcgugaccacagagauccugccuguguccaugaccaagaccagcguggacugcaccauguacaucugcggcgauuccaccgagugcuccaaccugcugcugcaguacggcagcuucugcacccagcugaauagagcccugacagggaucgccguggaacaggacaagaacacccaagagguguucgcccaagugaagcagaucuacaagaccccuccuaucaaggacuucggcggcuucaauuucagccagauucugcccgauccuagcaagcccagcaagcggagcuucaucgaggaccugcuguucaacaaagugacacuggccgacgccggcuucaucaagcaguauggcgauugucugggcgacauugccgccagggaucugauuugcgcccagaaguuuaacggacugacagugcugccuccucugcugaccgaugagaugaucgcccaguacacaucugcccugcuggccggcacaaucacaagcggcuggacauuuggagcaggcgccgcucugcagauccccuuugcuaugcagauggccuaccgguucaacggcaucggagugacccagaaugugcuguacgagaaccagaagcugaucgccaaccaguucaacagcgccaucggcaagauccaggacagccugagcagcacagcaagcgcccugggaaagcugcaggacguggucaaccagaaugcccaggcacugaacacccuggucaagcagcuguccuccaacuucggcgccaucagcucugugcugaacgauauccugagcagacuggacccuccugaggccgaggugcagaucgacagacugaucacaggcagacugcagagccuccagacauacgugacccagcagcugaucagagccgccgagauuagagccucugccaaucuggccgccaccaagaugucugagugugugcugggccagagcaagagaguggacuuuugcggcaagggcuaccaccugaugagcuucccucagucugccccucacggcgugguguuucugcacgugacauaugugcccgcucaagagaagaauuucaccaccgcuccagccaucugccacgacggcaaagcccacuuuccuagagaaggcguguucguguccaacggcacccauugguucgugacacagcggaacuucuacgagccccagaucaucaccaccgacaacaccuucgugucuggcaacugcgacgucgugaucggcauugugaacaauaccguguacgacccucugcagcccgagcuggacagcuucaaagaggaacuggacaaguacuuuaagaaccacacaagccccgacguggaccugggcgauaucagcggaaucaaugccagcgucgugaacauccagaaagagaucgaccggcugaacgagguggccaagaaucugaacgagagccugaucgaccugcaagaacuggggaaguacgagcaguacaucaaguggcccugguacaucuggcugggcuuuaucgccggacugauugccaucgugauggucacaaucaugcuguguugcaugaccagcugcuguagcugccugaagggcuguuguagcuguggcagcugcugcaaguucgacgaggacgauucugagcccgugcugaagggcgugaaacugcacuacacaugaggacuaguuauaagacugacuagcccgaugggccucccaacgggcccuccuccccuccuugcaccgagagaucuaaaaaaaaaaaaaaaaaaaaaaaaaaaaaaaaaaaaaaaaaaaaaaaaaaaaaaaaaaaaaaaaaaaaaaaaaaaaaaaaaaaaaaaaaaaaaaaaaaaa

SEQ ID NO: 26032 - RNA, 4011 nt, Artificial Sequence
  SARS-CoV-2/Wuhan/WIV05/2019__EPI_ISL_402128 spike protein mRNA gc mod (1-1273)(K986P_V987P_N501Y_D614G)
aggagaaagcuuaccauguucguguuccuggugcugcugccucugguguccagccagugugugaaccugaccaccagaacacagcugccuccagccuacaccaacagcuuuaccagaggcguguacuaccccgacaagguguucagauccagcgugcugcacucuacccaggaccuguuccugccuuucuucagcaacgugaccugguuccacgccauccacguguccggcaccaauggcaccaagagauucgacaaccccgugcugcccuucaacgacgggguguacuuugccagcaccgagaaguccaacaucaucagaggcuggaucuucggcaccacacuggacagcaagacccagagccugcugaucgugaacaacgccaccaacguggucaucaaagugugcgaguuccaguucugcaacgaccccuuccugggcgucuacuaccacaagaacaacaagagcuggauggaaagcgaguuccggguguacagcagcgccaacaacugcaccuucgaguacgugucccagccuuuccugauggaccuggaaggcaagcagggcaacuucaagaaccugcgcgaguucguguuuaagaacaucgacggcuacuucaagaucuacagcaagcacaccccuaucaaccucgugcgggaucugccucagggcuucucugcucuggaaccccugguggaucugcccaucggcaucaacaucacccgguuucagacacugcuggcccugcacagaagcuaccugacaccuggcgauagcagcagcggauggacagcuggugccgccgcuuacuaugugggcuaccugcagccuagaaccuuccugcugaaguacaacgagaacggcaccaucaccgacgccguggauugugcucuggauccucugagcgagacaaagugcacccugaaguccuucaccguggaaaagggcaucuaccagaccagcaacuuccgggugcagcccaccgaauccaucgugcgguuccccaauaucaccaaucugugccccuucggcgagguguucaaugccaccagauucgccucuguguacgccuggaaccggaagcggaucagcaauugcguggccgacuacuccgugcuguacaacuccgccagcuucagcaccuucaagugcuacggcguguccccuaccaagcugaacgaccugugcuucacaaacguguacgccgacagcuucgugauccggggagaugaagugcggcagauugccccuggacagacaggcaagaucgccgacuacaacuacaagcugcccgacgacuucaccggcugugugauugccuggaacagcaacaaccuggacuccaaagucggcggcaacuacaauuaccuguaccggcuguuccggaaguccaaucugaagcccuucgagcgggacaucuccaccgagaucuaucaggccggcagcaccccuuguaacggcguggaaggcuucaacugcuacuucccacugcaguccuacggcuuucagcccacauacggcgugggcuaucagcccuacagagugguggugcugagcuucgaacugcugcaugccccugccacagugugcggcccuaagaaaagcaccaaucucgugaagaacaaaugcgugaacuucaacuucaacggccugaccggcaccggcgugcugacagagagcaacaagaaguuccugccauuccagcaguuuggccgggauaucgccgauaccacagacgccguuagagauccccagacacuggaaauccuggacaucaccccuugcagcuucggcggagugucugugaucaccccuggcaccaacaccagcaaucagguggcagugcuguaccagggcgugaacuguaccgaagugcccguggccauucacgccgaucagcugacaccuacauggcggguguacuccaccggcagcaauguguuucagaccagagccggcugucugaucggagccgagcacgugaacaauagcuacgagugcgacauccccaucggcgcuggaaucugcgccagcuaccagacacagacaaacagcccucggagagccagaagcguggccagccagagcaucauugccuacacaaugucucugggcgccgagaacagcguggccuacuccaacaacucuaucgcuauccccaccaacuucaccaucagcgugaccacagagauccugccuguguccaugaccaagaccagcguggacugcaccauguacaucugcggcgauuccaccgagugcuccaaccugcugcugcaguacggcagcuucugcacccagcugaauagagcccugacagggaucgccguggaacaggacaagaacacccaagagguguucgcccaagugaagcagaucuacaagaccccuccuaucaaggacuucggcggcuucaauuucagccagauucugcccgauccuagcaagcccagcaagcggagcuucaucgaggaccugcuguucaacaaagugacacuggccgacgccggcuucaucaagcaguauggcgauugucugggcgacauugccgccagggaucugauuugcgcccagaaguuuaacggacugacagugcugccuccucugcugaccgaugagaugaucgcccaguacacaucugcccugcuggccggcacaaucacaagcggcuggacauuuggagcaggcgccgcucugcagauccccuuugcuaugcagauggccuaccgguucaacggcaucggagugacccagaaugugcuguacgagaaccagaagcugaucgccaaccaguucaacagcgccaucggcaagauccaggacagccugagcagcacagcaagcgcccugggaaagcugcaggacguggucaaccagaaugcccaggcacugaacacccuggucaagcagcuguccuccaacuucggcgccaucagcucugugcugaacgauauccugagcagacuggacccuccugaggccgaggugcagaucgacagacugaucacaggcagacugcagagccuccagacauacgugacccagcagcugaucagagccgccgagauuagagccucugccaaucuggccgccaccaagaugucugagugugugcugggccagagcaagagaguggacuuuugcggcaagggcuaccaccugaugagcuucccucagucugccccucacggcgugguguuucugcacgugacauaugugcccgcucaagagaagaauuucaccaccgcuccagccaucugccacgacggcaaagcccacuuuccuagagaaggcguguucguguccaacggcacccauugguucgugacacagcggaacuucuacgagccccagaucaucaccaccgacaacaccuucgugucuggcaacugcgacgucgugaucggcauugugaacaauaccguguacgacccucugcagcccgagcuggacagcuucaaagaggaacuggacaaguacuuuaagaaccacacaagccccgacguggaccugggcgauaucagcggaaucaaugccagcgucgugaacauccagaaagagaucgaccggcugaacgagguggccaagaaucugaacgagagccugaucgaccugcaagaacuggggaaguacgagcaguacaucaaguggcccugguacaucuggcugggcuuuaucgccggacugauugccaucgugauggucacaaucaugcuguguugcaugaccagcugcuguagcugccugaagggcuguuguagcuguggcagcugcugcaaguucgacgaggacgauucugagcccgugcugaagggcgugaaacugcacuacacaugaggacuaguuauaagacugacuagcccgaugggccucccaacgggcccuccuccccuccuugcaccgagagaucuaaaaaaaaaaaaaaaaaaaaaaaaaaaaaaaaaaaaaaaaaaaaaaaaaaaaaaaaaaaaaaaaaaaaaaaaaaaaaaaaaaaaaaaaaaaaaaaaaaaa

SEQ ID NO: 26033 - RNA, 4005 nt, Artificial Sequence
  SARS-CoV-2/Wuhan/WIV05/2019__EPI_ISL_402128 spike protein mRNA gc mod (1-1273)(K986P_V987P_H69del_V70del_D614G)
aggagaaagcuuaccauguucguguuccuggugcugcugccucugguguccagccagugugugaaccugaccaccagaacacagcugccuccagccuacaccaacagcuuuaccagaggcguguacuaccccgacaagguguucagauccagcgugcugcacucuacccaggaccuguuccugccuuucuucagcaacgugaccugguuccacgccaucuccggcaccaauggcaccaagagauucgacaaccccgugcugcccuucaacgacgggguguacuuugccagcaccgagaaguccaacaucaucagaggcuggaucuucggcaccacacuggacagcaagacccagagccugcugaucgugaacaacgccaccaacguggucaucaaagugugcgaguuccaguucugcaacgaccccuuccugggcgucuacuaccacaagaacaacaagagcuggauggaaagcgaguuccggguguacagcagcgccaacaacugcaccuucgaguacgugucccagccuuuccugauggaccuggaaggcaagcagggcaacuucaagaaccugcgcgaguucguguuuaagaacaucgacggcuacuucaagaucuacagcaagcacaccccuaucaaccucgugcgggaucugccucagggcuucucugcucuggaaccccugguggaucugcccaucggcaucaacaucacccgguuucagacacugcuggcccugcacagaagcuaccugacaccuggcgauagcagcagcggauggacagcuggugccgccgcuuacuaugugggcuaccugcagccuagaaccuuccugcugaaguacaacgagaacggcaccaucaccgacgccguggauugugcucuggauccucugagcgagacaaagugcacccugaaguccuucaccguggaaaagggcaucuaccagaccagcaacuuccgggugcagcccaccgaauccaucgugcgguuccccaauaucaccaaucugugccccuucggcgagguguucaaugccaccagauucgccucuguguacgccuggaaccggaagcggaucagcaauugcguggccgacuacuccgugcuguacaacuccgccagcuucagcaccuucaagugcuacggcguguccccuaccaagcugaacgaccugugcuucacaaacguguacgccgacagcuucgugauccggggagaugaagugcggcagauugccccuggacagacaggcaagaucgccgacuacaacuacaagcugcccgacgacuucaccggcugugugauugccuggaacagcaacaaccuggacuccaaagucggcggcaacuacaauuaccuguaccggcuguuccggaaguccaaucugaagcccuucgagcgggacaucuccaccgagaucuaucaggccggcagcaccccuuguaacggcguggaaggcuucaacugcuacuucccacugcaguccuacggcuuucagcccacaaauggcgugggcuaucagcccuacagagugguggugcugagcuucgaacugcugcaugccccugccacagugugcggcccuaagaaaagcaccaaucucgugaagaacaaaugcgugaacuucaacuucaacggccugaccggcaccggcgugcugacagagagcaacaagaaguuccugccauuccagcaguuuggccgggauaucgccgauaccacagacgccguuagagauccccagacacuggaaauccuggacaucaccccuugcagcuucggcggagugucugugaucaccccuggcaccaacaccagcaaucagguggcagugcuguaccagggcgugaacuguaccgaagugcccguggccauucacgccgaucagcugacaccuacauggcggguguacuccaccggcagcaauguguuucagaccagagccggcugucugaucggagccgagcacgugaacaauagcuacgagugcgacauccccaucggcgcuggaaucugcgccagcuaccagacacagacaaacagcccucggagagccagaagcguggccagccagagcaucauugccuacacaaugucucugggcgccgagaacagcguggccuacuccaacaacucuaucgcuauccccaccaacuucaccaucagcgugaccacagagauccugccuguguccaugaccaagaccagcguggacugcaccauguacaucugcggcgauuccaccgagugcuccaaccugcugcugcaguacggcagcuucugcacccagcugaauagagcccugacagggaucgccguggaacaggacaagaacacccaagagguguucgcccaagugaagcagaucuacaagaccccuccuaucaaggacuucggcggcuucaauuucagccagauucugcccgauccuagcaagcccagcaagcggagcuucaucgaggaccugcuguucaacaaagugacacuggccgacgccggcuucaucaagcaguauggcgauugucugggcgacauugccgccagggaucugauuugcgcccagaaguuuaacggacugacagugcugccuccucugcugaccgaugagaugaucgcccaguacacaucugcccugcuggccggcacaaucacaagcggcuggacauuuggagcaggcgccgcucugcagauccccuuugcuaugcagauggccuaccgguucaacggcaucggagugacccagaaugugcuguacgagaaccagaagcugaucgccaaccaguucaacagcgccaucggcaagauccaggacagccugagcagcacagcaagcgcccugggaaagcugcaggacguggucaaccagaaugcccaggcacugaacacccuggucaagcagcuguccuccaacuucggcgccaucagcucugugcugaacgauauccugagcagacuggacccuccugaggccgaggugcagaucgacagacugaucacaggcagacugcagagccuccagacauacgugacccagcagcugaucagagccgccgagauuagagccucugccaaucuggccgccaccaagaugucugagugugugcugggccagagcaagagaguggacuuuugcggcaagggcuaccaccugaugagcuucccucagucugccccucacggcgugguguuucugcacgugacauaugugcccgcucaagagaagaauuucaccaccgcuccagccaucugccacgacggcaaagcccacuuuccuagagaaggcguguucguguccaacggcacccauugguucgugacacagcggaacuucuacgagccccagaucaucaccaccgacaacaccuucgugucuggcaacugcgacgucgugaucggcauugugaacaauaccguguacgacccucugcagcccgagcuggacagcuucaaagaggaacuggacaaguacuuuaagaaccacacaagccccgacguggaccugggcgauaucagcggaaucaaugccagcgucgugaacauccagaaagagaucgaccggcugaacgagguggccaagaaucugaacgagagccugaucgaccugcaagaacuggggaaguacgagcaguacaucaaguggcccugguacaucuggcugggcuuuaucgccggacugauugccaucgugauggucacaaucaugcuguguugcaugaccagcugcuguagcugccugaagggcuguuguagcuguggcagcugcugcaaguucgacgaggacgauucugagcccgugcugaagggcgugaaacugcacuacacaugaggacuaguuauaagacugacuagcccgaugggccucccaacgggcccuccuccccuccuugcaccgagagaucuaaaaaaaaaaaaaaaaaaaaaaaaaaaaaaaaaaaaaaaaaaaaaaaaaaaaaaaaaaaaaaaaaaaaaaaaaaaaaaaaaaaaaaaaaaaaaaaaaaaa

SEQ ID NO: 26034 - RNA, 4011 nt, Artificial Sequence
  SARS-CoV-2/Wuhan/WIV05/2019__EPI_ISL_402128 spike protein mRNA gc mod (1-1273)(K986P_V987P_Y453F_D614G)
aggagaaagcuuaccauguucguguuccuggugcugcugccucugguguccagccagugugugaaccugaccaccagaacacagcugccuccagccuacaccaacagcuuuaccagaggcguguacuaccccgacaagguguucagauccagcgugcugcacucuacccaggaccuguuccugccuuucuucagcaacgugaccugguuccacgccauccacguguccggcaccaauggcaccaagagauucgacaaccccgugcugcccuucaacgacgggguguacuuugccagcaccgagaaguccaacaucaucagaggcuggaucuucggcaccacacuggacagcaagacccagagccugcugaucgugaacaacgccaccaacguggucaucaaagugugcgaguuccaguucugcaacgaccccuuccugggcgucuacuaccacaagaacaacaagagcuggauggaaagcgaguuccggguguacagcagcgccaacaacugcaccuucgaguacgugucccagccuuuccugauggaccuggaaggcaagcagggcaacuucaagaaccugcgcgaguucguguuuaagaacaucgacggcuacuucaagaucuacagcaagcacaccccuaucaaccucgugcgggaucugccucagggcuucucugcucuggaaccccugguggaucugcccaucggcaucaacaucacccgguuucagacacugcuggcccugcacagaagcuaccugacaccuggcgauagcagcagcggauggacagcuggugccgccgcuuacuaugugggcuaccugcagccuagaaccuuccugcugaaguacaacgagaacggcaccaucaccgacgccguggauugugcucuggauccucugagcgagacaaagugcacccugaaguccuucaccguggaaaagggcaucuaccagaccagcaacuuccgggugcagcccaccgaauccaucgugcgguuccccaauaucaccaaucugugccccuucggcgagguguucaaugccaccagauucgccucuguguacgccuggaaccggaagcggaucagcaauugcguggccgacuacuccgugcuguacaacuccgccagcuucagcaccuucaagugcuacggcguguccccuaccaagcugaacgaccugugcuucacaaacguguacgccgacagcuucgugauccggggagaugaagugcggcagauugccccuggacagacaggcaagaucgccgacuacaacuacaagcugcccgacgacuucaccggcugugugauugccuggaacagcaacaaccuggacuccaaagucggcggcaacuacaauuaccuguuccggcuguuccggaaguccaaucugaagcccuucgagcgggacaucuccaccgagaucuaucaggccggcagcaccccuuguaacggcguggaaggcuucaacugcuacuucccacugcaguccuacggcuuucagcccacaaauggcgugggcuaucagcccuacagagugguggugcugagcuucgaacugcugcaugccccugccacagugugcggcccuaagaaaagcaccaaucucgugaagaacaaaugcgugaacuucaacuucaacggccugaccggcaccggcgugcugacagagagcaacaagaaguuccugccauuccagcaguuuggccgggauaucgccgauaccacagacgccguuagagauccccagacacuggaaauccuggacaucaccccuugcagcuucggcggagugucugugaucaccccuggcaccaacaccagcaaucagguggcagugcuguaccagggcgugaacuguaccgaagugcccguggccauucacgccgaucagcugacaccuacauggcggguguacuccaccggcagcaauguguuucagaccagagccggcugucugaucggagccgagcacgugaacaauagcuacgagugcgacauccccaucggcgcuggaaucugcgccagcuaccagacacagacaaacagcccucggagagccagaagcguggccagccagagcaucauugccuacacaaugucucugggcgccgagaacagcguggccuacuccaacaacucuaucgcuauccccaccaacuucaccaucagcgugaccacagagauccugccuguguccaugaccaagaccagcguggacugcaccauguacaucugcggcgauuccaccgagugcuccaaccugcugcugcaguacggcagcuucugcacccagcugaauagagcccugacagggaucgccguggaacaggacaagaacacccaagagguguucgcccaagugaagcagaucuacaagaccccuccuaucaaggacuucggcggcuucaauuucagccagauucugcccgauccuagcaagcccagcaagcggagcuucaucgaggaccugcuguucaacaaagugacacuggccgacgccggcuucaucaagcaguauggcgauugucugggcgacauugccgccagggaucugauuugcgcccagaaguuuaacggacugacagugcugccuccucugcugaccgaugagaugaucgcccaguacacaucugcccugcuggccggcacaaucacaagcggcuggacauuuggagcaggcgccgcucugcagauccccuuugcuaugcagauggccuaccgguucaacggcaucggagugacccagaaugugcuguacgagaaccagaagcugaucgccaaccaguucaacagcgccaucggcaagauccaggacagccugagcagcacagcaagcgcccugggaaagcugcaggacguggucaaccagaaugcccaggcacugaacacccuggucaagcagcuguccuccaacuucggcgccaucagcucugugcugaacgauauccugagcagacuggacccuccugaggccgaggugcagaucgacagacugaucacaggcagacugcagagccuccagacauacgugacccagcagcugaucagagccgccgagauuagagccucugccaaucuggccgccaccaagaugucugagugugugcugggccagagcaagagaguggacuuuugcggcaagggcuaccaccugaugagcuucccucagucugccccucacggcgugguguuucugcacgugacauaugugcccgcucaagagaagaauuucaccaccgcuccagccaucugccacgacggcaaagcccacuuuccuagagaaggcguguucguguccaacggcacccauugguucgugacacagcggaacuucuacgagccccagaucaucaccaccgacaacaccuucgugucuggcaacugcgacgucgugaucggcauugugaacaauaccguguacgacccucugcagcccgagcuggacagcuucaaagaggaacuggacaaguacuuuaagaaccacacaagccccgacguggaccugggcgauaucagcggaaucaaugccagcgucgugaacauccagaaagagaucgaccggcugaacgagguggccaagaaucugaacgagagccugaucgaccugcaagaacuggggaaguacgagcaguacaucaaguggcccugguacaucuggcugggcuuuaucgccggacugauugccaucgugauggucacaaucaugcuguguugcaugaccagcugcuguagcugccugaagggcuguuguagcuguggcagcugcugcaaguucgacgaggacgauucugagcccgugcugaagggcgugaaacugcacuacacaugaggacuaguuauaagacugacuagcccgaugggccucccaacgggcccuccuccccuccuugcaccgagagaucuaaaaaaaaaaaaaaaaaaaaaaaaaaaaaaaaaaaaaaaaaaaaaaaaaaaaaaaaaaaaaaaaaaaaaaaaaaaaaaaaaaaaaaaaaaaaaaaaaaaa

SEQ ID NO: 26035 - RNA, 4011 nt, Artificial Sequence
  SARS-CoV-2/Wuhan/WIV05/2019__EPI_ISL_402128 spike protein mRNA gc mod (1-1273)(K986P_V987P_D614G_I692V)
aggagaaagcuuaccauguucguguuccuggugcugcugccucugguguccagccagugugugaaccugaccaccagaacacagcugccuccagccuacaccaacagcuuuaccagaggcguguacuaccccgacaagguguucagauccagcgugcugcacucuacccaggaccuguuccugccuuucuucagcaacgugaccugguuccacgccauccacguguccggcaccaauggcaccaagagauucgacaaccccgugcugcccuucaacgacgggguguacuuugccagcaccgagaaguccaacaucaucagaggcuggaucuucggcaccacacuggacagcaagacccagagccugcugaucgugaacaacgccaccaacguggucaucaaagugugcgaguuccaguucugcaacgaccccuuccugggcgucuacuaccacaagaacaacaagagcuggauggaaagcgaguuccggguguacagcagcgccaacaacugcaccuucgaguacgugucccagccuuuccugauggaccuggaaggcaagcagggcaacuucaagaaccugcgcgaguucguguuuaagaacaucgacggcuacuucaagaucuacagcaagcacaccccuaucaaccucgugcgggaucugccucagggcuucucugcucuggaaccccugguggaucugcccaucggcaucaacaucacccgguuucagacacugcuggcccugcacagaagcuaccugacaccuggcgauagcagcagcggauggacagcuggugccgccgcuuacuaugugggcuaccugcagccuagaaccuuccugcugaaguacaacgagaacggcaccaucaccgacgccguggauugugcucuggauccucugagcgagacaaagugcacccugaaguccuucaccguggaaaagggcaucuaccagaccagcaacuuccgggugcagcccaccgaauccaucgugcgguuccccaauaucaccaaucugugccccuucggcgagguguucaaugccaccagauucgccucuguguacgccuggaaccggaagcggaucagcaauugcguggccgacuacuccgugcuguacaacuccgccagcuucagcaccuucaagugcuacggcguguccccuaccaagcugaacgaccugugcuucacaaacguguacgccgacagcuucgugauccggggagaugaagugcggcagauugccccuggacagacaggcaagaucgccgacuacaacuacaagcugcccgacgacuucaccggcugugugauugccuggaacagcaacaaccuggacuccaaagucggcggcaacuacaauuaccuguaccggcuguuccggaaguccaaucugaagcccuucgagcgggacaucuccaccgagaucuaucaggccggcagcaccccuuguaacggcguggaaggcuucaacugcuacuucccacugcaguccuacggcuuucagcccacaaauggcgugggcuaucagcccuacagagugguggugcugagcuucgaacugcugcaugccccugccacagugugcggcccuaagaaaagcaccaaucucgugaagaacaaaugcgugaacuucaacuucaacggccugaccggcaccggcgugcugacagagagcaacaagaaguuccugccauuccagcaguuuggccgggauaucgccgauaccacagacgccguuagagauccccagacacuggaaauccuggacaucaccccuugcagcuucggcggagugucugugaucaccccuggcaccaacaccagcaaucagguggcagugcuguaccagggcgugaacuguaccgaagugcccguggccauucacgccgaucagcugacaccuacauggcggguguacuccaccggcagcaauguguuucagaccagagccggcugucugaucggagccgagcacgugaacaauagcuacgagugcgacauccccaucggcgcuggaaucugcgccagcuaccagacacagacaaacagcccucggagagccagaagcguggccagccagagcgugauugccuacacaaugucucugggcgccgagaacagcguggccuacuccaacaacucuaucgcuauccccaccaacuucaccaucagcgugaccacagagauccugccuguguccaugaccaagaccagcguggacugcaccauguacaucugcggcgauuccaccgagugcuccaaccugcugcugcaguacggcagcuucugcacccagcugaauagagcccugacagggaucgccguggaacaggacaagaacacccaagagguguucgcccaagugaagcagaucuacaagaccccuccuaucaaggacuucggcggcuucaauuucagccagauucugcccgauccuagcaagcccagcaagcggagcuucaucgaggaccugcuguucaacaaagugacacuggccgacgccggcuucaucaagcaguauggcgauugucugggcgacauugccgccagggaucugauuugcgcccagaaguuuaacggacugacagugcugccuccucugcugaccgaugagaugaucgcccaguacacaucugcccugcuggccggcacaaucacaagcggcuggacauuuggagcaggcgccgcucugcagauccccuuugcuaugcagauggccuaccgguucaacggcaucggagugacccagaaugugcuguacgagaaccagaagcugaucgccaaccaguucaacagcgccaucggcaagauccaggacagccugagcagcacagcaagcgcccugggaaagcugcaggacguggucaaccagaaugcccaggcacugaacacccuggucaagcagcuguccuccaacuucggcgccaucagcucugugcugaacgauauccugagcagacuggacccuccugaggccgaggugcagaucgacagacugaucacaggcagacugcagagccuccagacauacgugacccagcagcugaucagagccgccgagauuagagccucugccaaucuggccgccaccaagaugucugagugugugcugggccagagcaagagaguggacuuuugcggcaagggcuaccaccugaugagcuucccucagucugccccucacggcgugguguuucugcacgugacauaugugcccgcucaagagaagaauuucaccaccgcuccagccaucugccacgacggcaaagcccacuuuccuagagaaggcguguucguguccaacggcacccauugguucgugacacagcggaacuucuacgagccccagaucaucaccaccgacaacaccuucgugucuggcaacugcgacgucgugaucggcauugugaacaauaccguguacgacccucugcagcccgagcuggacagcuucaaagaggaacuggacaaguacuuuaagaaccacacaagccccgacguggaccugggcgauaucagcggaaucaaugccagcgucgugaacauccagaaagagaucgaccggcugaacgagguggccaagaaucugaacgagagccugaucgaccugcaagaacuggggaaguacgagcaguacaucaaguggcccugguacaucuggcugggcuuuaucgccggacugauugccaucgugauggucacaaucaugcuguguugcaugaccagcugcuguagcugccugaagggcuguuguagcuguggcagcugcugcaaguucgacgaggacgauucugagcccgugcugaagggcgugaaacugcacuacacaugaggacuaguuauaagacugacuagcccgaugggccucccaacgggcccuccuccccuccuugcaccgagagaucuaaaaaaaaaaaaaaaaaaaaaaaaaaaaaaaaaaaaaaaaaaaaaaaaaaaaaaaaaaaaaaaaaaaaaaaaaaaaaaaaaaaaaaaaaaaaaaaaaaaa

SEQ ID NO: 26036 - RNA, 4011 nt, Artificial Sequence
  SARS-CoV-2/Wuhan/WIV05/2019__EPI_ISL_402128 spike protein mRNA gc mod (1-1273)(K986P_V987P_D614G_M1229I)
aggagaaagcuuaccauguucguguuccuggugcugcugccucugguguccagccagugugugaaccugaccaccagaacacagcugccuccagccuacaccaacagcuuuaccagaggcguguacuaccccgacaagguguucagauccagcgugcugcacucuacccaggaccuguuccugccuuucuucagcaacgugaccugguuccacgccauccacguguccggcaccaauggcaccaagagauucgacaaccccgugcugcccuucaacgacgggguguacuuugccagcaccgagaaguccaacaucaucagaggcuggaucuucggcaccacacuggacagcaagacccagagccugcugaucgugaacaacgccaccaacguggucaucaaagugugcgaguuccaguucugcaacgaccccuuccugggcgucuacuaccacaagaacaacaagagcuggauggaaagcgaguuccggguguacagcagcgccaacaacugcaccuucgaguacgugucccagccuuuccugauggaccuggaaggcaagcagggcaacuucaagaaccugcgcgaguucguguuuaagaacaucgacggcuacuucaagaucuacagcaagcacaccccuaucaaccucgugcgggaucugccucagggcuucucugcucuggaaccccugguggaucugcccaucggcaucaacaucacccgguuucagacacugcuggcccugcacagaagcuaccugacaccuggcgauagcagcagcggauggacagcuggugccgccgcuuacuaugugggcuaccugcagccuagaaccuuccugcugaaguacaacgagaacggcaccaucaccgacgccguggauugugcucuggauccucugagcgagacaaagugcacccugaaguccuucaccguggaaaagggcaucuaccagaccagcaacuuccgggugcagcccaccgaauccaucgugcgguuccccaauaucaccaaucugugccccuucggcgagguguucaaugccaccagauucgccucuguguacgccuggaaccggaagcggaucagcaauugcguggccgacuacuccgugcuguacaacuccgccagcuucagcaccuucaagugcuacggcguguccccuaccaagcugaacgaccugugcuucacaaacguguacgccgacagcuucgugauccggggagaugaagugcggcagauugccccuggacagacaggcaagaucgccgacuacaacuacaagcugcccgacgacuucaccggcugugugauugccuggaacagcaacaaccuggacuccaaagucggcggcaacuacaauuaccuguaccggcuguuccggaaguccaaucugaagcccuucgagcgggacaucuccaccgagaucuaucaggccggcagcaccccuuguaacggcguggaaggcuucaacugcuacuucccacugcaguccuacggcuuucagcccacaaauggcgugggcuaucagcccuacagagugguggugcugagcuucgaacugcugcaugccccugccacagugugcggcccuaagaaaagcaccaaucucgugaagaacaaaugcgugaacuucaacuucaacggccugaccggcaccggcgugcugacagagagcaacaagaaguuccugccauuccagcaguuuggccgggauaucgccgauaccacagacgccguuagagauccccagacacuggaaauccuggacaucaccccuugcagcuucggcggagugucugugaucaccccuggcaccaacaccagcaaucagguggcagugcuguaccagggcgugaacuguaccgaagugcccguggccauucacgccgaucagcugacaccuacauggcggguguacuccaccggcagcaauguguuucagaccagagccggcugucugaucggagccgagcacgugaacaauagcuacgagugcgacauccccaucggcgcuggaaucugcgccagcuaccagacacagacaaacagcccucggagagccagaagcguggccagccagagcaucauugccuacacaaugucucugggcgccgagaacagcguggccuacuccaacaacucuaucgcuauccccaccaacuucaccaucagcgugaccacagagauccugccuguguccaugaccaagaccagcguggacugcaccauguacaucugcggcgauuccaccgagugcuccaaccugcugcugcaguacggcagcuucugcacccagcugaauagagcccugacagggaucgccguggaacaggacaagaacacccaagagguguucgcccaagugaagcagaucuacaagaccccuccuaucaaggacuucggcggcuucaauuucagccagauucugcccgauccuagcaagcccagcaagcggagcuucaucgaggaccugcuguucaacaaagugacacuggccgacgccggcuucaucaagcaguauggcgauugucugggcgacauugccgccagggaucugauuugcgcccagaaguuuaacggacugacagugcugccuccucugcugaccgaugagaugaucgcccaguacacaucugcccugcuggccggcacaaucacaagcggcuggacauuuggagcaggcgccgcucugcagauccccuuugcuaugcagauggccuaccgguucaacggcaucggagugacccagaaugugcuguacgagaaccagaagcugaucgccaaccaguucaacagcgccaucggcaagauccaggacagccugagcagcacagcaagcgcccugggaaagcugcaggacguggucaaccagaaugcccaggcacugaacacccuggucaagcagcuguccuccaacuucggcgccaucagcucugugcugaacgauauccugagcagacuggacccuccugaggccgaggugcagaucgacagacugaucacaggcagacugcagagccuccagacauacgugacccagcagcugaucagagccgccgagauuagagccucugccaaucuggccgccaccaagaugucugagugugugcugggccagagcaagagaguggacuuuugcggcaagggcuaccaccugaugagcuucccucagucugccccucacggcgugguguuucugcacgugacauaugugcccgcucaagagaagaauuucaccaccgcuccagccaucugccacgacggcaaagcccacuuuccuagagaaggcguguucguguccaacggcacccauugguucgugacacagcggaacuucuacgagccccagaucaucaccaccgacaacaccuucgugucuggcaacugcgacgucgugaucggcauugugaacaauaccguguacgacccucugcagcccgagcuggacagcuucaaagaggaacuggacaaguacuuuaagaaccacacaagccccgacguggaccugggcgauaucagcggaaucaaugccagcgucgugaacauccagaaagagaucgaccggcugaacgagguggccaagaaucugaacgagagccugaucgaccugcaagaacuggggaaguacgagcaguacaucaaguggcccugguacaucuggcugggcuuuaucgccggacugauugccaucgugaucgucacaaucaugcuguguugcaugaccagcugcuguagcugccugaagggcuguuguagcuguggcagcugcugcaaguucgacgaggacgauucugagcccgugcugaagggcgugaaacugcacuacacaugaggacuaguuauaagacugacuagcccgaugggccucccaacgggcccuccuccccuccuugcaccgagagaucuaaaaaaaaaaaaaaaaaaaaaaaaaaaaaaaaaaaaaaaaaaaaaaaaaaaaaaaaaaaaaaaaaaaaaaaaaaaaaaaaaaaaaaaaaaaaaaaaaaaa

SEQ ID NO: 26037 - RNA, 4005 nt, Artificial Sequence
  SARS-CoV-2/Wuhan/WIV05/2019__EPI_ISL_402128 spike protein mRNA gc mod (1-1273)(K986P_V987P_H69del_V70del_A222V_Y453F_S477N_D614G_I692V)
aggagaaagcuuaccauguucguguuccuggugcugcugccucugguguccagccagugugugaaccugaccaccagaacacagcugccuccagccuacaccaacagcuuuaccagaggcguguacuaccccgacaagguguucagauccagcgugcugcacucuacccaggaccuguuccugccuuucuucagcaacgugaccugguuccacgccaucuccggcaccaauggcaccaagagauucgacaaccccgugcugcccuucaacgacgggguguacuuugccagcaccgagaaguccaacaucaucagaggcuggaucuucggcaccacacuggacagcaagacccagagccugcugaucgugaacaacgccaccaacguggucaucaaagugugcgaguuccaguucugcaacgaccccuuccugggcgucuacuaccacaagaacaacaagagcuggauggaaagcgaguuccggguguacagcagcgccaacaacugcaccuucgaguacgugucccagccuuuccugauggaccuggaaggcaagcagggcaacuucaagaaccugcgcgaguucguguuuaagaacaucgacggcuacuucaagaucuacagcaagcacaccccuaucaaccucgugcgggaucugccucagggcuucucugugcuggaaccccugguggaucugcccaucggcaucaacaucacccgguuucagacacugcuggcccugcacagaagcuaccugacaccuggcgauagcagcagcggauggacagcuggugccgccgcuuacuaugugggcuaccugcagccuagaaccuuccugcugaaguacaacgagaacggcaccaucaccgacgccguggauugugcucuggauccucugagcgagacaaagugcacccugaaguccuucaccguggaaaagggcaucuaccagaccagcaacuuccgggugcagcccaccgaauccaucgugcgguuccccaauaucaccaaucugugccccuucggcgagguguucaaugccaccagauucgccucuguguacgccuggaaccggaagcggaucagcaauugcguggccgacuacuccgugcuguacaacuccgccagcuucagcaccuucaagugcuacggcguguccccuaccaagcugaacgaccugugcuucacaaacguguacgccgacagcuucgugauccggggagaugaagugcggcagauugccccuggacagacaggcaagaucgccgacuacaacuacaagcugcccgacgacuucaccggcugugugauugccuggaacagcaacaaccuggacuccaaagucggcggcaacuacaauuaccuguuccggcuguuccggaaguccaaucugaagcccuucgagcgggacaucuccaccgagaucuaucaggccggcaacaccccuuguaacggcguggaaggcuucaacugcuacuucccacugcaguccuacggcuuucagcccacaaauggcgugggcuaucagcccuacagagugguggugcugagcuucgaacugcugcaugccccugccacagugugcggcccuaagaaaagcaccaaucucgugaagaacaaaugcgugaacuucaacuucaacggccugaccggcaccggcgugcugacagagagcaacaagaaguuccugccauuccagcaguuuggccgggauaucgccgauaccacagacgccguuagagauccccagacacuggaaauccuggacaucaccccuugcagcuucggcggagugucugugaucaccccuggcaccaacaccagcaaucagguggcagugcuguaccagggcgugaacuguaccgaagugcccguggccauucacgccgaucagcugacaccuacauggcggguguacuccaccggcagcaauguguuucagaccagagccggcugucugaucggagccgagcacgugaacaauagcuacgagugcgacauccccaucggcgcuggaaucugcgccagcuaccagacacagacaaacagcccucggagagccagaagcguggccagccagagcgugauugccuacacaaugucucugggcgccgagaacagcguggccuacuccaacaacucuaucgcuauccccaccaacuucaccaucagcgugaccacagagauccugccuguguccaugaccaagaccagcguggacugcaccauguacaucugcggcgauuccaccgagugcuccaaccugcugcugcaguacggcagcuucugcacccagcugaauagagcccugacagggaucgccguggaacaggacaagaacacccaagagguguucgcccaagugaagcagaucuacaagaccccuccuaucaaggacuucggcggcuucaauuucagccagauucugcccgauccuagcaagcccagcaagcggagcuucaucgaggaccugcuguucaacaaagugacacuggccgacgccggcuucaucaagcaguauggcgauugucugggcgacauugccgccagggaucugauuugcgcccagaaguuuaacggacugacagugcugccuccucugcugaccgaugagaugaucgcccaguacacaucugcccugcuggccggcacaaucacaagcggcuggacauuuggagcaggcgccgcucugcagauccccuuugcuaugcagauggccuaccgguucaacggcaucggagugacccagaaugugcuguacgagaaccagaagcugaucgccaaccaguucaacagcgccaucggcaagauccaggacagccugagcagcacagcaagcgcccugggaaagcugcaggacguggucaaccagaaugcccaggcacugaacacccuggucaagcagcuguccuccaacuucggcgccaucagcucugugcugaacgauauccugagcagacuggacccuccugaggccgaggugcagaucgacagacugaucacaggcagacugcagagccuccagacauacgugacccagcagcugaucagagccgccgagauuagagccucugccaaucuggccgccaccaagaugucugagugugugcugggccagagcaagagaguggacuuuugcggcaagggcuaccaccugaugagcuucccucagucugccccucacggcgugguguuucugcacgugacauaugugcccgcucaagagaagaauuucaccaccgcuccagccaucugccacgacggcaaagcccacuuuccuagagaaggcguguucguguccaacggcacccauugguucgugacacagcggaacuucuacgagccccagaucaucaccaccgacaacaccuucgugucuggcaacugcgacgucgugaucggcauugugaacaauaccguguacgacccucugcagcccgagcuggacagcuucaaagaggaacuggacaaguacuuuaagaaccacacaagccccgacguggaccugggcgauaucagcggaaucaaugccagcgucgugaacauccagaaagagaucgaccggcugaacgagguggccaagaaucugaacgagagccugaucgaccugcaagaacuggggaaguacgagcaguacaucaaguggcccugguacaucuggcugggcuuuaucgccggacugauugccaucgugauggucacaaucaugcuguguugcaugaccagcugcuguagcugccugaagggcuguuguagcuguggcagcugcugcaaguucgacgaggacgauucugagcccgugcugaagggcgugaaacugcacuacacaugaggacuaguuauaagacugacuagcccgaugggccucccaacgggcccuccuccccuccuugcaccgagagaucuaaaaaaaaaaaaaaaaaaaaaaaaaaaaaaaaaaaaaaaaaaaaaaaaaaaaaaaaaaaaaaaaaaaaaaaaaaaaaaaaaaaaaaaaaaaaaaaaaaaa

SEQ ID NO: 26038 - RNA, 4005 nt, Artificial Sequence
  SARS-CoV-2/Wuhan/WIV05/2019__EPI_ISL_402128 spike protein mRNA gc mod (1-1273)(K986P_V987P_H69del_V70del_Y453F_D614G_I692V_M1229I)
aggagaaagcuuaccauguucguguuccuggugcugcugccucugguguccagccagugugugaaccugaccaccagaacacagcugccuccagccuacaccaacagcuuuaccagaggcguguacuaccccgacaagguguucagauccagcgugcugcacucuacccaggaccuguuccugccuuucuucagcaacgugaccugguuccacgccaucuccggcaccaauggcaccaagagauucgacaaccccgugcugcccuucaacgacgggguguacuuugccagcaccgagaaguccaacaucaucagaggcuggaucuucggcaccacacuggacagcaagacccagagccugcugaucgugaacaacgccaccaacguggucaucaaagugugcgaguuccaguucugcaacgaccccuuccugggcgucuacuaccacaagaacaacaagagcuggauggaaagcgaguuccggguguacagcagcgccaacaacugcaccuucgaguacgugucccagccuuuccugauggaccuggaaggcaagcagggcaacuucaagaaccugcgcgaguucguguuuaagaacaucgacggcuacuucaagaucuacagcaagcacaccccuaucaaccucgugcgggaucugccucagggcuucucugcucuggaaccccugguggaucugcccaucggcaucaacaucacccgguuucagacacugcuggcccugcacagaagcuaccugacaccuggcgauagcagcagcggauggacagcuggugccgccgcuuacuaugugggcuaccugcagccuagaaccuuccugcugaaguacaacgagaacggcaccaucaccgacgccguggauugugcucuggauccucugagcgagacaaagugcacccugaaguccuucaccguggaaaagggcaucuaccagaccagcaacuuccgggugcagcccaccgaauccaucgugcgguuccccaauaucaccaaucugugccccuucggcgagguguucaaugccaccagauucgccucuguguacgccuggaaccggaagcggaucagcaauugcguggccgacuacuccgugcuguacaacuccgccagcuucagcaccuucaagugcuacggcguguccccuaccaagcugaacgaccugugcuucacaaacguguacgccgacagcuucgugauccggggagaugaagugcggcagauugccccuggacagacaggcaagaucgccgacuacaacuacaagcugcccgacgacuucaccggcugugugauugccuggaacagcaacaaccuggacuccaaagucggcggcaacuacaauuaccuguuccggcuguuccggaaguccaaucugaagcccuucgagcgggacaucuccaccgagaucuaucaggccggcagcaccccuuguaacggcguggaaggcuucaacugcuacuucccacugcaguccuacggcuuucagcccacaaauggcgugggcuaucagcccuacagagugguggugcugagcuucgaacugcugcaugccccugccacagugugcggcccuaagaaaagcaccaaucucgugaagaacaaaugcgugaacuucaacuucaacggccugaccggcaccggcgugcugacagagagcaacaagaaguuccugccauuccagcaguuuggccgggauaucgccgauaccacagacgccguuagagauccccagacacuggaaauccuggacaucaccccuugcagcuucggcggagugucugugaucaccccuggcaccaacaccagcaaucagguggcagugcuguaccagggcgugaacuguaccgaagugcccguggccauucacgccgaucagcugacaccuacauggcggguguacuccaccggcagcaauguguuucagaccagagccggcugucugaucggagccgagcacgugaacaauagcuacgagugcgacauccccaucggcgcuggaaucugcgccagcuaccagacacagacaaacagcccucggagagccagaagcguggccagccagagcgugauugccuacacaaugucucugggcgccgagaacagcguggccuacuccaacaacucuaucgcuauccccaccaacuucaccaucagcgugaccacagagauccugccuguguccaugaccaagaccagcguggacugcaccauguacaucugcggcgauuccaccgagugcuccaaccugcugcugcaguacggcagcuucugcacccagcugaauagagcccugacagggaucgccguggaacaggacaagaacacccaagagguguucgcccaagugaagcagaucuacaagaccccuccuaucaaggacuucggcggcuucaauuucagccagauucugcccgauccuagcaagcccagcaagcggagcuucaucgaggaccugcuguucaacaaagugacacuggccgacgccggcuucaucaagcaguauggcgauugucugggcgacauugccgccagggaucugauuugcgcccagaaguuuaacggacugacagugcugccuccucugcugaccgaugagaugaucgcccaguacacaucugcccugcuggccggcacaaucacaagcggcuggacauuuggagcaggcgccgcucugcagauccccuuugcuaugcagauggccuaccgguucaacggcaucggagugacccagaaugugcuguacgagaaccagaagcugaucgccaaccaguucaacagcgccaucggcaagauccaggacagccugagcagcacagcaagcgcccugggaaagcugcaggacguggucaaccagaaugcccaggcacugaacacccuggucaagcagcuguccuccaacuucggcgccaucagcucugugcugaacgauauccugagcagacuggacccuccugaggccgaggugcagaucgacagacugaucacaggcagacugcagagccuccagacauacgugacccagcagcugaucagagccgccgagauuagagccucugccaaucuggccgccaccaagaugucugagugugugcugggccagagcaagagaguggacuuuugcggcaagggcuaccaccugaugagcuucccucagucugccccucacggcgugguguuucugcacgugacauaugugcccgcucaagagaagaauuucaccaccgcuccagccaucugccacgacggcaaagcccacuuuccuagagaaggcguguucguguccaacggcacccauugguucgugacacagcggaacuucuacgagccccagaucaucaccaccgacaacaccuucgugucuggcaacugcgacgucgugaucggcauugugaacaauaccguguacgacccucugcagcccgagcuggacagcuucaaagaggaacuggacaaguacuuuaagaaccacacaagccccgacguggaccugggcgauaucagcggaaucaaugccagcgucgugaacauccagaaagagaucgaccggcugaacgagguggccaagaaucugaacgagagccugaucgaccugcaagaacuggggaaguacgagcaguacaucaaguggcccugguacaucuggcugggcuuuaucgccggacugauugccaucgugaucgucacaaucaugcuguguugcaugaccagcugcuguagcugccugaagggcuguuguagcuguggcagcugcugcaaguucgacgaggacgauucugagcccgugcugaagggcgugaaacugcacuacacaugaggacuaguuauaagacugacuagcccgaugggccucccaacgggcccuccuccccuccuugcaccgagagaucuaaaaaaaaaaaaaaaaaaaaaaaaaaaaaaaaaaaaaaaaaaaaaaaaaaaaaaaaaaaaaaaaaaaaaaaaaaaaaaaaaaaaaaaaaaaaaaaaaaaa

SEQ ID NO: 26039 - RNA, 4002 nt, Artificial Sequence
  SARS-CoV-2/Wuhan/WIV05/2019__EPI_ISL_402128 spike protein mRNA gc mod (1-1273)(K986P_V987P_K986P_V987P_H69del_V70del_Y144del_N501Y_A570 D_D614G_P681H_T716I_S982A_D1118H)
aggagaaagcuuaccauguucguguuccuggugcugcugccucugguguccagccagugugugaaccugaccaccagaacacagcugccuccagccuacaccaacagcuuuaccagaggcguguacuaccccgacaagguguucagauccagcgugcugcacucuacccaggaccuguuccugccuuucuucagcaacgugaccugguuccacgccaucuccggcaccaauggcaccaagagauucgacaaccccgugcugcccuucaacgacgggguguacuuugccagcaccgagaaguccaacaucaucagaggcuggaucuucggcaccacacuggacagcaagacccagagccugcugaucgugaacaacgccaccaacguggucaucaaagugugcgaguuccaguucugcaacgaccccuuccugggcgucuaccacaagaacaacaagagcuggauggaaagcgaguuccggguguacagcagcgccaacaacugcaccuucgaguacgugucccagccuuuccugauggaccuggaaggcaagcagggcaacuucaagaaccugcgcgaguucguguuuaagaacaucgacggcuacuucaagaucuacagcaagcacaccccuaucaaccucgugcgggaucugccucagggcuucucugcucuggaaccccugguggaucugcccaucggcaucaacaucacccgguuucagacacugcuggcccugcacagaagcuaccugacaccuggcgauagcagcagcggauggacagcuggugccgccgcuuacuaugugggcuaccugcagccuagaaccuuccugcugaaguacaacgagaacggcaccaucaccgacgccguggauugugcucuggauccucugagcgagacaaagugcacccugaaguccuucaccguggaaaagggcaucuaccagaccagcaacuuccgggugcagcccaccgaauccaucgugcgguuccccaauaucaccaaucugugccccuucggcgagguguucaaugccaccagauucgccucuguguacgccuggaaccggaagcggaucagcaauugcguggccgacuacuccgugcuguacaacuccgccagcuucagcaccuucaagugcuacggcguguccccuaccaagcugaacgaccugugcuucacaaacguguacgccgacagcuucgugauccggggagaugaagugcggcagauugccccuggacagacaggcaagaucgccgacuacaacuacaagcugcccgacgacuucaccggcugugugauugccuggaacagcaacaaccuggacuccaaagucggcggcaacuacaauuaccuguaccggcuguuccggaaguccaaucugaagcccuucgagcgggacaucuccaccgagaucuaucaggccggcagcaccccuuguaacggcguggaaggcuucaacugcuacuucccacugcaguccuacggcuuucagcccacauacggcgugggcuaucagcccuacagagugguggugcugagcuucgaacugcugcaugccccugccacagugugcggcccuaagaaaagcaccaaucucgugaagaacaaaugcgugaacuucaacuucaacggccugaccggcaccggcgugcugacagagagcaacaagaaguuccugccauuccagcaguuuggccgggauaucgacgauaccacagacgccguuagagauccccagacacuggaaauccuggacaucaccccuugcagcuucggcggagugucugugaucaccccuggcaccaacaccagcaaucagguggcagugcuguaccagggcgugaacuguaccgaagugcccguggccauucacgccgaucagcugacaccuacauggcggguguacuccaccggcagcaauguguuucagaccagagccggcugucugaucggagccgagcacgugaacaauagcuacgagugcgacauccccaucggcgcuggaaucugcgccagcuaccagacacagacaaacagccaccggagagccagaagcguggccagccagagcaucauugccuacacaaugucucugggcgccgagaacagcguggccuacuccaacaacucuaucgcuauccccaucaacuucaccaucagcgugaccacagagauccugccuguguccaugaccaagaccagcguggacugcaccauguacaucugcggcgauuccaccgagugcuccaaccugcugcugcaguacggcagcuucugcacccagcugaauagagcccugacagggaucgccguggaacaggacaagaacacccaagagguguucgcccaagugaagcagaucuacaagaccccuccuaucaaggacuucggcggcuucaauuucagccagauucugcccgauccuagcaagcccagcaagcggagcuucaucgaggaccugcuguucaacaaagugacacuggccgacgccggcuucaucaagcaguauggcgauugucugggcgacauugccgccagggaucugauuugcgcccagaaguuuaacggacugacagugcugccuccucugcugaccgaugagaugaucgcccaguacacaucugcccugcuggccggcacaaucacaagcggcuggacauuuggagcaggcgccgcucugcagauccccuuugcuaugcagauggccuaccgguucaacggcaucggagugacccagaaugugcuguacgagaaccagaagcugaucgccaaccaguucaacagcgccaucggcaagauccaggacagccugagcagcacagcaagcgcccugggaaagcugcaggacguggucaaccagaaugcccaggcacugaacacccuggucaagcagcuguccuccaacuucggcgccaucagcucugugcugaacgauauccuggccagacuggacccuccugaggccgaggugcagaucgacagacugaucacaggcagacugcagagccuccagacauacgugacccagcagcugaucagagccgccgagauuagagccucugccaaucuggccgccaccaagaugucugagugugugcugggccagagcaagagaguggacuuuugcggcaagggcuaccaccugaugagcuucccucagucugccccucacggcgugguguuucugcacgugacauaugugcccgcucaagagaagaauuucaccaccgcuccagccaucugccacgacggcaaagcccacuuuccuagagaaggcguguucguguccaacggcacccauugguucgugacacagcggaacuucuacgagccccagaucaucaccacccacaacaccuucgugucuggcaacugcgacgucgugaucggcauugugaacaauaccguguacgacccucugcagcccgagcuggacagcuucaaagaggaacuggacaaguacuuuaagaaccacacaagccccgacguggaccugggcgauaucagcggaaucaaugccagcgucgugaacauccagaaagagaucgaccggcugaacgagguggccaagaaucugaacgagagccugaucgaccugcaagaacuggggaaguacgagcaguacaucaaguggcccugguacaucuggcugggcuuuaucgccggacugauugccaucgugauggucacaaucaugcuguguugcaugaccagcugcuguagcugccugaagggcuguuguagcuguggcagcugcugcaaguucgacgaggacgauucugagcccgugcugaagggcgugaaacugcacuacacaugaggacuaguuauaagacugacuagcccgaugggccucccaacgggcccuccuccccuccuugcaccgagagaucuaaaaaaaaaaaaaaaaaaaaaaaaaaaaaaaaaaaaaaaaaaaaaaaaaaaaaaaaaaaaaaaaaaaaaaaaaaaaaaaaaaaaaaaaaaaaaaaaaaaa

SEQ ID NO: 26040 - RNA, 4011 nt, Artificial Sequence
  SARS-CoV-2/Wuhan/WIV05/2019__EPI_ISL_402128 spike protein mRNA gc mod (1-1273)(K986P_V987P_K986P_V987P_K417N_E484K_N501Y_D614G)
aggagaaagcuuaccauguucguguuccuggugcugcugccucugguguccagccagugugugaaccugaccaccagaacacagcugccuccagccuacaccaacagcuuuaccagaggcguguacuaccccgacaagguguucagauccagcgugcugcacucuacccaggaccuguuccugccuuucuucagcaacgugaccugguuccacgccauccacguguccggcaccaauggcaccaagagauucgacaaccccgugcugcccuucaacgacgggguguacuuugccagcaccgagaaguccaacaucaucagaggcuggaucuucggcaccacacuggacagcaagacccagagccugcugaucgugaacaacgccaccaacguggucaucaaagugugcgaguuccaguucugcaacgaccccuuccugggcgucuacuaccacaagaacaacaagagcuggauggaaagcgaguuccggguguacagcagcgccaacaacugcaccuucgaguacgugucccagccuuuccugauggaccuggaaggcaagcagggcaacuucaagaaccugcgcgaguucguguuuaagaacaucgacggcuacuucaagaucuacagcaagcacaccccuaucaaccucgugcgggaucugccucagggcuucucugcucuggaaccccugguggaucugcccaucggcaucaacaucacccgguuucagacacugcuggcccugcacagaagcuaccugacaccuggcgauagcagcagcggauggacagcuggugccgccgcuuacuaugugggcuaccugcagccuagaaccuuccugcugaaguacaacgagaacggcaccaucaccgacgccguggauugugcucuggauccucugagcgagacaaagugcacccugaaguccuucaccguggaaaagggcaucuaccagaccagcaacuuccgggugcagcccaccgaauccaucgugcgguuccccaauaucaccaaucugugccccuucggcgagguguucaaugccaccagauucgccucuguguacgccuggaaccggaagcggaucagcaauugcguggccgacuacuccgugcuguacaacuccgccagcuucagcaccuucaagugcuacggcguguccccuaccaagcugaacgaccugugcuucacaaacguguacgccgacagcuucgugauccggggagaugaagugcggcagauugccccuggacagacaggcaacaucgccgacuacaacuacaagcugcccgacgacuucaccggcugugugauugccuggaacagcaacaaccuggacuccaaagucggcggcaacuacaauuaccuguaccggcuguuccggaaguccaaucugaagcccuucgagcgggacaucuccaccgagaucuaucaggccggcagcaccccuuguaacggcgugaagggcuucaacugcuacuucccacugcaguccuacggcuuucagcccacauacggcgugggcuaucagcccuacagagugguggugcugagcuucgaacugcugcaugccccugccacagugugcggcccuaagaaaagcaccaaucucgugaagaacaaaugcgugaacuucaacuucaacggccugaccggcaccggcgugcugacagagagcaacaagaaguuccugccauuccagcaguuuggccgggauaucgccgauaccacagacgccguuagagauccccagacacuggaaauccuggacaucaccccuugcagcuucggcggagugucugugaucaccccuggcaccaacaccagcaaucagguggcagugcuguaccagggcgugaacuguaccgaagugcccguggccauucacgccgaucagcugacaccuacauggcggguguacuccaccggcagcaauguguuucagaccagagccggcugucugaucggagccgagcacgugaacaauagcuacgagugcgacauccccaucggcgcuggaaucugcgccagcuaccagacacagacaaacagcccucggagagccagaagcguggccagccagagcaucauugccuacacaaugucucugggcgccgagaacagcguggccuacuccaacaacucuaucgcuauccccaccaacuucaccaucagcgugaccacagagauccugccuguguccaugaccaagaccagcguggacugcaccauguacaucugcggcgauuccaccgagugcuccaaccugcugcugcaguacggcagcuucugcacccagcugaauagagcccugacagggaucgccguggaacaggacaagaacacccaagagguguucgcccaagugaagcagaucuacaagaccccuccuaucaaggacuucggcggcuucaauuucagccagauucugcccgauccuagcaagcccagcaagcggagcuucaucgaggaccugcuguucaacaaagugacacuggccgacgccggcuucaucaagcaguauggcgauugucugggcgacauugccgccagggaucugauuugcgcccagaaguuuaacggacugacagugcugccuccucugcugaccgaugagaugaucgcccaguacacaucugcccugcuggccggcacaaucacaagcggcuggacauuuggagcaggcgccgcucugcagauccccuuugcuaugcagauggccuaccgguucaacggcaucggagugacccagaaugugcuguacgagaaccagaagcugaucgccaaccaguucaacagcgccaucggcaagauccaggacagccugagcagcacagcaagcgcccugggaaagcugcaggacguggucaaccagaaugcccaggcacugaacacccuggucaagcagcuguccuccaacuucggcgccaucagcucugugcugaacgauauccugagcagacuggacccuccugaggccgaggugcagaucgacagacugaucacaggcagacugcagagccuccagacauacgugacccagcagcugaucagagccgccgagauuagagccucugccaaucuggccgccaccaagaugucugagugugugcugggccagagcaagagaguggacuuuugcggcaagggcuaccaccugaugagcuucccucagucugccccucacggcgugguguuucugcacgugacauaugugcccgcucaagagaagaauuucaccaccgcuccagccaucugccacgacggcaaagcccacuuuccuagagaaggcguguucguguccaacggcacccauugguucgugacacagcggaacuucuacgagccccagaucaucaccaccgacaacaccuucgugucuggcaacugcgacgucgugaucggcauugugaacaauaccguguacgacccucugcagcccgagcuggacagcuucaaagaggaacuggacaaguacuuuaagaaccacacaagccccgacguggaccugggcgauaucagcggaaucaaugccagcgucgugaacauccagaaagagaucgaccggcugaacgagguggccaagaaucugaacgagagccugaucgaccugcaagaacuggggaaguacgagcaguacaucaaguggcccugguacaucuggcugggcuuuaucgccggacugauugccaucgugauggucacaaucaugcuguguugcaugaccagcugcuguagcugccugaagggcuguuguagcuguggcagcugcugcaaguucgacgaggacgauucugagcccgugcugaagggcgugaaacugcacuacacaugaggacuaguuauaagacugacuagcccgaugggccucccaacgggcccuccuccccuccuugcaccgagagaucuaaaaaaaaaaaaaaaaaaaaaaaaaaaaaaaaaaaaaaaaaaaaaaaaaaaaaaaaaaaaaaaaaaaaaaaaaaaaaaaaaaaaaaaaaaaaaaaaaaaa

SEQ ID NO: 26041 - RNA, 4002 nt, Artificial Sequence
  SARS-CoV-2/Wuhan/WIV05/2019__EPI_ISL_402128 spike protein mRNA gc mod (1-1273)(K986P_V987P_K986P_V987P_L18F_D80A_D215G_L242del_A243del_ L244del_R246I_K417N_E484K_N501Y_D614G_A701V)
aggagaaagcuuaccauguucguguuccuggugcugcugccucugguguccagccagugugugaacuucaccaccagaacacagcugccuccagccuacaccaacagcuuuaccagaggcguguacuaccccgacaagguguucagauccagcgugcugcacucuacccaggaccuguuccugccuuucuucagcaacgugaccugguuccacgccauccacguguccggcaccaauggcaccaagagauucgccaaccccgugcugcccuucaacgacgggguguacuuugccagcaccgagaaguccaacaucaucagaggcuggaucuucggcaccacacuggacagcaagacccagagccugcugaucgugaacaacgccaccaacguggucaucaaagugugcgaguuccaguucugcaacgaccccuuccugggcgucuacuaccacaagaacaacaagagcuggauggaaagcgaguuccggguguacagcagcgccaacaacugcaccuucgaguacgugucccagccuuuccugauggaccuggaaggcaagcagggcaacuucaagaaccugcgcgaguucguguuuaagaacaucgacggcuacuucaagaucuacagcaagcacaccccuaucaaccucgugcggggccugccucagggcuucucugcucuggaaccccugguggaucugcccaucggcaucaacaucacccgguuucagacacugcacaucagcuaccugacaccuggcgauagcagcagcggauggacagcuggugccgccgcuuacuaugugggcuaccugcagccuagaaccuuccugcugaaguacaacgagaacggcaccaucaccgacgccguggauugugcucuggauccucugagcgagacaaagugcacccugaaguccuucaccguggaaaagggcaucuaccagaccagcaacuuccgggugcagcccaccgaauccaucgugcgguuccccaauaucaccaaucugugccccuucggcgagguguucaaugccaccagauucgccucuguguacgccuggaaccggaagcggaucagcaauugcguggccgacuacuccgugcuguacaacuccgccagcuucagcaccuucaagugcuacggcguguccccuaccaagcugaacgaccugugcuucacaaacguguacgccgacagcuucgugauccggggagaugaagugcggcagauugccccuggacagacaggcaacaucgccgacuacaacuacaagcugcccgacgacuucaccggcugugugauugccuggaacagcaacaaccuggacuccaaagucggcggcaacuacaauuaccuguaccggcuguuccggaaguccaaucugaagcccuucgagcgggacaucuccaccgagaucuaucaggccggcagcaccccuuguaacggcgugaagggcuucaacugcuacuucccacugcaguccuacggcuuucagcccacauacggcgugggcuaucagcccuacagagugguggugcugagcuucgaacugcugcaugccccugccacagugugcggcccuaagaaaagcaccaaucucgugaagaacaaaugcgugaacuucaacuucaacggccugaccggcaccggcgugcugacagagagcaacaagaaguuccugccauuccagcaguuuggccgggauaucgccgauaccacagacgccguuagagauccccagacacuggaaauccuggacaucaccccuugcagcuucggcggagugucugugaucaccccuggcaccaacaccagcaaucagguggcagugcuguaccagggcgugaacuguaccgaagugcccguggccauucacgccgaucagcugacaccuacauggcggguguacuccaccggcagcaauguguuucagaccagagccggcugucugaucggagccgagcacgugaacaauagcuacgagugcgacauccccaucggcgcuggaaucugcgccagcuaccagacacagacaaacagcccucggagagccagaagcguggccagccagagcaucauugccuacacaaugucucugggcguggagaacagcguggccuacuccaacaacucuaucgcuauccccaccaacuucaccaucagcgugaccacagagauccugccuguguccaugaccaagaccagcguggacugcaccauguacaucugcggcgauuccaccgagugcuccaaccugcugcugcaguacggcagcuucugcacccagcugaauagagcccugacagggaucgccguggaacaggacaagaacacccaagagguguucgcccaagugaagcagaucuacaagaccccuccuaucaaggacuucggcggcuucaauuucagccagauucugcccgauccuagcaagcccagcaagcggagcuucaucgaggaccugcuguucaacaaagugacacuggccgacgccggcuucaucaagcaguauggcgauugucugggcgacauugccgccagggaucugauuugcgcccagaaguuuaacggacugacagugcugccuccucugcugaccgaugagaugaucgcccaguacacaucugcccugcuggccggcacaaucacaagcggcuggacauuuggagcaggcgccgcucugcagauccccuuugcuaugcagauggccuaccgguucaacggcaucggagugacccagaaugugcuguacgagaaccagaagcugaucgccaaccaguucaacagcgccaucggcaagauccaggacagccugagcagcacagcaagcgcccugggaaagcugcaggacguggucaaccagaaugcccaggcacugaacacccuggucaagcagcuguccuccaacuucggcgccaucagcucugugcugaacgauauccugagcagacuggacccuccugaggccgaggugcagaucgacagacugaucacaggcagacugcagagccuccagacauacgugacccagcagcugaucagagccgccgagauuagagccucugccaaucuggccgccaccaagaugucugagugugugcugggccagagcaagagaguggacuuuugcggcaagggcuaccaccugaugagcuucccucagucugccccucacggcgugguguuucugcacgugacauaugugcccgcucaagagaagaauuucaccaccgcuccagccaucugccacgacggcaaagcccacuuuccuagagaaggcguguucguguccaacggcacccauugguucgugacacagcggaacuucuacgagccccagaucaucaccaccgacaacaccuucgugucuggcaacugcgacgucgugaucggcauugugaacaauaccguguacgacccucugcagcccgagcuggacagcuucaaagaggaacuggacaaguacuuuaagaaccacacaagccccgacguggaccugggcgauaucagcggaaucaaugccagcgucgugaacauccagaaagagaucgaccggcugaacgagguggccaagaaucugaacgagagccugaucgaccugcaagaacuggggaaguacgagcaguacaucaaguggcccugguacaucuggcugggcuuuaucgccggacugauugccaucgugauggucacaaucaugcuguguugcaugaccagcugcuguagcugccugaagggcuguuguagcuguggcagcugcugcaaguucgacgaggacgauucugagcccgugcugaagggcgugaaacugcacuacacaugaggacuaguuauaagacugacuagcccgaugggccucccaacgggcccuccuccccuccuugcaccgagagaucuaaaaaaaaaaaaaaaaaaaaaaaaaaaaaaaaaaaaaaaaaaaaaaaaaaaaaaaaaaaaaaaaaaaaaaaaaaaaaaaaaaaaaaaaaaaaaaaaaaaa

SEQ ID NO: 26042 - RNA, 4011 nt, Artificial Sequence
  SARS-CoV-2/Wuhan/WIV05/2019__EPI_ISL_402128 spike protein mRNA gc mod (1-1273)(K986P_V987P_K986P_V987P_E484K_D614G)
aggagaaagcuuaccauguucguguuccuggugcugcugccucugguguccagccagugugugaaccugaccaccagaacacagcugccuccagccuacaccaacagcuuuaccagaggcguguacuaccccgacaagguguucagauccagcgugcugcacucuacccaggaccuguuccugccuuucuucagcaacgugaccugguuccacgccauccacguguccggcaccaauggcaccaagagauucgacaaccccgugcugcccuucaacgacgggguguacuuugccagcaccgagaaguccaacaucaucagaggcuggaucuucggcaccacacuggacagcaagacccagagccugcugaucgugaacaacgccaccaacguggucaucaaagugugcgaguuccaguucugcaacgaccccuuccugggcgucuacuaccacaagaacaacaagagcuggauggaaagcgaguuccggguguacagcagcgccaacaacugcaccuucgaguacgugucccagccuuuccugauggaccuggaaggcaagcagggcaacuucaagaaccugcgcgaguucguguuuaagaacaucgacggcuacuucaagaucuacagcaagcacaccccuaucaaccucgugcgggaucugccucagggcuucucugcucuggaaccccugguggaucugcccaucggcaucaacaucacccgguuucagacacugcuggcccugcacagaagcuaccugacaccuggcgauagcagcagcggauggacagcuggugccgccgcuuacuaugugggcuaccugcagccuagaaccuuccugcugaaguacaacgagaacggcaccaucaccgacgccguggauugugcucuggauccucugagcgagacaaagugcacccugaaguccuucaccguggaaaagggcaucuaccagaccagcaacuuccgggugcagcccaccgaauccaucgugcgguuccccaauaucaccaaucugugccccuucggcgagguguucaaugccaccagauucgccucuguguacgccuggaaccggaagcggaucagcaauugcguggccgacuacuccgugcuguacaacuccgccagcuucagcaccuucaagugcuacggcguguccccuaccaagcugaacgaccugugcuucacaaacguguacgccgacagcuucgugauccggggagaugaagugcggcagauugccccuggacagacaggcaagaucgccgacuacaacuacaagcugcccgacgacuucaccggcugugugauugccuggaacagcaacaaccuggacuccaaagucggcggcaacuacaauuaccuguaccggcuguuccggaaguccaaucugaagcccuucgagcgggacaucuccaccgagaucuaucaggccggcagcaccccuuguaacggcgugaagggcuucaacugcuacuucccacugcaguccuacggcuuucagcccacaaauggcgugggcuaucagcccuacagagugguggugcugagcuucgaacugcugcaugccccugccacagugugcggcccuaagaaaagcaccaaucucgugaagaacaaaugcgugaacuucaacuucaacggccugaccggcaccggcgugcugacagagagcaacaagaaguuccugccauuccagcaguuuggccgggauaucgccgauaccacagacgccguuagagauccccagacacuggaaauccuggacaucaccccuugcagcuucggcggagugucugugaucaccccuggcaccaacaccagcaaucagguggcagugcuguaccagggcgugaacuguaccgaagugcccguggccauucacgccgaucagcugacaccuacauggcggguguacuccaccggcagcaauguguuucagaccagagccggcugucugaucggagccgagcacgugaacaauagcuacgagugcgacauccccaucggcgcuggaaucugcgccagcuaccagacacagacaaacagcccucggagagccagaagcguggccagccagagcaucauugccuacacaaugucucugggcgccgagaacagcguggccuacuccaacaacucuaucgcuauccccaccaacuucaccaucagcgugaccacagagauccugccuguguccaugaccaagaccagcguggacugcaccauguacaucugcggcgauuccaccgagugcuccaaccugcugcugcaguacggcagcuucugcacccagcugaauagagcccugacagggaucgccguggaacaggacaagaacacccaagagguguucgcccaagugaagcagaucuacaagaccccuccuaucaaggacuucggcggcuucaauuucagccagauucugcccgauccuagcaagcccagcaagcggagcuucaucgaggaccugcuguucaacaaagugacacuggccgacgccggcuucaucaagcaguauggcgauugucugggcgacauugccgccagggaucugauuugcgcccagaaguuuaacggacugacagugcugccuccucugcugaccgaugagaugaucgcccaguacacaucugcccugcuggccggcacaaucacaagcggcuggacauuuggagcaggcgccgcucugcagauccccuuugcuaugcagauggccuaccgguucaacggcaucggagugacccagaaugugcuguacgagaaccagaagcugaucgccaaccaguucaacagcgccaucggcaagauccaggacagccugagcagcacagcaagcgcccugggaaagcugcaggacguggucaaccagaaugcccaggcacugaacacccuggucaagcagcuguccuccaacuucggcgccaucagcucugugcugaacgauauccugagcagacuggacccuccugaggccgaggugcagaucgacagacugaucacaggcagacugcagagccuccagacauacgugacccagcagcugaucagagccgccgagauuagagccucugccaaucuggccgccaccaagaugucugagugugugcugggccagagcaagagaguggacuuuugcggcaagggcuaccaccugaugagcuucccucagucugccccucacggcgugguguuucugcacgugacauaugugcccgcucaagagaagaauuucaccaccgcuccagccaucugccacgacggcaaagcccacuuuccuagagaaggcguguucguguccaacggcacccauugguucgugacacagcggaacuucuacgagccccagaucaucaccaccgacaacaccuucgugucuggcaacugcgacgucgugaucggcauugugaacaauaccguguacgacccucugcagcccgagcuggacagcuucaaagaggaacuggacaaguacuuuaagaaccacacaagccccgacguggaccugggcgauaucagcggaaucaaugccagcgucgugaacauccagaaagagaucgaccggcugaacgagguggccaagaaucugaacgagagccugaucgaccugcaagaacuggggaaguacgagcaguacaucaaguggcccugguacaucuggcugggcuuuaucgccggacugauugccaucgugauggucacaaucaugcuguguugcaugaccagcugcuguagcugccugaagggcuguuguagcuguggcagcugcugcaaguucgacgaggacgauucugagcccgugcugaagggcgugaaacugcacuacacaugaggacuaguuauaagacugacuagcccgaugggccucccaacgggcccuccuccccuccuugcaccgagagaucuaaaaaaaaaaaaaaaaaaaaaaaaaaaaaaaaaaaaaaaaaaaaaaaaaaaaaaaaaaaaaaaaaaaaaaaaaaaaaaaaaaaaaaaaaaaaaaaaaaaa

SEQ ID NO: 26043 - RNA, 4011 nt, Artificial Sequence
  SARS-CoV-2/Wuhan/WIV05/2019__EPI_ISL_402128 spike protein mRNA gc mod (1-1273)(K986P_V987P_K986P_V987P_L18F_T20N_P26S_D138Y_R190S_K417T _E484K_N501Y_D614G_H655Y_T1027I)
aggagaaagcuuaccauguucguguuccuggugcugcugccucugguguccagccagugugugaacuucaccaacagaacacagcugccuagcgccuacaccaacagcuuuaccagaggcguguacuaccccgacaagguguucagauccagcgugcugcacucuacccaggaccuguuccugccuuucuucagcaacgugaccugguuccacgccauccacguguccggcaccaauggcaccaagagauucgacaaccccgugcugcccuucaacgacgggguguacuuugccagcaccgagaaguccaacaucaucagaggcuggaucuucggcaccacacuggacagcaagacccagagccugcugaucgugaacaacgccaccaacguggucaucaaagugugcgaguuccaguucugcaacuaccccuuccugggcgucuacuaccacaagaacaacaagagcuggauggaaagcgaguuccggguguacagcagcgccaacaacugcaccuucgaguacgugucccagccuuuccugauggaccuggaaggcaagcagggcaacuucaagaaccugagcgaguucguguuuaagaacaucgacggcuacuucaagaucuacagcaagcacaccccuaucaaccucgugcgggaucugccucagggcuucucugcucuggaaccccugguggaucugcccaucggcaucaacaucacccgguuucagacacugcuggcccugcacagaagcuaccugacaccuggcgauagcagcagcggauggacagcuggugccgccgcuuacuaugugggcuaccugcagccuagaaccuuccugcugaaguacaacgagaacggcaccaucaccgacgccguggauugugcucuggauccucugagcgagacaaagugcacccugaaguccuucaccguggaaaagggcaucuaccagaccagcaacuuccgggugcagcccaccgaauccaucgugcgguuccccaauaucaccaaucugugccccuucggcgagguguucaaugccaccagauucgccucuguguacgccuggaaccggaagcggaucagcaauugcguggccgacuacuccgugcuguacaacuccgccagcuucagcaccuucaagugcuacggcguguccccuaccaagcugaacgaccugugcuucacaaacguguacgccgacagcuucgugauccggggagaugaagugcggcagauugccccuggacagacaggcaccaucgccgacuacaacuacaagcugcccgacgacuucaccggcugugugauugccuggaacagcaacaaccuggacuccaaagucggcggcaacuacaauuaccuguaccggcuguuccggaaguccaaucugaagcccuucgagcgggacaucuccaccgagaucuaucaggccggcagcaccccuuguaacggcgugaagggcuucaacugcuacuucccacugcaguccuacggcuuucagcccacauacggcgugggcuaucagcccuacagagugguggugcugagcuucgaacugcugcaugccccugccacagugugcggcccuaagaaaagcaccaaucucgugaagaacaaaugcgugaacuucaacuucaacggccugaccggcaccggcgugcugacagagagcaacaagaaguuccugccauuccagcaguuuggccgggauaucgccgauaccacagacgccguuagagauccccagacacuggaaauccuggacaucaccccuugcagcuucggcggagugucugugaucaccccuggcaccaacaccagcaaucagguggcagugcuguaccagggcgugaacuguaccgaagugcccguggccauucacgccgaucagcugacaccuacauggcggguguacuccaccggcagcaauguguuucagaccagagccggcugucugaucggagccgaguacgugaacaauagcuacgagugcgacauccccaucggcgcuggaaucugcgccagcuaccagacacagacaaacagcccucggagagccagaagcguggccagccagagcaucauugccuacacaaugucucugggcgccgagaacagcguggccuacuccaacaacucuaucgcuauccccaccaacuucaccaucagcgugaccacagagauccugccuguguccaugaccaagaccagcguggacugcaccauguacaucugcggcgauuccaccgagugcuccaaccugcugcugcaguacggcagcuucugcacccagcugaauagagcccugacagggaucgccguggaacaggacaagaacacccaagagguguucgcccaagugaagcagaucuacaagaccccuccuaucaaggacuucggcggcuucaauuucagccagauucugcccgauccuagcaagcccagcaagcggagcuucaucgaggaccugcuguucaacaaagugacacuggccgacgccggcuucaucaagcaguauggcgauugucugggcgacauugccgccagggaucugauuugcgcccagaaguuuaacggacugacagugcugccuccucugcugaccgaugagaugaucgcccaguacacaucugcccugcuggccggcacaaucacaagcggcuggacauuuggagcaggcgccgcucugcagauccccuuugcuaugcagauggccuaccgguucaacggcaucggagugacccagaaugugcuguacgagaaccagaagcugaucgccaaccaguucaacagcgccaucggcaagauccaggacagccugagcagcacagcaagcgcccugggaaagcugcaggacguggucaaccagaaugcccaggcacugaacacccuggucaagcagcuguccuccaacuucggcgccaucagcucugugcugaacgauauccugagcagacuggacccuccugaggccgaggugcagaucgacagacugaucacaggcagacugcagagccuccagacauacgugacccagcagcugaucagagccgccgagauuagagccucugccaaucuggccgccaucaagaugucugagugugugcugggccagagcaagagaguggacuuuugcggcaagggcuaccaccugaugagcuucccucagucugccccucacggcgugguguuucugcacgugacauaugugcccgcucaagagaagaauuucaccaccgcuccagccaucugccacgacggcaaagcccacuuuccuagagaaggcguguucguguccaacggcacccauugguucgugacacagcggaacuucuacgagccccagaucaucaccaccgacaacaccuucgugucuggcaacugcgacgucgugaucggcauugugaacaauaccguguacgacccucugcagcccgagcuggacagcuucaaagaggaacuggacaaguacuuuaagaaccacacaagccccgacguggaccugggcgauaucagcggaaucaaugccagcgucgugaacauccagaaagagaucgaccggcugaacgagguggccaagaaucugaacgagagccugaucgaccugcaagaacuggggaaguacgagcaguacaucaaguggcccugguacaucuggcugggcuuuaucgccggacugauugccaucgugauggucacaaucaugcuguguugcaugaccagcugcuguagcugccugaagggcuguuguagcuguggcagcugcugcaaguucgacgaggacgauucugagcccgugcugaagggcgugaaacugcacuacacaugaggacuaguuauaagacugacuagcccgaugggccucccaacgggcccuccuccccuccuugcaccgagagaucuaaaaaaaaaaaaaaaaaaaaaaaaaaaaaaaaaaaaaaaaaaaaaaaaaaaaaaaaaaaaaaaaaaaaaaaaaaaaaaaaaaaaaaaaaaaaaaaaaaaa

SEQ ID NO: 26044 - RNA, 4011 nt, Artificial Sequence
  SARS-CoV-2/Wuhan/WIV05/2019__EPI_ISL_402128 spike protein mRNA gc mod (1-1273)(K986P_V987P_K986P_V987P_S13I_W152C_L452R_D614G)
aggagaaagcuuaccauguucguguuccuggugcugcugccucugguguccauccagugugugaaccugaccaccagaacacagcugccuccagccuacaccaacagcuuuaccagaggcguguacuaccccgacaagguguucagauccagcgugcugcacucuacccaggaccuguuccugccuuucuucagcaacgugaccugguuccacgccauccacguguccggcaccaauggcaccaagagauucgacaaccccgugcugcccuucaacgacgggguguacuuugccagcaccgagaaguccaacaucaucagaggcuggaucuucggcaccacacuggacagcaagacccagagccugcugaucgugaacaacgccaccaacguggucaucaaagugugcgaguuccaguucugcaacgaccccuuccugggcgucuacuaccacaagaacaacaagagcugcauggaaagcgaguuccggguguacagcagcgccaacaacugcaccuucgaguacgugucccagccuuuccugauggaccuggaaggcaagcagggcaacuucaagaaccugcgcgaguucguguuuaagaacaucgacggcuacuucaagaucuacagcaagcacaccccuaucaaccucgugcgggaucugccucagggcuucucugcucuggaaccccugguggaucugcccaucggcaucaacaucacccgguuucagacacugcuggcccugcacagaagcuaccugacaccuggcgauagcagcagcggauggacagcuggugccgccgcuuacuaugugggcuaccugcagccuagaaccuuccugcugaaguacaacgagaacggcaccaucaccgacgccguggauugugcucuggauccucugagcgagacaaagugcacccugaaguccuucaccguggaaaagggcaucuaccagaccagcaacuuccgggugcagcccaccgaauccaucgugcgguuccccaauaucaccaaucugugccccuucggcgagguguucaaugccaccagauucgccucuguguacgccuggaaccggaagcggaucagcaauugcguggccgacuacuccgugcuguacaacuccgccagcuucagcaccuucaagugcuacggcguguccccuaccaagcugaacgaccugugcuucacaaacguguacgccgacagcuucgugauccggggagaugaagugcggcagauugccccuggacagacaggcaagaucgccgacuacaacuacaagcugcccgacgacuucaccggcugugugauugccuggaacagcaacaaccuggacuccaaagucggcggcaacuacaauuaccgcuaccggcuguuccggaaguccaaucugaagcccuucgagcgggacaucuccaccgagaucuaucaggccggcagcaccccuuguaacggcguggaaggcuucaacugcuacuucccacugcaguccuacggcuuucagcccacaaauggcgugggcuaucagcccuacagagugguggugcugagcuucgaacugcugcaugccccugccacagugugcggcccuaagaaaagcaccaaucucgugaagaacaaaugcgugaacuucaacuucaacggccugaccggcaccggcgugcugacagagagcaacaagaaguuccugccauuccagcaguuuggccgggauaucgccgauaccacagacgccguuagagauccccagacacuggaaauccuggacaucaccccuugcagcuucggcggagugucugugaucaccccuggcaccaacaccagcaaucagguggcagugcuguaccagggcgugaacuguaccgaagugcccguggccauucacgccgaucagcugacaccuacauggcggguguacuccaccggcagcaauguguuucagaccagagccggcugucugaucggagccgagcacgugaacaauagcuacgagugcgacauccccaucggcgcuggaaucugcgccagcuaccagacacagacaaacagcccucggagagccagaagcguggccagccagagcaucauugccuacacaaugucucugggcgccgagaacagcguggccuacuccaacaacucuaucgcuauccccaccaacuucaccaucagcgugaccacagagauccugccuguguccaugaccaagaccagcguggacugcaccauguacaucugcggcgauuccaccgagugcuccaaccugcugcugcaguacggcagcuucugcacccagcugaauagagcccugacagggaucgccguggaacaggacaagaacacccaagagguguucgcccaagugaagcagaucuacaagaccccuccuaucaaggacuucggcggcuucaauuucagccagauucugcccgauccuagcaagcccagcaagcggagcuucaucgaggaccugcuguucaacaaagugacacuggccgacgccggcuucaucaagcaguauggcgauugucugggcgacauugccgccagggaucugauuugcgcccagaaguuuaacggacugacagugcugccuccucugcugaccgaugagaugaucgcccaguacacaucugcccugcuggccggcacaaucacaagcggcuggacauuuggagcaggcgccgcucugcagauccccuuugcuaugcagauggccuaccgguucaacggcaucggagugacccagaaugugcuguacgagaaccagaagcugaucgccaaccaguucaacagcgccaucggcaagauccaggacagccugagcagcacagcaagcgcccugggaaagcugcaggacguggucaaccagaaugcccaggcacugaacacccuggucaagcagcuguccuccaacuucggcgccaucagcucugugcugaacgauauccugagcagacuggacccuccugaggccgaggugcagaucgacagacugaucacaggcagacugcagagccuccagacauacgugacccagcagcugaucagagccgccgagauuagagccucugccaaucuggccgccaccaagaugucugagugugugcugggccagagcaagagaguggacuuuugcggcaagggcuaccaccugaugagcuucccucagucugccccucacggcgugguguuucugcacgugacauaugugcccgcucaagagaagaauuucaccaccgcuccagccaucugccacgacggcaaagcccacuuuccuagagaaggcguguucguguccaacggcacccauugguucgugacacagcggaacuucuacgagccccagaucaucaccaccgacaacaccuucgugucuggcaacugcgacgucgugaucggcauugugaacaauaccguguacgacccucugcagcccgagcuggacagcuucaaagaggaacuggacaaguacuuuaagaaccacacaagccccgacguggaccugggcgauaucagcggaaucaaugccagcgucgugaacauccagaaagagaucgaccggcugaacgagguggccaagaaucugaacgagagccugaucgaccugcaagaacuggggaaguacgagcaguacaucaaguggcccugguacaucuggcugggcuuuaucgccggacugauugccaucgugauggucacaaucaugcuguguugcaugaccagcugcuguagcugccugaagggcuguuguagcuguggcagcugcugcaaguucgacgaggacgauucugagcccgugcugaagggcgugaaacugcacuacacaugaggacuaguuauaagacugacuagcccgaugggccucccaacgggcccuccuccccuccuugcaccgagagaucuaaaaaaaaaaaaaaaaaaaaaaaaaaaaaaaaaaaaaaaaaaaaaaaaaaaaaaaaaaaaaaaaaaaaaaaaaaaaaaaaaaaaaaaaaaaaaaaaaaaa

SEQ ID NO: 26045 - RNA, 1425 nt, Artificial Sequence
  SARS-CoV-2/Wuhan/WIV05/2019__EPI_ISL_402128 spike protein mRNA gc (1-15,334-528) Ferritin construct
gggaaauaagagagaaaagaagaguaagaagaaauauaagaccccggcgccgccaccauguucguguuccugguccuccugccccuggugagcucccagugcaaccugugccccuucggcgagguguucaacgccacccgguucgccagcgucuacgccuggaaccgcaagcggaucuccaacugcguggcggacuacagcgugcuguacaacuccgccagcuucuccacguucaagugcuacggcgucagccccaccaagcucaacgaccugugcuucaccaacguguacgccgacuccuucgugauccgcggggacgagguccggcagaucgcccccggccagaccgggaagaucgccgacuacaacuacaagcugccggacgacuucacgggcugcgugaucgcguggaacagcaacaaccucgacuccaaggucgggggcaacuacaacuaccuguaccgccuguuccgcaagagcaaccucaagcccuucgagcgggacaucuccaccgagaucuaccaggccggcagcacccccugcaacgggguggagggcuucaacugcuacuucccccugcaguccuacggguuccagccgaccaacggcgugggguaccagcccuaccggguggucgugcugagcuucgagcuccugcacgcccccgccacggugugcggccccaagggcggggguggaagcggcggggguggaagugacaucaucaagcuccugaacgagcaggucaacaaggagaugcaguccagcaaccuguacauguccaugagcuccuggugcuacacccacagccucgacggcgccgggcuguuccuguucgaccacgccgcggaggaguacgagcacgccaagaagcucaucaucuuccugaacgagaacaacgugcccgugcagcugaccuccaucagcgccccggagcacaaguucgagggccucacgcagaucuuccagaaggccuacgagcacgagcagcacaucuccgagagcaucaacaacaucguggaccacgccaucaaguccaaggaccacgcgaccuucaacuuccugcagugguacgucgccgagcagcacgaggaggaggugcuguucaaggacauccucgacaagaucgagcugaucgggaacgagaaccacggccuguaccucgccgaccaguacgugaaggggaucgccaagagccgcaaguccugauaauaggcuggagccucgguggccuagcuucuugccccuugggccuccccccagccccuccuccccuuccugcacccguacccccguggucuuugaauaaagucugagugggcggcaaaaaaaaaaaaaaaaaaaaaaaaaaaaaaaaaaaaaaaaaaaaaaaaaaaaaaaaaaaaaaaaaaaaaaaaaaaaaaaaaaaaaaaaaaaaaaaaaaaa

SEQ ID NO: 26046 - RNA, 1023 nt, Artificial Sequence
  SARS-CoV-2/Wuhan/WIV05/2019__EPI_ISL_402128 spike protein mRNA gc (334-528) Foldon construct
gggaaauaagagagaaaagaagaguaagaagaaauauaagaccccggcgccgccaccaugcccaugggcagccugcagccgcucgccacccuguaccugcucgggaugcugguggccuccguccuggcgaaccugugccccuucggcgagguguucaacgccacccgguucgccagcgucuacgccuggaaccgcaagcggaucuccaacugcguggcggacuacagcgugcuguacaacuccgccagcuucuccacguucaagugcuacggcgucagccccaccaagcucaacgaccugugcuucaccaacguguacgccgacuccuucgugauccgcggggacgagguccggcagaucgcccccggccagaccgggaagaucgccgacuacaacuacaagcugccggacgacuucacgggcugcgugaucgcguggaacagcaacaaccucgacuccaaggucgggggcaacuacaacuaccuguaccgccuguuccgcaagagcaaccucaagcccuucgagcgggacaucuccaccgagaucuaccaggccggcagcacccccugcaacgggguggagggcuucaacugcuacuucccccugcaguccuacggguuccagccgaccaacggcgugggguaccagcccuaccggguggucgugcugagcuucgagcuccugcacgcccccgccacggugugcggccccaagggcagcggcggguacauccccgaggccccgcgcgacggccaggccuacgugcggaaggacggcgaguggguccugcugagcaccuuccucugauaauaggcuggagccucgguggccuagcuucuugccccuugggccuccccccagccccuccuccccuuccugcacccguacccccguggucuuugaauaaagucugagugggcggcaaaaaaaaaaaaaaaaaaaaaaaaaaaaaaaaaaaaaaaaaaaaaaaaaaaaaaaaaaaaaaaaaaaaaaaaaaaaaaaaaaaaaaaaaaaaaaaaaaaa

SEQ ID NO: 26047 - RNA, 1401 nt, Artificial Sequence
  SARS-CoV-2/Wuhan/WIV05/2019__EPI_ISL_402128 spike protein mRNA gc (1-15,334-528) LumSynth construct
gggaaauaagagagaaaagaagaguaagaagaaauauaagaccccggcgccgccaccauguucguguuccugguccuccugccccuggugagcucccagugcaaccugugccccuucggcgagguguucaacgccacccgguucgccagcgucuacgccuggaaccgcaagcggaucuccaacugcguggcggacuacagcgugcuguacaacuccgccagcuucuccacguucaagugcuacggcgucagccccaccaagcucaacgaccugugcuucaccaacguguacgccgacuccuucgugauccgcggggacgagguccggcagaucgcccccggccagaccgggaagaucgccgacuacaacuacaagcugccggacgacuucacgggcugcgugaucgcguggaacagcaacaaccucgacuccaaggucgggggcaacuacaacuaccuguaccgccuguuccgcaagagcaaccucaagcccuucgagcgggacaucuccaccgagaucuaccaggccggcagcacccccugcaacgggguggagggcuucaacugcuacuucccccugcaguccuacggguuccagccgaccaacggcgugggguaccagcccuaccggguggucgugcugagcuucgagcuccugcacgcccccgccacggugugcggccccaagggcggcggcggcuccggaggcggagguagcgggggacagaucuacgagggcaagcugaccgccgaggggcuccgcuucggcaucguggccagccgguucaaccacgcgcuggucgaccgccugguggagggggccaucgacgccaucgugcggcacggcgggcgcgaggaggacaucacccucguccgggugcccggcuccugggagaucccgguggccgccggcgagcuggcccgcaaggaggacaucgacgcggucaucgccaucggggugcugauccggggcgccacgccccacuucgacuacaucgccagcgagguguccaaggggcucgcggaccugagccuggagcuccgcaagcccaucaccuucggcgucaucaccgccgacacccuggagcaggccaucgagcgggccgggacgaagcacggcaacaagggcugggaggccgcgcuguccgccaucgagauggccaaccucuucaagagccugcgcugauaauaggcuggagccucgguggccuagcuucuugccccuugggccuccccccagccccuccuccccuuccugcacccguacccccguggucuuugaauaaagucugagugggcggcaaaaaaaaaaaaaaaaaaaaaaaaaaaaaaaaaaaaaaaaaaaaaaaaaaaaaaaaaaaaaaaaaaaaaaaaaaaaaaaaaaaaaaaaaaaaaaaaaaaa

SEQ ID NO: 26048 - RNA, 1362 nt, Artificial Sequence
  SARS-CoV-2/Wuhan/WIV05/2019__EPI_ISL_402128 spike protein mRNA gc (334-528) LumSynth construct
gggaaauaagagagaaaagaagaguaagaagaaauauaagaccccggcgccgccaccaugcagaucuacgagggcaagcugaccgccgaggggcuccgcuucggcaucguggccagccgguucaaccacgcgcuggucgaccgccugguggagggggccaucgacgccaucgugcggcacggcgggcgcgaggaggacaucacccucguccgggugcccggcuccugggagaucccgguggccgccggcgagcuggcccgcaaggaggacaucgacgcggucaucgccaucggggugcugauccggggcgccacgccccacuucgacuacaucgccagcgagguguccaaggggcucgcggaccugagccuggagcuccgcaagcccaucaccuucggcgucaucaccgccgacacccuggagcaggccaucgagcgggccgggacgaagcacggcaacaagggcugggaggccgcgcuguccgccaucgagauggccaaccucuucaagagccugcgcggcgggggcgggagcggcgggggcggcuccgggggcgggaaccugugccccuucggcgagguguucaacgccacccgguucgccagcgucuacgccuggaaccgcaagcggaucuccaacugcguggcggacuacagcgugcuguacaacuccgccagcuucuccacguucaagugcuacggcgucagccccaccaagcucaacgaccugugcuucaccaacguguacgccgacuccuucgugauccgcggggacgagguccggcagaucgcccccggccagaccgggaagaucgccgacuacaacuacaagcugccggacgacuucacgggcugcgugaucgcguggaacagcaacaaccucgacuccaaggucgggggcaacuacaacuaccuguaccgccuguuccgcaagagcaaccucaagcccuucgagcgggacaucuccaccgagaucuaccaggccggcagcacccccugcaacgggguggagggcuucaacugcuacuucccccugcaguccuacggguuccagccgaccaacggcgugggguaccagcccuaccggguggucgugcugagcuucgagcuccugcacgcccccgccacggugugcggccccaagugauaauaggcuggagccucgguggccuagcuucuugccccuugggccuccccccagccccuccuccccuuccugcacccguacccccguggucuuugaauaaagucugagugggcggcaaaaaaaaaaaaaaaaaaaaaaaaaaaaaaaaaaaaaaaaaaaaaaaaaaaaaaaaaaaaaaaaaaaaaaaaaaaaaaaaaaaaaaaaaaaaaaaaaaaa

SEQ ID NO: 26049 - RNA, 4095 nt, Artificial Sequence
  SARS-CoV-2/Wuhan/WIV05/2019__EPI_ISL_402128 spike protein mRNA gc (1-1273)
gggaaauaagagagaaaagaagaguaagaagaaauauaagaccccggcgccgccaccauguucguguuccugguccuccugccccuggugagcucccagugcgugaaccucaccacccgcacgcagcugccgcccgccuacaccaacagcuucacccggggcgucuacuaccccgacaagguguuccgcuccagcgugcugcacuccacccaggaccucuuccugcccuucuucagcaacgucacgugguuccacgccauccacguguccgggaccaacggcaccaagcgguucgacaacccggugcugcccuucaacgacggggucuacuucgcgagcaccgagaaguccaacaucauccgcggcuggaucuucgggacgacccucgacagcaagacccagucccugcugaucgugaacaacgccaccaacguggucaucaaggugugcgaguuccaguucugcaacgaccccuuccucggcguguacuaccacaagaacaacaagagcuggauggaguccgaguuccgggucuacagcuccgccaacaacugcacguucgaguacgugagccagcccuuccugauggaccuggagggcaagcaggggaacuucaagaaccuccgcgaguucguguucaagaacaucgacggcuacuucaagaucuacuccaagcacaccccgaucaaccugguccgggaccugccccagggguucagcgcccucgagccccugguggaccugcccaucggcaucaacaucacccgcuuccagacccuccuggcccugcaccgguccuaccucacgccgggggacagcagcuccggcuggaccgcgggcgccgccgccuacuacgugggguaccugcagccccgcaccuuccugcucaaguacaacgagaacggcaccaucacggacgcggucgacugcgcccuggacccccugagcgagaccaagugcacccucaaguccuucaccguggagaaggggaucuaccagacgagcaacuuccgggugcagcccaccgaguccaucguccgcuucccgaacaucaccaaccugugccccuucggcgagguguucaacgccacccgguucgccagcgucuacgccuggaaccgcaagcggaucuccaacugcguggcggacuacagcgugcuguacaacuccgccagcuucuccacguucaagugcuacggcgucagccccaccaagcucaacgaccugugcuucaccaacguguacgccgacuccuucgugauccgcggggacgagguccggcagaucgcccccggccagaccgggaagaucgccgacuacaacuacaagcugccggacgacuucacgggcugcgugaucgcguggaacagcaacaaccucgacuccaaggucgggggcaacuacaacuaccuguaccgccuguuccgcaagagcaaccucaagcccuucgagcgggacaucuccaccgagaucuaccaggccggcagcacccccugcaacgggguggagggcuucaacugcuacuucccccugcaguccuacggguuccagccgaccaacggcgugggguaccagcccuaccggguggucgugcugagcuucgagcuccugcacgcccccgccacggugugcggccccaagaaguccaccaaccuggucaagaacaagugcgugaacuucaacuucaacggccucaccgggaccggcgugcugaccgagagcaacaagaaguuccugccguuccagcaguucgggcgcgacaucgccgacacgaccgacgcgguccgcgacccccagacccuggagauccucgacaucacccccugcagcuucggcgggguguccgugaucacgccgggcaccaacaccagcaaccaggucgccgugcuguaccaggacgugaacugcaccgagguccccguggccauccacgccgaccagcugacgcccaccuggcggguguacuccaccggcagcaacgucuuccagacccgcgccgggugccucaucggcgcggagcacgugaacaacuccuacgagugcgacauccccaucggggccggcaucugcgccagcuaccagacgcagaccaacuccccgcggcgcgcccggagcguggcgucccagagcaucaucgccuacaccaugucccugggcgccgagaacagcgucgccuacuccaacaacagcaucgccauccccaccaacuucacgaucuccgugaccaccgagauccugcccgugagcaugaccaagacgagcgucgacugcaccauguacaucugcggggacuccaccgagugcagcaaccuccugcugcaguacggcuccuucugcacccagcucaaccgcgcgcugacggggaucgccguggagcaggacaagaacacccaggagguguucgcccaggucaagcagaucuacaagacgcccccgaucaaggacuucggcggguucaacuucagccagauccugcccgaccccuccaagcccagcaagcgguccuucaucgaggaccuccuguucaacaaggugacccuggccgacgccggcuucaucaagcaguacggcgacugccucggggacaucgcggcccgcgaccugaucugcgcccagaaguucaacggccugaccgugcucccgccccugcugaccgacgagaugaucgcccaguacaccagcgcccuccuggcggggaccaucacguccggcuggaccuucggggccggcgccgcccugcagauccccuucgcgaugcagauggccuaccgguucaacggcaucggggucacccagaacgugcucuacgagaaccagaagcugaucgccaaccaguucaacagcgccaucggcaagauccaggacucccugagcuccaccgccagcgcgcucgggaagcugcaggacguggucaaccagaacgcccaggcccugaacacgcucgugaagcagcuguccagcaacuucggcgccaucuccagcgugcugaacgacauccucucccgccuggacaaggucgaggccgaggugcagaucgaccggcugaucaccgggcgccuccagagccugcagaccuacgugacccagcagcugauccgggcggccgagauccgcgccagcgccaaccucgccgcgaccaagauguccgagugcguccugggccagagcaagcggguggacuucugcggcaagggguaccaccugauguccuucccccagagcgccccgcacggcguggucuuccuccacgugacguacguccccgcccaggagaagaacuucaccaccgcccccgcgaucugccacgacgggaaggcccacuucccccgcgagggcguguucguguccaacgggacccacugguucgucacgcagcggaacuucuacgagccgcagaucaucaccaccgacaacaccuucgugagcggcaacugcgacguggucaucggcaucgugaacaacacgguguacgacccccugcagcccgagcuggacuccuucaaggaggagcucgacaaguacuucaagaaccacaccagccccgacgucgaccugggggacaucuccggcaucaacgccagcguggugaacauccagaaggagaucgaccgccugaacgaggucgccaagaaccucaacgagucccugaucgaccugcaggagcucgggaaguacgagcaguacaucaaguggccgugguacaucuggcugggcuucaucgccggccugaucgcgaucgugauggugaccaucaugcucugcugcaugaccagcugcugcuccugccugaaggggugcugcagcugcggcuccugcugcaaguucgacgaggacgacagcgagcccguccugaagggggugaagcuccacuacacgugauaauaggcuggagccucgguggccuagcuucuugccccuugggccuccccccagccccuccuccccuuccugcacccguacccccguggucuuugaauaaagucugagugggcggcaaaaaaaaaaaaaaaaaaaaaaaaaaaaaaaaaaaaaaaaaaaaaaaaaaaaaaaaaaaaaaaaaaaaaaaaaaaaaaaaaaaaaaaaaaaaaaaaaaaa

SEQ ID NO: 26050 - RNA, 4095 nt, Artificial Sequence
  SARS-CoV-2/Wuhan/WIV05/2019__EPI_ISL_402128 spike protein mRNA gc (1-1273)(D614G)
gggaaauaagagagaaaagaagaguaagaagaaauauaagaccccggcgccgccaccauguucguguuccugguccuccugccccuggugagcucccagugcgugaaccucaccacccgcacgcagcugccgcccgccuacaccaacagcuucacccggggcgucuacuaccccgacaagguguuccgcuccagcgugcugcacuccacccaggaccucuuccugcccuucuucagcaacgucacgugguuccacgccauccacguguccgggaccaacggcaccaagcgguucgacaacccggugcugcccuucaacgacggggucuacuucgcgagcaccgagaaguccaacaucauccgcggcuggaucuucgggacgacccucgacagcaagacccagucccugcugaucgugaacaacgccaccaacguggucaucaaggugugcgaguuccaguucugcaacgaccccuuccucggcguguacuaccacaagaacaacaagagcuggauggaguccgaguuccgggucuacagcuccgccaacaacugcacguucgaguacgugagccagcccuuccugauggaccuggagggcaagcaggggaacuucaagaaccuccgcgaguucguguucaagaacaucgacggcuacuucaagaucuacuccaagcacaccccgaucaaccugguccgggaccugccccagggguucagcgcccucgagccccugguggaccugcccaucggcaucaacaucacccgcuuccagacccuccuggcccugcaccgguccuaccucacgccgggggacagcagcuccggcuggaccgcgggcgccgccgccuacuacgugggguaccugcagccccgcaccuuccugcucaaguacaacgagaacggcaccaucacggacgcggucgacugcgcccuggacccccugagcgagaccaagugcacccucaaguccuucaccguggagaaggggaucuaccagacgagcaacuuccgggugcagcccaccgaguccaucguccgcuucccgaacaucaccaaccugugccccuucggcgagguguucaacgccacccgguucgccagcgucuacgccuggaaccgcaagcggaucuccaacugcguggcggacuacagcgugcuguacaacuccgccagcuucuccacguucaagugcuacggcgucagccccaccaagcucaacgaccugugcuucaccaacguguacgccgacuccuucgugauccgcggggacgagguccggcagaucgcccccggccagaccgggaagaucgccgacuacaacuacaagcugccggacgacuucacgggcugcgugaucgcguggaacagcaacaaccucgacuccaaggucgggggcaacuacaacuaccuguaccgccuguuccgcaagagcaaccucaagcccuucgagcgggacaucuccaccgagaucuaccaggccggcagcacccccugcaacgggguggagggcuucaacugcuacuucccccugcaguccuacggguuccagccgaccaacggcgugggguaccagcccuaccggguggucgugcugagcuucgagcuccugcacgcccccgccacggugugcggccccaagaaguccaccaaccuggucaagaacaagugcgugaacuucaacuucaacggccucaccgggaccggcgugcugaccgagagcaacaagaaguuccugccguuccagcaguucgggcgcgacaucgccgacacgaccgacgcgguccgcgacccccagacccuggagauccucgacaucacccccugcagcuucggcgggguguccgugaucacgccgggcaccaacaccagcaaccaggucgccgugcuguaccagggcgugaacugcaccgagguccccguggccauccacgccgaccagcugacgcccaccuggcggguguacuccaccggcagcaacgucuuccagacccgcgccgggugccucaucggcgcggagcacgugaacaacuccuacgagugcgacauccccaucggggccggcaucugcgccagcuaccagacgcagaccaacuccccgcggcgcgcccggagcguggcgucccagagcaucaucgccuacaccaugucccugggcgccgagaacagcgucgccuacuccaacaacagcaucgccauccccaccaacuucacgaucuccgugaccaccgagauccugcccgugagcaugaccaagacgagcgucgacugcaccauguacaucugcggggacuccaccgagugcagcaaccuccugcugcaguacggcuccuucugcacccagcucaaccgcgcgcugacggggaucgccguggagcaggacaagaacacccaggagguguucgcccaggucaagcagaucuacaagacgcccccgaucaaggacuucggcggguucaacuucagccagauccugcccgaccccuccaagcccagcaagcgguccuucaucgaggaccuccuguucaacaaggugacccuggccgacgccggcuucaucaagcaguacggcgacugccucggggacaucgcggcccgcgaccugaucugcgcccagaaguucaacggccugaccgugcucccgccccugcugaccgacgagaugaucgcccaguacaccagcgcccuccuggcggggaccaucacguccggcuggaccuucggggccggcgccgcccugcagauccccuucgcgaugcagauggccuaccgguucaacggcaucggggucacccagaacgugcucuacgagaaccagaagcugaucgccaaccaguucaacagcgccaucggcaagauccaggacucccugagcuccaccgccagcgcgcucgggaagcugcaggacguggucaaccagaacgcccaggcccugaacacgcucgugaagcagcuguccagcaacuucggcgccaucuccagcgugcugaacgacauccucucccgccuggacaaggucgaggccgaggugcagaucgaccggcugaucaccgggcgccuccagagccugcagaccuacgugacccagcagcugauccgggcggccgagauccgcgccagcgccaaccucgccgcgaccaagauguccgagugcguccugggccagagcaagcggguggacuucugcggcaagggguaccaccugauguccuucccccagagcgccccgcacggcguggucuuccuccacgugacguacguccccgcccaggagaagaacuucaccaccgcccccgcgaucugccacgacgggaaggcccacuucccccgcgagggcguguucguguccaacgggacccacugguucgucacgcagcggaacuucuacgagccgcagaucaucaccaccgacaacaccuucgugagcggcaacugcgacguggucaucggcaucgugaacaacacgguguacgacccccugcagcccgagcuggacuccuucaaggaggagcucgacaaguacuucaagaaccacaccagccccgacgucgaccugggggacaucuccggcaucaacgccagcguggugaacauccagaaggagaucgaccgccugaacgaggucgccaagaaccucaacgagucccugaucgaccugcaggagcucgggaaguacgagcaguacaucaaguggccgugguacaucuggcugggcuucaucgccggccugaucgcgaucgugauggugaccaucaugcucugcugcaugaccagcugcugcuccugccugaaggggugcugcagcugcggcuccugcugcaaguucgacgaggacgacagcgagcccguccugaagggggugaagcuccacuacacgugauaauaggcuggagccucgguggccuagcuucuugccccuugggccuccccccagccccuccuccccuuccugcacccguacccccguggucuuugaauaaagucugagugggcggcaaaaaaaaaaaaaaaaaaaaaaaaaaaaaaaaaaaaaaaaaaaaaaaaaaaaaaaaaaaaaaaaaaaaaaaaaaaaaaaaaaaaaaaaaaaaaaaaaaaa

SEQ ID NO: 26051 - RNA, 4095 nt, Artificial Sequence
  SARS-CoV-2/Wuhan/WIV05/2019__EPI_ISL_402128 spike protein mRNA gc (1-1273)(A222V_D614G)
gggaaauaagagagaaaagaagaguaagaagaaauauaagaccccggcgccgccaccauguucguguuccugguccuccugccccuggugagcucccagugcgugaaccucaccacccgcacgcagcugccgcccgccuacaccaacagcuucacccggggcgucuacuaccccgacaagguguuccgcuccagcgugcugcacuccacccaggaccucuuccugcccuucuucagcaacgucacgugguuccacgccauccacguguccgggaccaacggcaccaagcgguucgacaacccggugcugcccuucaacgacggggucuacuucgcgagcaccgagaaguccaacaucauccgcggcuggaucuucgggacgacccucgacagcaagacccagucccugcugaucgugaacaacgccaccaacguggucaucaaggugugcgaguuccaguucugcaacgaccccuuccucggcguguacuaccacaagaacaacaagagcuggauggaguccgaguuccgggucuacagcuccgccaacaacugcacguucgaguacgugagccagcccuuccugauggaccuggagggcaagcaggggaacuucaagaaccuccgcgaguucguguucaagaacaucgacggcuacuucaagaucuacuccaagcacaccccgaucaaccugguccgggaccugccccagggguucagcguccucgagccccugguggaccugcccaucggcaucaacaucacccgcuuccagacccuccuggcccugcaccgguccuaccucacgccgggggacagcagcuccggcuggaccgcgggcgccgccgccuacuacgugggguaccugcagccccgcaccuuccugcucaaguacaacgagaacggcaccaucacggacgcggucgacugcgcccuggacccccugagcgagaccaagugcacccucaaguccuucaccguggagaaggggaucuaccagacgagcaacuuccgggugcagcccaccgaguccaucguccgcuucccgaacaucaccaaccugugccccuucggcgagguguucaacgccacccgguucgccagcgucuacgccuggaaccgcaagcggaucuccaacugcguggcggacuacagcgugcuguacaacuccgccagcuucuccacguucaagugcuacggcgucagccccaccaagcucaacgaccugugcuucaccaacguguacgccgacuccuucgugauccgcggggacgagguccggcagaucgcccccggccagaccgggaagaucgccgacuacaacuacaagcugccggacgacuucacgggcugcgugaucgcguggaacagcaacaaccucgacuccaaggucgggggcaacuacaacuaccuguaccgccuguuccgcaagagcaaccucaagcccuucgagcgggacaucuccaccgagaucuaccaggccggcagcacccccugcaacgggguggagggcuucaacugcuacuucccccugcaguccuacggguuccagccgaccaacggcgugggguaccagcccuaccggguggucgugcugagcuucgagcuccugcacgcccccgccacggugugcggccccaagaaguccaccaaccuggucaagaacaagugcgugaacuucaacuucaacggccucaccgggaccggcgugcugaccgagagcaacaagaaguuccugccguuccagcaguucgggcgcgacaucgccgacacgaccgacgcgguccgcgacccccagacccuggagauccucgacaucacccccugcagcuucggcgggguguccgugaucacgccgggcaccaacaccagcaaccaggucgccgugcuguaccagggcgugaacugcaccgagguccccguggccauccacgccgaccagcugacgcccaccuggcggguguacuccaccggcagcaacgucuuccagacccgcgccgggugccucaucggcgcggagcacgugaacaacuccuacgagugcgacauccccaucggggccggcaucugcgccagcuaccagacgcagaccaacuccccgcggcgcgcccggagcguggcgucccagagcaucaucgccuacaccaugucccugggcgccgagaacagcgucgccuacuccaacaacagcaucgccauccccaccaacuucacgaucuccgugaccaccgagauccugcccgugagcaugaccaagacgagcgucgacugcaccauguacaucugcggggacuccaccgagugcagcaaccuccugcugcaguacggcuccuucugcacccagcucaaccgcgcgcugacggggaucgccguggagcaggacaagaacacccaggagguguucgcccaggucaagcagaucuacaagacgcccccgaucaaggacuucggcggguucaacuucagccagauccugcccgaccccuccaagcccagcaagcgguccuucaucgaggaccuccuguucaacaaggugacccuggccgacgccggcuucaucaagcaguacggcgacugccucggggacaucgcggcccgcgaccugaucugcgcccagaaguucaacggccugaccgugcucccgccccugcugaccgacgagaugaucgcccaguacaccagcgcccuccuggcggggaccaucacguccggcuggaccuucggggccggcgccgcccugcagauccccuucgcgaugcagauggccuaccgguucaacggcaucggggucacccagaacgugcucuacgagaaccagaagcugaucgccaaccaguucaacagcgccaucggcaagauccaggacucccugagcuccaccgccagcgcgcucgggaagcugcaggacguggucaaccagaacgcccaggcccugaacacgcucgugaagcagcuguccagcaacuucggcgccaucuccagcgugcugaacgacauccucucccgccuggacaaggucgaggccgaggugcagaucgaccggcugaucaccgggcgccuccagagccugcagaccuacgugacccagcagcugauccgggcggccgagauccgcgccagcgccaaccucgccgcgaccaagauguccgagugcguccugggccagagcaagcggguggacuucugcggcaagggguaccaccugauguccuucccccagagcgccccgcacggcguggucuuccuccacgugacguacguccccgcccaggagaagaacuucaccaccgcccccgcgaucugccacgacgggaaggcccacuucccccgcgagggcguguucguguccaacgggacccacugguucgucacgcagcggaacuucuacgagccgcagaucaucaccaccgacaacaccuucgugagcggcaacugcgacguggucaucggcaucgugaacaacacgguguacgacccccugcagcccgagcuggacuccuucaaggaggagcucgacaaguacuucaagaaccacaccagccccgacgucgaccugggggacaucuccggcaucaacgccagcguggugaacauccagaaggagaucgaccgccugaacgaggucgccaagaaccucaacgagucccugaucgaccugcaggagcucgggaaguacgagcaguacaucaaguggccgugguacaucuggcugggcuucaucgccggccugaucgcgaucgugauggugaccaucaugcucugcugcaugaccagcugcugcuccugccugaaggggugcugcagcugcggcuccugcugcaaguucgacgaggacgacagcgagcccguccugaagggggugaagcuccacuacacgugauaauaggcuggagccucgguggccuagcuucuugccccuugggccuccccccagccccuccuccccuuccugcacccguacccccguggucuuugaauaaagucugagugggcggcaaaaaaaaaaaaaaaaaaaaaaaaaaaaaaaaaaaaaaaaaaaaaaaaaaaaaaaaaaaaaaaaaaaaaaaaaaaaaaaaaaaaaaaaaaaaaaaaaaaa

SEQ ID NO: 26052 - RNA, 4095 nt, Artificial Sequence
  SARS-CoV-2/Wuhan/WIV05/2019__EPI_ISL_402128 spike protein mRNA gc (1-1273)(N439K_D614G)
gggaaauaagagagaaaagaagaguaagaagaaauauaagaccccggcgccgccaccauguucguguuccugguccuccugccccuggugagcucccagugcgugaaccucaccacccgcacgcagcugccgcccgccuacaccaacagcuucacccggggcgucuacuaccccgacaagguguuccgcuccagcgugcugcacuccacccaggaccucuuccugcccuucuucagcaacgucacgugguuccacgccauccacguguccgggaccaacggcaccaagcgguucgacaacccggugcugcccuucaacgacggggucuacuucgcgagcaccgagaaguccaacaucauccgcggcuggaucuucgggacgacccucgacagcaagacccagucccugcugaucgugaacaacgccaccaacguggucaucaaggugugcgaguuccaguucugcaacgaccccuuccucggcguguacuaccacaagaacaacaagagcuggauggaguccgaguuccgggucuacagcuccgccaacaacugcacguucgaguacgugagccagcccuuccugauggaccuggagggcaagcaggggaacuucaagaaccuccgcgaguucguguucaagaacaucgacggcuacuucaagaucuacuccaagcacaccccgaucaaccugguccgggaccugccccagggguucagcgcccucgagccccugguggaccugcccaucggcaucaacaucacccgcuuccagacccuccuggcccugcaccgguccuaccucacgccgggggacagcagcuccggcuggaccgcgggcgccgccgccuacuacgugggguaccugcagccccgcaccuuccugcucaaguacaacgagaacggcaccaucacggacgcggucgacugcgcccuggacccccugagcgagaccaagugcacccucaaguccuucaccguggagaaggggaucuaccagacgagcaacuuccgggugcagcccaccgaguccaucguccgcuucccgaacaucaccaaccugugccccuucggcgagguguucaacgccacccgguucgccagcgucuacgccuggaaccgcaagcggaucuccaacugcguggcggacuacagcgugcuguacaacuccgccagcuucuccacguucaagugcuacggcgucagccccaccaagcucaacgaccugugcuucaccaacguguacgccgacuccuucgugauccgcggggacgagguccggcagaucgcccccggccagaccgggaagaucgccgacuacaacuacaagcugccggacgacuucacgggcugcgugaucgcguggaacagcaagaaccucgacuccaaggucgggggcaacuacaacuaccuguaccgccuguuccgcaagagcaaccucaagcccuucgagcgggacaucuccaccgagaucuaccaggccggcagcacccccugcaacgggguggagggcuucaacugcuacuucccccugcaguccuacggguuccagccgaccaacggcgugggguaccagcccuaccggguggucgugcugagcuucgagcuccugcacgcccccgccacggugugcggccccaagaaguccaccaaccuggucaagaacaagugcgugaacuucaacuucaacggccucaccgggaccggcgugcugaccgagagcaacaagaaguuccugccguuccagcaguucgggcgcgacaucgccgacacgaccgacgcgguccgcgacccccagacccuggagauccucgacaucacccccugcagcuucggcgggguguccgugaucacgccgggcaccaacaccagcaaccaggucgccgugcuguaccagggcgugaacugcaccgagguccccguggccauccacgccgaccagcugacgcccaccuggcggguguacuccaccggcagcaacgucuuccagacccgcgccgggugccucaucggcgcggagcacgugaacaacuccuacgagugcgacauccccaucggggccggcaucugcgccagcuaccagacgcagaccaacuccccgcggcgcgcccggagcguggcgucccagagcaucaucgccuacaccaugucccugggcgccgagaacagcgucgccuacuccaacaacagcaucgccauccccaccaacuucacgaucuccgugaccaccgagauccugcccgugagcaugaccaagacgagcgucgacugcaccauguacaucugcggggacuccaccgagugcagcaaccuccugcugcaguacggcuccuucugcacccagcucaaccgcgcgcugacggggaucgccguggagcaggacaagaacacccaggagguguucgcccaggucaagcagaucuacaagacgcccccgaucaaggacuucggcggguucaacuucagccagauccugcccgaccccuccaagcccagcaagcgguccuucaucgaggaccuccuguucaacaaggugacccuggccgacgccggcuucaucaagcaguacggcgacugccucggggacaucgcggcccgcgaccugaucugcgcccagaaguucaacggccugaccgugcucccgccccugcugaccgacgagaugaucgcccaguacaccagcgcccuccuggcggggaccaucacguccggcuggaccuucggggccggcgccgcccugcagauccccuucgcgaugcagauggccuaccgguucaacggcaucggggucacccagaacgugcucuacgagaaccagaagcugaucgccaaccaguucaacagcgccaucggcaagauccaggacucccugagcuccaccgccagcgcgcucgggaagcugcaggacguggucaaccagaacgcccaggcccugaacacgcucgugaagcagcuguccagcaacuucggcgccaucuccagcgugcugaacgacauccucucccgccuggacaaggucgaggccgaggugcagaucgaccggcugaucaccgggcgccuccagagccugcagaccuacgugacccagcagcugauccgggcggccgagauccgcgccagcgccaaccucgccgcgaccaagauguccgagugcguccugggccagagcaagcggguggacuucugcggcaagggguaccaccugauguccuucccccagagcgccccgcacggcguggucuuccuccacgugacguacguccccgcccaggagaagaacuucaccaccgcccccgcgaucugccacgacgggaaggcccacuucccccgcgagggcguguucguguccaacgggacccacugguucgucacgcagcggaacuucuacgagccgcagaucaucaccaccgacaacaccuucgugagcggcaacugcgacguggucaucggcaucgugaacaacacgguguacgacccccugcagcccgagcuggacuccuucaaggaggagcucgacaaguacuucaagaaccacaccagccccgacgucgaccugggggacaucuccggcaucaacgccagcguggugaacauccagaaggagaucgaccgccugaacgaggucgccaagaaccucaacgagucccugaucgaccugcaggagcucgggaaguacgagcaguacaucaaguggccgugguacaucuggcugggcuucaucgccggccugaucgcgaucgugauggugaccaucaugcucugcugcaugaccagcugcugcuccugccugaaggggugcugcagcugcggcuccugcugcaaguucgacgaggacgacagcgagcccguccugaagggggugaagcuccacuacacgugauaauaggcuggagccucgguggccuagcuucuugccccuugggccuccccccagccccuccuccccuuccugcacccguacccccguggucuuugaauaaagucugagugggcggcaaaaaaaaaaaaaaaaaaaaaaaaaaaaaaaaaaaaaaaaaaaaaaaaaaaaaaaaaaaaaaaaaaaaaaaaaaaaaaaaaaaaaaaaaaaaaaaaaaaa

SEQ ID NO: 26053 - RNA, 4095 nt, Artificial Sequence
  SARS-CoV-2/Wuhan/WIV05/2019__EPI_ISL_402128 spike protein mRNA gc (1-1273)(S477N_D614G)
gggaaauaagagagaaaagaagaguaagaagaaauauaagaccccggcgccgccaccauguucguguuccugguccuccugccccuggugagcucccagugcgugaaccucaccacccgcacgcagcugccgcccgccuacaccaacagcuucacccggggcgucuacuaccccgacaagguguuccgcuccagcgugcugcacuccacccaggaccucuuccugcccuucuucagcaacgucacgugguuccacgccauccacguguccgggaccaacggcaccaagcgguucgacaacccggugcugcccuucaacgacggggucuacuucgcgagcaccgagaaguccaacaucauccgcggcuggaucuucgggacgacccucgacagcaagacccagucccugcugaucgugaacaacgccaccaacguggucaucaaggugugcgaguuccaguucugcaacgaccccuuccucggcguguacuaccacaagaacaacaagagcuggauggaguccgaguuccgggucuacagcuccgccaacaacugcacguucgaguacgugagccagcccuuccugauggaccuggagggcaagcaggggaacuucaagaaccuccgcgaguucguguucaagaacaucgacggcuacuucaagaucuacuccaagcacaccccgaucaaccugguccgggaccugccccagggguucagcgcccucgagccccugguggaccugcccaucggcaucaacaucacccgcuuccagacccuccuggcccugcaccgguccuaccucacgccgggggacagcagcuccggcuggaccgcgggcgccgccgccuacuacgugggguaccugcagccccgcaccuuccugcucaaguacaacgagaacggcaccaucacggacgcggucgacugcgcccuggacccccugagcgagaccaagugcacccucaaguccuucaccguggagaaggggaucuaccagacgagcaacuuccgggugcagcccaccgaguccaucguccgcuucccgaacaucaccaaccugugccccuucggcgagguguucaacgccacccgguucgccagcgucuacgccuggaaccgcaagcggaucuccaacugcguggcggacuacagcgugcuguacaacuccgccagcuucuccacguucaagugcuacggcgucagccccaccaagcucaacgaccugugcuucaccaacguguacgccgacuccuucgugauccgcggggacgagguccggcagaucgcccccggccagaccgggaagaucgccgacuacaacuacaagcugccggacgacuucacgggcugcgugaucgcguggaacagcaacaaccucgacuccaaggucgggggcaacuacaacuaccuguaccgccuguuccgcaagagcaaccucaagcccuucgagcgggacaucuccaccgagaucuaccaggccggcaacacccccugcaacgggguggagggcuucaacugcuacuucccccugcaguccuacggguuccagccgaccaacggcgugggguaccagcccuaccggguggucgugcugagcuucgagcuccugcacgcccccgccacggugugcggccccaagaaguccaccaaccuggucaagaacaagugcgugaacuucaacuucaacggccucaccgggaccggcgugcugaccgagagcaacaagaaguuccugccguuccagcaguucgggcgcgacaucgccgacacgaccgacgcgguccgcgacccccagacccuggagauccucgacaucacccccugcagcuucggcgggguguccgugaucacgccgggcaccaacaccagcaaccaggucgccgugcuguaccagggcgugaacugcaccgagguccccguggccauccacgccgaccagcugacgcccaccuggcggguguacuccaccggcagcaacgucuuccagacccgcgccgggugccucaucggcgcggagcacgugaacaacuccuacgagugcgacauccccaucggggccggcaucugcgccagcuaccagacgcagaccaacuccccgcggcgcgcccggagcguggcgucccagagcaucaucgccuacaccaugucccugggcgccgagaacagcgucgccuacuccaacaacagcaucgccauccccaccaacuucacgaucuccgugaccaccgagauccugcccgugagcaugaccaagacgagcgucgacugcaccauguacaucugcggggacuccaccgagugcagcaaccuccugcugcaguacggcuccuucugcacccagcucaaccgcgcgcugacggggaucgccguggagcaggacaagaacacccaggagguguucgcccaggucaagcagaucuacaagacgcccccgaucaaggacuucggcggguucaacuucagccagauccugcccgaccccuccaagcccagcaagcgguccuucaucgaggaccuccuguucaacaaggugacccuggccgacgccggcuucaucaagcaguacggcgacugccucggggacaucgcggcccgcgaccugaucugcgcccagaaguucaacggccugaccgugcucccgccccugcugaccgacgagaugaucgcccaguacaccagcgcccuccuggcggggaccaucacguccggcuggaccuucggggccggcgccgcccugcagauccccuucgcgaugcagauggccuaccgguucaacggcaucggggucacccagaacgugcucuacgagaaccagaagcugaucgccaaccaguucaacagcgccaucggcaagauccaggacucccugagcuccaccgccagcgcgcucgggaagcugcaggacguggucaaccagaacgcccaggcccugaacacgcucgugaagcagcuguccagcaacuucggcgccaucuccagcgugcugaacgacauccucucccgccuggacaaggucgaggccgaggugcagaucgaccggcugaucaccgggcgccuccagagccugcagaccuacgugacccagcagcugauccgggcggccgagauccgcgccagcgccaaccucgccgcgaccaagauguccgagugcguccugggccagagcaagcggguggacuucugcggcaagggguaccaccugauguccuucccccagagcgccccgcacggcguggucuuccuccacgugacguacguccccgcccaggagaagaacuucaccaccgcccccgcgaucugccacgacgggaaggcccacuucccccgcgagggcguguucguguccaacgggacccacugguucgucacgcagcggaacuucuacgagccgcagaucaucaccaccgacaacaccuucgugagcggcaacugcgacguggucaucggcaucgugaacaacacgguguacgacccccugcagcccgagcuggacuccuucaaggaggagcucgacaaguacuucaagaaccacaccagccccgacgucgaccugggggacaucuccggcaucaacgccagcguggugaacauccagaaggagaucgaccgccugaacgaggucgccaagaaccucaacgagucccugaucgaccugcaggagcucgggaaguacgagcaguacaucaaguggccgugguacaucuggcugggcuucaucgccggccugaucgcgaucgugauggugaccaucaugcucugcugcaugaccagcugcugcuccugccugaaggggugcugcagcugcggcuccugcugcaaguucgacgaggacgacagcgagcccguccugaagggggugaagcuccacuacacgugauaauaggcuggagccucgguggccuagcuucuugccccuugggccuccccccagccccuccuccccuuccugcacccguacccccguggucuuugaauaaagucugagugggcggcaaaaaaaaaaaaaaaaaaaaaaaaaaaaaaaaaaaaaaaaaaaaaaaaaaaaaaaaaaaaaaaaaaaaaaaaaaaaaaaaaaaaaaaaaaaaaaaaaaaa

SEQ ID NO: 26054 - RNA, 4095 nt, Artificial Sequence
  SARS-CoV-2/Wuhan/WIV05/2019__EPI_ISL_402128 spike protein mRNA gc (1-1273)(N501Y_D614G)
gggaaauaagagagaaaagaagaguaagaagaaauauaagaccccggcgccgccaccauguucguguuccugguccuccugccccuggugagcucccagugcgugaaccucaccacccgcacgcagcugccgcccgccuacaccaacagcuucacccggggcgucuacuaccccgacaagguguuccgcuccagcgugcugcacuccacccaggaccucuuccugcccuucuucagcaacgucacgugguuccacgccauccacguguccgggaccaacggcaccaagcgguucgacaacccggugcugcccuucaacgacggggucuacuucgcgagcaccgagaaguccaacaucauccgcggcuggaucuucgggacgacccucgacagcaagacccagucccugcugaucgugaacaacgccaccaacguggucaucaaggugugcgaguuccaguucugcaacgaccccuuccucggcguguacuaccacaagaacaacaagagcuggauggaguccgaguuccgggucuacagcuccgccaacaacugcacguucgaguacgugagccagcccuuccugauggaccuggagggcaagcaggggaacuucaagaaccuccgcgaguucguguucaagaacaucgacggcuacuucaagaucuacuccaagcacaccccgaucaaccugguccgggaccugccccagggguucagcgcccucgagccccugguggaccugcccaucggcaucaacaucacccgcuuccagacccuccuggcccugcaccgguccuaccucacgccgggggacagcagcuccggcuggaccgcgggcgccgccgccuacuacgugggguaccugcagccccgcaccuuccugcucaaguacaacgagaacggcaccaucacggacgcggucgacugcgcccuggacccccugagcgagaccaagugcacccucaaguccuucaccguggagaaggggaucuaccagacgagcaacuuccgggugcagcccaccgaguccaucguccgcuucccgaacaucaccaaccugugccccuucggcgagguguucaacgccacccgguucgccagcgucuacgccuggaaccgcaagcggaucuccaacugcguggcggacuacagcgugcuguacaacuccgccagcuucuccacguucaagugcuacggcgucagccccaccaagcucaacgaccugugcuucaccaacguguacgccgacuccuucgugauccgcggggacgagguccggcagaucgcccccggccagaccgggaagaucgccgacuacaacuacaagcugccggacgacuucacgggcugcgugaucgcguggaacagcaacaaccucgacuccaaggucgggggcaacuacaacuaccuguaccgccuguuccgcaagagcaaccucaagcccuucgagcgggacaucuccaccgagaucuaccaggccggcagcacccccugcaacgggguggagggcuucaacugcuacuucccccugcaguccuacggguuccagccgaccuacggcgugggguaccagcccuaccggguggucgugcugagcuucgagcuccugcacgcccccgccacggugugcggccccaagaaguccaccaaccuggucaagaacaagugcgugaacuucaacuucaacggccucaccgggaccggcgugcugaccgagagcaacaagaaguuccugccguuccagcaguucgggcgcgacaucgccgacacgaccgacgcgguccgcgacccccagacccuggagauccucgacaucacccccugcagcuucggcgggguguccgugaucacgccgggcaccaacaccagcaaccaggucgccgugcuguaccagggcgugaacugcaccgagguccccguggccauccacgccgaccagcugacgcccaccuggcggguguacuccaccggcagcaacgucuuccagacccgcgccgggugccucaucggcgcggagcacgugaacaacuccuacgagugcgacauccccaucggggccggcaucugcgccagcuaccagacgcagaccaacuccccgcggcgcgcccggagcguggcgucccagagcaucaucgccuacaccaugucccugggcgccgagaacagcgucgccuacuccaacaacagcaucgccauccccaccaacuucacgaucuccgugaccaccgagauccugcccgugagcaugaccaagacgagcgucgacugcaccauguacaucugcggggacuccaccgagugcagcaaccuccugcugcaguacggcuccuucugcacccagcucaaccgcgcgcugacggggaucgccguggagcaggacaagaacacccaggagguguucgcccaggucaagcagaucuacaagacgcccccgaucaaggacuucggcggguucaacuucagccagauccugcccgaccccuccaagcccagcaagcgguccuucaucgaggaccuccuguucaacaaggugacccuggccgacgccggcuucaucaagcaguacggcgacugccucggggacaucgcggcccgcgaccugaucugcgcccagaaguucaacggccugaccgugcucccgccccugcugaccgacgagaugaucgcccaguacaccagcgcccuccuggcggggaccaucacguccggcuggaccuucggggccggcgccgcccugcagauccccuucgcgaugcagauggccuaccgguucaacggcaucggggucacccagaacgugcucuacgagaaccagaagcugaucgccaaccaguucaacagcgccaucggcaagauccaggacucccugagcuccaccgccagcgcgcucgggaagcugcaggacguggucaaccagaacgcccaggcccugaacacgcucgugaagcagcuguccagcaacuucggcgccaucuccagcgugcugaacgacauccucucccgccuggacaaggucgaggccgaggugcagaucgaccggcugaucaccgggcgccuccagagccugcagaccuacgugacccagcagcugauccgggcggccgagauccgcgccagcgccaaccucgccgcgaccaagauguccgagugcguccugggccagagcaagcggguggacuucugcggcaagggguaccaccugauguccuucccccagagcgccccgcacggcguggucuuccuccacgugacguacguccccgcccaggagaagaacuucaccaccgcccccgcgaucugccacgacgggaaggcccacuucccccgcgagggcguguucguguccaacgggacccacugguucgucacgcagcggaacuucuacgagccgcagaucaucaccaccgacaacaccuucgugagcggcaacugcgacguggucaucggcaucgugaacaacacgguguacgacccccugcagcccgagcuggacuccuucaaggaggagcucgacaaguacuucaagaaccacaccagccccgacgucgaccugggggacaucuccggcaucaacgccagcguggugaacauccagaaggagaucgaccgccugaacgaggucgccaagaaccucaacgagucccugaucgaccugcaggagcucgggaaguacgagcaguacaucaaguggccgugguacaucuggcugggcuucaucgccggccugaucgcgaucgugauggugaccaucaugcucugcugcaugaccagcugcugcuccugccugaaggggugcugcagcugcggcuccugcugcaaguucgacgaggacgacagcgagcccguccugaagggggugaagcuccacuacacgugauaauaggcuggagccucgguggccuagcuucuugccccuugggccuccccccagccccuccuccccuuccugcacccguacccccguggucuuugaauaaagucugagugggcggcaaaaaaaaaaaaaaaaaaaaaaaaaaaaaaaaaaaaaaaaaaaaaaaaaaaaaaaaaaaaaaaaaaaaaaaaaaaaaaaaaaaaaaaaaaaaaaaaaaaa

SEQ ID NO: 26055 - RNA, 4089 nt, Artificial Sequence
  SARS-CoV-2/Wuhan/WIV05/2019__EPI_ISL_402128 spike protein mRNA gc (1-1273)(H69del_V70del_D614G)
gggaaauaagagagaaaagaagaguaagaagaaauauaagaccccggcgccgccaccauguucguguuccugguccuccugccccuggugagcucccagugcgugaaccucaccacccgcacgcagcugccgcccgccuacaccaacagcuucacccggggcgucuacuaccccgacaagguguuccgcuccagcgugcugcacuccacccaggaccucuuccugcccuucuucagcaacgucacgugguuccacgccaucuccgggaccaacggcaccaagcgguucgacaacccggugcugcccuucaacgacggggucuacuucgcgagcaccgagaaguccaacaucauccgcggcuggaucuucgggacgacccucgacagcaagacccagucccugcugaucgugaacaacgccaccaacguggucaucaaggugugcgaguuccaguucugcaacgaccccuuccucggcguguacuaccacaagaacaacaagagcuggauggaguccgaguuccgggucuacagcuccgccaacaacugcacguucgaguacgugagccagcccuuccugauggaccuggagggcaagcaggggaacuucaagaaccuccgcgaguucguguucaagaacaucgacggcuacuucaagaucuacuccaagcacaccccgaucaaccugguccgggaccugccccagggguucagcgcccucgagccccugguggaccugcccaucggcaucaacaucacccgcuuccagacccuccuggcccugcaccgguccuaccucacgccgggggacagcagcuccggcuggaccgcgggcgccgccgccuacuacgugggguaccugcagccccgcaccuuccugcucaaguacaacgagaacggcaccaucacggacgcggucgacugcgcccuggacccccugagcgagaccaagugcacccucaaguccuucaccguggagaaggggaucuaccagacgagcaacuuccgggugcagcccaccgaguccaucguccgcuucccgaacaucaccaaccugugccccuucggcgagguguucaacgccacccgguucgccagcgucuacgccuggaaccgcaagcggaucuccaacugcguggcggacuacagcgugcuguacaacuccgccagcuucuccacguucaagugcuacggcgucagccccaccaagcucaacgaccugugcuucaccaacguguacgccgacuccuucgugauccgcggggacgagguccggcagaucgcccccggccagaccgggaagaucgccgacuacaacuacaagcugccggacgacuucacgggcugcgugaucgcguggaacagcaacaaccucgacuccaaggucgggggcaacuacaacuaccuguaccgccuguuccgcaagagcaaccucaagcccuucgagcgggacaucuccaccgagaucuaccaggccggcagcacccccugcaacgggguggagggcuucaacugcuacuucccccugcaguccuacggguuccagccgaccaacggcgugggguaccagcccuaccggguggucgugcugagcuucgagcuccugcacgcccccgccacggugugcggccccaagaaguccaccaaccuggucaagaacaagugcgugaacuucaacuucaacggccucaccgggaccggcgugcugaccgagagcaacaagaaguuccugccguuccagcaguucgggcgcgacaucgccgacacgaccgacgcgguccgcgacccccagacccuggagauccucgacaucacccccugcagcuucggcgggguguccgugaucacgccgggcaccaacaccagcaaccaggucgccgugcuguaccagggcgugaacugcaccgagguccccguggccauccacgccgaccagcugacgcccaccuggcggguguacuccaccggcagcaacgucuuccagacccgcgccgggugccucaucggcgcggagcacgugaacaacuccuacgagugcgacauccccaucggggccggcaucugcgccagcuaccagacgcagaccaacuccccgcggcgcgcccggagcguggcgucccagagcaucaucgccuacaccaugucccugggcgccgagaacagcgucgccuacuccaacaacagcaucgccauccccaccaacuucacgaucuccgugaccaccgagauccugcccgugagcaugaccaagacgagcgucgacugcaccauguacaucugcggggacuccaccgagugcagcaaccuccugcugcaguacggcuccuucugcacccagcucaaccgcgcgcugacggggaucgccguggagcaggacaagaacacccaggagguguucgcccaggucaagcagaucuacaagacgcccccgaucaaggacuucggcggguucaacuucagccagauccugcccgaccccuccaagcccagcaagcgguccuucaucgaggaccuccuguucaacaaggugacccuggccgacgccggcuucaucaagcaguacggcgacugccucggggacaucgcggcccgcgaccugaucugcgcccagaaguucaacggccugaccgugcucccgccccugcugaccgacgagaugaucgcccaguacaccagcgcccuccuggcggggaccaucacguccggcuggaccuucggggccggcgccgcccugcagauccccuucgcgaugcagauggccuaccgguucaacggcaucggggucacccagaacgugcucuacgagaaccagaagcugaucgccaaccaguucaacagcgccaucggcaagauccaggacucccugagcuccaccgccagcgcgcucgggaagcugcaggacguggucaaccagaacgcccaggcccugaacacgcucgugaagcagcuguccagcaacuucggcgccaucuccagcgugcugaacgacauccucucccgccuggacaaggucgaggccgaggugcagaucgaccggcugaucaccgggcgccuccagagccugcagaccuacgugacccagcagcugauccgggcggccgagauccgcgccagcgccaaccucgccgcgaccaagauguccgagugcguccugggccagagcaagcggguggacuucugcggcaagggguaccaccugauguccuucccccagagcgccccgcacggcguggucuuccuccacgugacguacguccccgcccaggagaagaacuucaccaccgcccccgcgaucugccacgacgggaaggcccacuucccccgcgagggcguguucguguccaacgggacccacugguucgucacgcagcggaacuucuacgagccgcagaucaucaccaccgacaacaccuucgugagcggcaacugcgacguggucaucggcaucgugaacaacacgguguacgacccccugcagcccgagcuggacuccuucaaggaggagcucgacaaguacuucaagaaccacaccagccccgacgucgaccugggggacaucuccggcaucaacgccagcguggugaacauccagaaggagaucgaccgccugaacgaggucgccaagaaccucaacgagucccugaucgaccugcaggagcucgggaaguacgagcaguacaucaaguggccgugguacaucuggcugggcuucaucgccggccugaucgcgaucgugauggugaccaucaugcucugcugcaugaccagcugcugcuccugccugaaggggugcugcagcugcggcuccugcugcaaguucgacgaggacgacagcgagcccguccugaagggggugaagcuccacuacacgugauaauaggcuggagccucgguggccuagcuucuugccccuugggccuccccccagccccuccuccccuuccugcacccguacccccguggucuuugaauaaagucugagugggcggcaaaaaaaaaaaaaaaaaaaaaaaaaaaaaaaaaaaaaaaaaaaaaaaaaaaaaaaaaaaaaaaaaaaaaaaaaaaaaaaaaaaaaaaaaaaaaaaaaaaa

SEQ ID NO: 26056 - RNA, 4095 nt, Artificial Sequence
  SARS-CoV-2/Wuhan/WIV05/2019__EPI_ISL_402128 spike protein mRNA gc (1-1273)(Y453F_D614G)
gggaaauaagagagaaaagaagaguaagaagaaauauaagaccccggcgccgccaccauguucguguuccugguccuccugccccuggugagcucccagugcgugaaccucaccacccgcacgcagcugccgcccgccuacaccaacagcuucacccggggcgucuacuaccccgacaagguguuccgcuccagcgugcugcacuccacccaggaccucuuccugcccuucuucagcaacgucacgugguuccacgccauccacguguccgggaccaacggcaccaagcgguucgacaacccggugcugcccuucaacgacggggucuacuucgcgagcaccgagaaguccaacaucauccgcggcuggaucuucgggacgacccucgacagcaagacccagucccugcugaucgugaacaacgccaccaacguggucaucaaggugugcgaguuccaguucugcaacgaccccuuccucggcguguacuaccacaagaacaacaagagcuggauggaguccgaguuccgggucuacagcuccgccaacaacugcacguucgaguacgugagccagcccuuccugauggaccuggagggcaagcaggggaacuucaagaaccuccgcgaguucguguucaagaacaucgacggcuacuucaagaucuacuccaagcacaccccgaucaaccugguccgggaccugccccagggguucagcgcccucgagccccugguggaccugcccaucggcaucaacaucacccgcuuccagacccuccuggcccugcaccgguccuaccucacgccgggggacagcagcuccggcuggaccgcgggcgccgccgccuacuacgugggguaccugcagccccgcaccuuccugcucaaguacaacgagaacggcaccaucacggacgcggucgacugcgcccuggacccccugagcgagaccaagugcacccucaaguccuucaccguggagaaggggaucuaccagacgagcaacuuccgggugcagcccaccgaguccaucguccgcuucccgaacaucaccaaccugugccccuucggcgagguguucaacgccacccgguucgccagcgucuacgccuggaaccgcaagcggaucuccaacugcguggcggacuacagcgugcuguacaacuccgccagcuucuccacguucaagugcuacggcgucagccccaccaagcucaacgaccugugcuucaccaacguguacgccgacuccuucgugauccgcggggacgagguccggcagaucgcccccggccagaccgggaagaucgccgacuacaacuacaagcugccggacgacuucacgggcugcgugaucgcguggaacagcaacaaccucgacuccaaggucgggggcaacuacaacuaccuguuccgccuguuccgcaagagcaaccucaagcccuucgagcgggacaucuccaccgagaucuaccaggccggcagcacccccugcaacgggguggagggcuucaacugcuacuucccccugcaguccuacggguuccagccgaccaacggcgugggguaccagcccuaccggguggucgugcugagcuucgagcuccugcacgcccccgccacggugugcggccccaagaaguccaccaaccuggucaagaacaagugcgugaacuucaacuucaacggccucaccgggaccggcgugcugaccgagagcaacaagaaguuccugccguuccagcaguucgggcgcgacaucgccgacacgaccgacgcgguccgcgacccccagacccuggagauccucgacaucacccccugcagcuucggcgggguguccgugaucacgccgggcaccaacaccagcaaccaggucgccgugcuguaccagggcgugaacugcaccgagguccccguggccauccacgccgaccagcugacgcccaccuggcggguguacuccaccggcagcaacgucuuccagacccgcgccgggugccucaucggcgcggagcacgugaacaacuccuacgagugcgacauccccaucggggccggcaucugcgccagcuaccagacgcagaccaacuccccgcggcgcgcccggagcguggcgucccagagcaucaucgccuacaccaugucccugggcgccgagaacagcgucgccuacuccaacaacagcaucgccauccccaccaacuucacgaucuccgugaccaccgagauccugcccgugagcaugaccaagacgagcgucgacugcaccauguacaucugcggggacuccaccgagugcagcaaccuccugcugcaguacggcuccuucugcacccagcucaaccgcgcgcugacggggaucgccguggagcaggacaagaacacccaggagguguucgcccaggucaagcagaucuacaagacgcccccgaucaaggacuucggcggguucaacuucagccagauccugcccgaccccuccaagcccagcaagcgguccuucaucgaggaccuccuguucaacaaggugacccuggccgacgccggcuucaucaagcaguacggcgacugccucggggacaucgcggcccgcgaccugaucugcgcccagaaguucaacggccugaccgugcucccgccccugcugaccgacgagaugaucgcccaguacaccagcgcccuccuggcggggaccaucacguccggcuggaccuucggggccggcgccgcccugcagauccccuucgcgaugcagauggccuaccgguucaacggcaucggggucacccagaacgugcucuacgagaaccagaagcugaucgccaaccaguucaacagcgccaucggcaagauccaggacucccugagcuccaccgccagcgcgcucgggaagcugcaggacguggucaaccagaacgcccaggcccugaacacgcucgugaagcagcuguccagcaacuucggcgccaucuccagcgugcugaacgacauccucucccgccuggacaaggucgaggccgaggugcagaucgaccggcugaucaccgggcgccuccagagccugcagaccuacgugacccagcagcugauccgggcggccgagauccgcgccagcgccaaccucgccgcgaccaagauguccgagugcguccugggccagagcaagcggguggacuucugcggcaagggguaccaccugauguccuucccccagagcgccccgcacggcguggucuuccuccacgugacguacguccccgcccaggagaagaacuucaccaccgcccccgcgaucugccacgacgggaaggcccacuucccccgcgagggcguguucguguccaacgggacccacugguucgucacgcagcggaacuucuacgagccgcagaucaucaccaccgacaacaccuucgugagcggcaacugcgacguggucaucggcaucgugaacaacacgguguacgacccccugcagcccgagcuggacuccuucaaggaggagcucgacaaguacuucaagaaccacaccagccccgacgucgaccugggggacaucuccggcaucaacgccagcguggugaacauccagaaggagaucgaccgccugaacgaggucgccaagaaccucaacgagucccugaucgaccugcaggagcucgggaaguacgagcaguacaucaaguggccgugguacaucuggcugggcuucaucgccggccugaucgcgaucgugauggugaccaucaugcucugcugcaugaccagcugcugcuccugccugaaggggugcugcagcugcggcuccugcugcaaguucgacgaggacgacagcgagcccguccugaagggggugaagcuccacuacacgugauaauaggcuggagccucgguggccuagcuucuugccccuugggccuccccccagccccuccuccccuuccugcacccguacccccguggucuuugaauaaagucugagugggcggcaaaaaaaaaaaaaaaaaaaaaaaaaaaaaaaaaaaaaaaaaaaaaaaaaaaaaaaaaaaaaaaaaaaaaaaaaaaaaaaaaaaaaaaaaaaaaaaaaaaa

SEQ ID NO: 26057 - RNA, 4095 nt, Artificial Sequence
  SARS-CoV-2/Wuhan/WIV05/2019__EPI_ISL_402128 spike protein mRNA gc (1-1273)(D614G_I692V)
gggaaauaagagagaaaagaagaguaagaagaaauauaagaccccggcgccgccaccauguucguguuccugguccuccugccccuggugagcucccagugcgugaaccucaccacccgcacgcagcugccgcccgccuacaccaacagcuucacccggggcgucuacuaccccgacaagguguuccgcuccagcgugcugcacuccacccaggaccucuuccugcccuucuucagcaacgucacgugguuccacgccauccacguguccgggaccaacggcaccaagcgguucgacaacccggugcugcccuucaacgacggggucuacuucgcgagcaccgagaaguccaacaucauccgcggcuggaucuucgggacgacccucgacagcaagacccagucccugcugaucgugaacaacgccaccaacguggucaucaaggugugcgaguuccaguucugcaacgaccccuuccucggcguguacuaccacaagaacaacaagagcuggauggaguccgaguuccgggucuacagcuccgccaacaacugcacguucgaguacgugagccagcccuuccugauggaccuggagggcaagcaggggaacuucaagaaccuccgcgaguucguguucaagaacaucgacggcuacuucaagaucuacuccaagcacaccccgaucaaccugguccgggaccugccccagggguucagcgcccucgagccccugguggaccugcccaucggcaucaacaucacccgcuuccagacccuccuggcccugcaccgguccuaccucacgccgggggacagcagcuccggcuggaccgcgggcgccgccgccuacuacgugggguaccugcagccccgcaccuuccugcucaaguacaacgagaacggcaccaucacggacgcggucgacugcgcccuggacccccugagcgagaccaagugcacccucaaguccuucaccguggagaaggggaucuaccagacgagcaacuuccgggugcagcccaccgaguccaucguccgcuucccgaacaucaccaaccugugccccuucggcgagguguucaacgccacccgguucgccagcgucuacgccuggaaccgcaagcggaucuccaacugcguggcggacuacagcgugcuguacaacuccgccagcuucuccacguucaagugcuacggcgucagccccaccaagcucaacgaccugugcuucaccaacguguacgccgacuccuucgugauccgcggggacgagguccggcagaucgcccccggccagaccgggaagaucgccgacuacaacuacaagcugccggacgacuucacgggcugcgugaucgcguggaacagcaacaaccucgacuccaaggucgggggcaacuacaacuaccuguaccgccuguuccgcaagagcaaccucaagcccuucgagcgggacaucuccaccgagaucuaccaggccggcagcacccccugcaacgggguggagggcuucaacugcuacuucccccugcaguccuacggguuccagccgaccaacggcgugggguaccagcccuaccggguggucgugcugagcuucgagcuccugcacgcccccgccacggugugcggccccaagaaguccaccaaccuggucaagaacaagugcgugaacuucaacuucaacggccucaccgggaccggcgugcugaccgagagcaacaagaaguuccugccguuccagcaguucgggcgcgacaucgccgacacgaccgacgcgguccgcgacccccagacccuggagauccucgacaucacccccugcagcuucggcgggguguccgugaucacgccgggcaccaacaccagcaaccaggucgccgugcuguaccagggcgugaacugcaccgagguccccguggccauccacgccgaccagcugacgcccaccuggcggguguacuccaccggcagcaacgucuuccagacccgcgccgggugccucaucggcgcggagcacgugaacaacuccuacgagugcgacauccccaucggggccggcaucugcgccagcuaccagacgcagaccaacuccccgcggcgcgcccggagcguggcgucccagagcgucaucgccuacaccaugucccugggcgccgagaacagcgucgccuacuccaacaacagcaucgccauccccaccaacuucacgaucuccgugaccaccgagauccugcccgugagcaugaccaagacgagcgucgacugcaccauguacaucugcggggacuccaccgagugcagcaaccuccugcugcaguacggcuccuucugcacccagcucaaccgcgcgcugacggggaucgccguggagcaggacaagaacacccaggagguguucgcccaggucaagcagaucuacaagacgcccccgaucaaggacuucggcggguucaacuucagccagauccugcccgaccccuccaagcccagcaagcgguccuucaucgaggaccuccuguucaacaaggugacccuggccgacgccggcuucaucaagcaguacggcgacugccucggggacaucgcggcccgcgaccugaucugcgcccagaaguucaacggccugaccgugcucccgccccugcugaccgacgagaugaucgcccaguacaccagcgcccuccuggcggggaccaucacguccggcuggaccuucggggccggcgccgcccugcagauccccuucgcgaugcagauggccuaccgguucaacggcaucggggucacccagaacgugcucuacgagaaccagaagcugaucgccaaccaguucaacagcgccaucggcaagauccaggacucccugagcuccaccgccagcgcgcucgggaagcugcaggacguggucaaccagaacgcccaggcccugaacacgcucgugaagcagcuguccagcaacuucggcgccaucuccagcgugcugaacgacauccucucccgccuggacaaggucgaggccgaggugcagaucgaccggcugaucaccgggcgccuccagagccugcagaccuacgugacccagcagcugauccgggcggccgagauccgcgccagcgccaaccucgccgcgaccaagauguccgagugcguccugggccagagcaagcggguggacuucugcggcaagggguaccaccugauguccuucccccagagcgccccgcacggcguggucuuccuccacgugacguacguccccgcccaggagaagaacuucaccaccgcccccgcgaucugccacgacgggaaggcccacuucccccgcgagggcguguucguguccaacgggacccacugguucgucacgcagcggaacuucuacgagccgcagaucaucaccaccgacaacaccuucgugagcggcaacugcgacguggucaucggcaucgugaacaacacgguguacgacccccugcagcccgagcuggacuccuucaaggaggagcucgacaaguacuucaagaaccacaccagccccgacgucgaccugggggacaucuccggcaucaacgccagcguggugaacauccagaaggagaucgaccgccugaacgaggucgccaagaaccucaacgagucccugaucgaccugcaggagcucgggaaguacgagcaguacaucaaguggccgugguacaucuggcugggcuucaucgccggccugaucgcgaucgugauggugaccaucaugcucugcugcaugaccagcugcugcuccugccugaaggggugcugcagcugcggcuccugcugcaaguucgacgaggacgacagcgagcccguccugaagggggugaagcuccacuacacgugauaauaggcuggagccucgguggccuagcuucuugccccuugggccuccccccagccccuccuccccuuccugcacccguacccccguggucuuugaauaaagucugagugggcggcaaaaaaaaaaaaaaaaaaaaaaaaaaaaaaaaaaaaaaaaaaaaaaaaaaaaaaaaaaaaaaaaaaaaaaaaaaaaaaaaaaaaaaaaaaaaaaaaaaaa

SEQ ID NO: 26058 - RNA, 4095 nt, Artificial Sequence
  SARS-CoV-2/Wuhan/WIV05/2019__EPI_ISL_402128 spike protein mRNA gc (1-1273)(D614G_M1229I)
gggaaauaagagagaaaagaagaguaagaagaaauauaagaccccggcgccgccaccauguucguguuccugguccuccugccccuggugagcucccagugcgugaaccucaccacccgcacgcagcugccgcccgccuacaccaacagcuucacccggggcgucuacuaccccgacaagguguuccgcuccagcgugcugcacuccacccaggaccucuuccugcccuucuucagcaacgucacgugguuccacgccauccacguguccgggaccaacggcaccaagcgguucgacaacccggugcugcccuucaacgacggggucuacuucgcgagcaccgagaaguccaacaucauccgcggcuggaucuucgggacgacccucgacagcaagacccagucccugcugaucgugaacaacgccaccaacguggucaucaaggugugcgaguuccaguucugcaacgaccccuuccucggcguguacuaccacaagaacaacaagagcuggauggaguccgaguuccgggucuacagcuccgccaacaacugcacguucgaguacgugagccagcccuuccugauggaccuggagggcaagcaggggaacuucaagaaccuccgcgaguucguguucaagaacaucgacggcuacuucaagaucuacuccaagcacaccccgaucaaccugguccgggaccugccccagggguucagcgcccucgagccccugguggaccugcccaucggcaucaacaucacccgcuuccagacccuccuggcccugcaccgguccuaccucacgccgggggacagcagcuccggcuggaccgcgggcgccgccgccuacuacgugggguaccugcagccccgcaccuuccugcucaaguacaacgagaacggcaccaucacggacgcggucgacugcgcccuggacccccugagcgagaccaagugcacccucaaguccuucaccguggagaaggggaucuaccagacgagcaacuuccgggugcagcccaccgaguccaucguccgcuucccgaacaucaccaaccugugccccuucggcgagguguucaacgccacccgguucgccagcgucuacgccuggaaccgcaagcggaucuccaacugcguggcggacuacagcgugcuguacaacuccgccagcuucuccacguucaagugcuacggcgucagccccaccaagcucaacgaccugugcuucaccaacguguacgccgacuccuucgugauccgcggggacgagguccggcagaucgcccccggccagaccgggaagaucgccgacuacaacuacaagcugccggacgacuucacgggcugcgugaucgcguggaacagcaacaaccucgacuccaaggucgggggcaacuacaacuaccuguaccgccuguuccgcaagagcaaccucaagcccuucgagcgggacaucuccaccgagaucuaccaggccggcagcacccccugcaacgggguggagggcuucaacugcuacuucccccugcaguccuacggguuccagccgaccaacggcgugggguaccagcccuaccggguggucgugcugagcuucgagcuccugcacgcccccgccacggugugcggccccaagaaguccaccaaccuggucaagaacaagugcgugaacuucaacuucaacggccucaccgggaccggcgugcugaccgagagcaacaagaaguuccugccguuccagcaguucgggcgcgacaucgccgacacgaccgacgcgguccgcgacccccagacccuggagauccucgacaucacccccugcagcuucggcgggguguccgugaucacgccgggcaccaacaccagcaaccaggucgccgugcuguaccagggcgugaacugcaccgagguccccguggccauccacgccgaccagcugacgcccaccuggcggguguacuccaccggcagcaacgucuuccagacccgcgccgggugccucaucggcgcggagcacgugaacaacuccuacgagugcgacauccccaucggggccggcaucugcgccagcuaccagacgcagaccaacuccccgcggcgcgcccggagcguggcgucccagagcaucaucgccuacaccaugucccugggcgccgagaacagcgucgccuacuccaacaacagcaucgccauccccaccaacuucacgaucuccgugaccaccgagauccugcccgugagcaugaccaagacgagcgucgacugcaccauguacaucugcggggacuccaccgagugcagcaaccuccugcugcaguacggcuccuucugcacccagcucaaccgcgcgcugacggggaucgccguggagcaggacaagaacacccaggagguguucgcccaggucaagcagaucuacaagacgcccccgaucaaggacuucggcggguucaacuucagccagauccugcccgaccccuccaagcccagcaagcgguccuucaucgaggaccuccuguucaacaaggugacccuggccgacgccggcuucaucaagcaguacggcgacugccucggggacaucgcggcccgcgaccugaucugcgcccagaaguucaacggccugaccgugcucccgccccugcugaccgacgagaugaucgcccaguacaccagcgcccuccuggcggggaccaucacguccggcuggaccuucggggccggcgccgcccugcagauccccuucgcgaugcagauggccuaccgguucaacggcaucggggucacccagaacgugcucuacgagaaccagaagcugaucgccaaccaguucaacagcgccaucggcaagauccaggacucccugagcuccaccgccagcgcgcucgggaagcugcaggacguggucaaccagaacgcccaggcccugaacacgcucgugaagcagcuguccagcaacuucggcgccaucuccagcgugcugaacgacauccucucccgccuggacaaggucgaggccgaggugcagaucgaccggcugaucaccgggcgccuccagagccugcagaccuacgugacccagcagcugauccgggcggccgagauccgcgccagcgccaaccucgccgcgaccaagauguccgagugcguccugggccagagcaagcggguggacuucugcggcaagggguaccaccugauguccuucccccagagcgccccgcacggcguggucuuccuccacgugacguacguccccgcccaggagaagaacuucaccaccgcccccgcgaucugccacgacgggaaggcccacuucccccgcgagggcguguucguguccaacgggacccacugguucgucacgcagcggaacuucuacgagccgcagaucaucaccaccgacaacaccuucgugagcggcaacugcgacguggucaucggcaucgugaacaacacgguguacgacccccugcagcccgagcuggacuccuucaaggaggagcucgacaaguacuucaagaaccacaccagccccgacgucgaccugggggacaucuccggcaucaacgccagcguggugaacauccagaaggagaucgaccgccugaacgaggucgccaagaaccucaacgagucccugaucgaccugcaggagcucgggaaguacgagcaguacaucaaguggccgugguacaucuggcugggcuucaucgccggccugaucgcgaucgugaucgugaccaucaugcucugcugcaugaccagcugcugcuccugccugaaggggugcugcagcugcggcuccugcugcaaguucgacgaggacgacagcgagcccguccugaagggggugaagcuccacuacacgugauaauaggcuggagccucgguggccuagcuucuugccccuugggccuccccccagccccuccuccccuuccugcacccguacccccguggucuuugaauaaagucugagugggcggcaaaaaaaaaaaaaaaaaaaaaaaaaaaaaaaaaaaaaaaaaaaaaaaaaaaaaaaaaaaaaaaaaaaaaaaaaaaaaaaaaaaaaaaaaaaaaaaaaaaa

SEQ ID NO: 26059 - RNA, 4089 nt, Artificial Sequence
  SARS-CoV-2/Wuhan/WIV05/2019__EPI_ISL_402128 spike protein mRNA gc (1-1273)(H69del_V70del_A222V_Y453F_S477N_D614G_I692V)
gggaaauaagagagaaaagaagaguaagaagaaauauaagaccccggcgccgccaccauguucguguuccugguccuccugccccuggugagcucccagugcgugaaccucaccacccgcacgcagcugccgcccgccuacaccaacagcuucacccggggcgucuacuaccccgacaagguguuccgcuccagcgugcugcacuccacccaggaccucuuccugcccuucuucagcaacgucacgugguuccacgccaucuccgggaccaacggcaccaagcgguucgacaacccggugcugcccuucaacgacggggucuacuucgcgagcaccgagaaguccaacaucauccgcggcuggaucuucgggacgacccucgacagcaagacccagucccugcugaucgugaacaacgccaccaacguggucaucaaggugugcgaguuccaguucugcaacgaccccuuccucggcguguacuaccacaagaacaacaagagcuggauggaguccgaguuccgggucuacagcuccgccaacaacugcacguucgaguacgugagccagcccuuccugauggaccuggagggcaagcaggggaacuucaagaaccuccgcgaguucguguucaagaacaucgacggcuacuucaagaucuacuccaagcacaccccgaucaaccugguccgggaccugccccagggguucagcguccucgagccccugguggaccugcccaucggcaucaacaucacccgcuuccagacccuccuggcccugcaccgguccuaccucacgccgggggacagcagcuccggcuggaccgcgggcgccgccgccuacuacgugggguaccugcagccccgcaccuuccugcucaaguacaacgagaacggcaccaucacggacgcggucgacugcgcccuggacccccugagcgagaccaagugcacccucaaguccuucaccguggagaaggggaucuaccagacgagcaacuuccgggugcagcccaccgaguccaucguccgcuucccgaacaucaccaaccugugccccuucggcgagguguucaacgccacccgguucgccagcgucuacgccuggaaccgcaagcggaucuccaacugcguggcggacuacagcgugcuguacaacuccgccagcuucuccacguucaagugcuacggcgucagccccaccaagcucaacgaccugugcuucaccaacguguacgccgacuccuucgugauccgcggggacgagguccggcagaucgcccccggccagaccgggaagaucgccgacuacaacuacaagcugccggacgacuucacgggcugcgugaucgcguggaacagcaacaaccucgacuccaaggucgggggcaacuacaacuaccuguuccgccuguuccgcaagagcaaccucaagcccuucgagcgggacaucuccaccgagaucuaccaggccggcaacacccccugcaacgggguggagggcuucaacugcuacuucccccugcaguccuacggguuccagccgaccaacggcgugggguaccagcccuaccggguggucgugcugagcuucgagcuccugcacgcccccgccacggugugcggccccaagaaguccaccaaccuggucaagaacaagugcgugaacuucaacuucaacggccucaccgggaccggcgugcugaccgagagcaacaagaaguuccugccguuccagcaguucgggcgcgacaucgccgacacgaccgacgcgguccgcgacccccagacccuggagauccucgacaucacccccugcagcuucggcgggguguccgugaucacgccgggcaccaacaccagcaaccaggucgccgugcuguaccagggcgugaacugcaccgagguccccguggccauccacgccgaccagcugacgcccaccuggcggguguacuccaccggcagcaacgucuuccagacccgcgccgggugccucaucggcgcggagcacgugaacaacuccuacgagugcgacauccccaucggggccggcaucugcgccagcuaccagacgcagaccaacuccccgcggcgcgcccggagcguggcgucccagagcgucaucgccuacaccaugucccugggcgccgagaacagcgucgccuacuccaacaacagcaucgccauccccaccaacuucacgaucuccgugaccaccgagauccugcccgugagcaugaccaagacgagcgucgacugcaccauguacaucugcggggacuccaccgagugcagcaaccuccugcugcaguacggcuccuucugcacccagcucaaccgcgcgcugacggggaucgccguggagcaggacaagaacacccaggagguguucgcccaggucaagcagaucuacaagacgcccccgaucaaggacuucggcggguucaacuucagccagauccugcccgaccccuccaagcccagcaagcgguccuucaucgaggaccuccuguucaacaaggugacccuggccgacgccggcuucaucaagcaguacggcgacugccucggggacaucgcggcccgcgaccugaucugcgcccagaaguucaacggccugaccgugcucccgccccugcugaccgacgagaugaucgcccaguacaccagcgcccuccuggcggggaccaucacguccggcuggaccuucggggccggcgccgcccugcagauccccuucgcgaugcagauggccuaccgguucaacggcaucggggucacccagaacgugcucuacgagaaccagaagcugaucgccaaccaguucaacagcgccaucggcaagauccaggacucccugagcuccaccgccagcgcgcucgggaagcugcaggacguggucaaccagaacgcccaggcccugaacacgcucgugaagcagcuguccagcaacuucggcgccaucuccagcgugcugaacgacauccucucccgccuggacaaggucgaggccgaggugcagaucgaccggcugaucaccgggcgccuccagagccugcagaccuacgugacccagcagcugauccgggcggccgagauccgcgccagcgccaaccucgccgcgaccaagauguccgagugcguccugggccagagcaagcggguggacuucugcggcaagggguaccaccugauguccuucccccagagcgccccgcacggcguggucuuccuccacgugacguacguccccgcccaggagaagaacuucaccaccgcccccgcgaucugccacgacgggaaggcccacuucccccgcgagggcguguucguguccaacgggacccacugguucgucacgcagcggaacuucuacgagccgcagaucaucaccaccgacaacaccuucgugagcggcaacugcgacguggucaucggcaucgugaacaacacgguguacgacccccugcagcccgagcuggacuccuucaaggaggagcucgacaaguacuucaagaaccacaccagccccgacgucgaccugggggacaucuccggcaucaacgccagcguggugaacauccagaaggagaucgaccgccugaacgaggucgccaagaaccucaacgagucccugaucgaccugcaggagcucgggaaguacgagcaguacaucaaguggccgugguacaucuggcugggcuucaucgccggccugaucgcgaucgugauggugaccaucaugcucugcugcaugaccagcugcugcuccugccugaaggggugcugcagcugcggcuccugcugcaaguucgacgaggacgacagcgagcccguccugaagggggugaagcuccacuacacgugauaauaggcuggagccucgguggccuagcuucuugccccuugggccuccccccagccccuccuccccuuccugcacccguacccccguggucuuugaauaaagucugagugggcggcaaaaaaaaaaaaaaaaaaaaaaaaaaaaaaaaaaaaaaaaaaaaaaaaaaaaaaaaaaaaaaaaaaaaaaaaaaaaaaaaaaaaaaaaaaaaaaaaaaaa

SEQ ID NO: 26060 - RNA, 4089 nt, Artificial Sequence
  SARS-CoV-2/Wuhan/WIV05/2019__EPI_ISL_402128 spike protein mRNA gc (1-1273)(H69del_V70del_Y453F_D614G_I692V_M1229I)
gggaaauaagagagaaaagaagaguaagaagaaauauaagaccccggcgccgccaccauguucguguuccugguccuccugccccuggugagcucccagugcgugaaccucaccacccgcacgcagcugccgcccgccuacaccaacagcuucacccggggcgucuacuaccccgacaagguguuccgcuccagcgugcugcacuccacccaggaccucuuccugcccuucuucagcaacgucacgugguuccacgccaucuccgggaccaacggcaccaagcgguucgacaacccggugcugcccuucaacgacggggucuacuucgcgagcaccgagaaguccaacaucauccgcggcuggaucuucgggacgacccucgacagcaagacccagucccugcugaucgugaacaacgccaccaacguggucaucaaggugugcgaguuccaguucugcaacgaccccuuccucggcguguacuaccacaagaacaacaagagcuggauggaguccgaguuccgggucuacagcuccgccaacaacugcacguucgaguacgugagccagcccuuccugauggaccuggagggcaagcaggggaacuucaagaaccuccgcgaguucguguucaagaacaucgacggcuacuucaagaucuacuccaagcacaccccgaucaaccugguccgggaccugccccagggguucagcgcccucgagccccugguggaccugcccaucggcaucaacaucacccgcuuccagacccuccuggcccugcaccgguccuaccucacgccgggggacagcagcuccggcuggaccgcgggcgccgccgccuacuacgugggguaccugcagccccgcaccuuccugcucaaguacaacgagaacggcaccaucacggacgcggucgacugcgcccuggacccccugagcgagaccaagugcacccucaaguccuucaccguggagaaggggaucuaccagacgagcaacuuccgggugcagcccaccgaguccaucguccgcuucccgaacaucaccaaccugugccccuucggcgagguguucaacgccacccgguucgccagcgucuacgccuggaaccgcaagcggaucuccaacugcguggcggacuacagcgugcuguacaacuccgccagcuucuccacguucaagugcuacggcgucagccccaccaagcucaacgaccugugcuucaccaacguguacgccgacuccuucgugauccgcggggacgagguccggcagaucgcccccggccagaccgggaagaucgccgacuacaacuacaagcugccggacgacuucacgggcugcgugaucgcguggaacagcaacaaccucgacuccaaggucgggggcaacuacaacuaccuguuccgccuguuccgcaagagcaaccucaagcccuucgagcgggacaucuccaccgagaucuaccaggccggcagcacccccugcaacgggguggagggcuucaacugcuacuucccccugcaguccuacggguuccagccgaccaacggcgugggguaccagcccuaccggguggucgugcugagcuucgagcuccugcacgcccccgccacggugugcggccccaagaaguccaccaaccuggucaagaacaagugcgugaacuucaacuucaacggccucaccgggaccggcgugcugaccgagagcaacaagaaguuccugccguuccagcaguucgggcgcgacaucgccgacacgaccgacgcgguccgcgacccccagacccuggagauccucgacaucacccccugcagcuucggcgggguguccgugaucacgccgggcaccaacaccagcaaccaggucgccgugcuguaccagggcgugaacugcaccgagguccccguggccauccacgccgaccagcugacgcccaccuggcggguguacuccaccggcagcaacgucuuccagacccgcgccgggugccucaucggcgcggagcacgugaacaacuccuacgagugcgacauccccaucggggccggcaucugcgccagcuaccagacgcagaccaacuccccgcggcgcgcccggagcguggcgucccagagcgugaucgccuacaccaugucccugggcgccgagaacagcgucgccuacuccaacaacagcaucgccauccccaccaacuucacgaucuccgugaccaccgagauccugcccgugagcaugaccaagacgagcgucgacugcaccauguacaucugcggggacuccaccgagugcagcaaccuccugcugcaguacggcuccuucugcacccagcucaaccgcgcgcugacggggaucgccguggagcaggacaagaacacccaggagguguucgcccaggucaagcagaucuacaagacgcccccgaucaaggacuucggcggguucaacuucagccagauccugcccgaccccuccaagcccagcaagcgguccuucaucgaggaccuccuguucaacaaggugacccuggccgacgccggcuucaucaagcaguacggcgacugccucggggacaucgcggcccgcgaccugaucugcgcccagaaguucaacggccugaccgugcucccgccccugcugaccgacgagaugaucgcccaguacaccagcgcccuccuggcggggaccaucacguccggcuggaccuucggggccggcgccgcccugcagauccccuucgcgaugcagauggccuaccgguucaacggcaucggggucacccagaacgugcucuacgagaaccagaagcugaucgccaaccaguucaacagcgccaucggcaagauccaggacucccugagcuccaccgccagcgcgcucgggaagcugcaggacguggucaaccagaacgcccaggcccugaacacgcucgugaagcagcuguccagcaacuucggcgccaucuccagcgugcugaacgacauccucucccgccuggacaaggucgaggccgaggugcagaucgaccggcugaucaccgggcgccuccagagccugcagaccuacgugacccagcagcugauccgggcggccgagauccgcgccagcgccaaccucgccgcgaccaagauguccgagugcguccugggccagagcaagcggguggacuucugcggcaagggguaccaccugauguccuucccccagagcgccccgcacggcguggucuuccuccacgugacguacguccccgcccaggagaagaacuucaccaccgcccccgcgaucugccacgacgggaaggcccacuucccccgcgagggcguguucguguccaacgggacccacugguucgucacgcagcggaacuucuacgagccgcagaucaucaccaccgacaacaccuucgugagcggcaacugcgacguggucaucggcaucgugaacaacacgguguacgacccccugcagcccgagcuggacuccuucaaggaggagcucgacaaguacuucaagaaccacaccagccccgacgucgaccugggggacaucuccggcaucaacgccagcguggugaacauccagaaggagaucgaccgccugaacgaggucgccaagaaccucaacgagucccugaucgaccugcaggagcucgggaaguacgagcaguacaucaaguggccgugguacaucuggcugggcuucaucgccggccugaucgcgaucgugaucgugaccaucaugcucugcugcaugaccagcugcugcuccugccugaaggggugcugcagcugcggcuccugcugcaaguucgacgaggacgacagcgagcccguccugaagggggugaagcuccacuacacgugauaauaggcuggagccucgguggccuagcuucuugccccuugggccuccccccagccccuccuccccuuccugcacccguacccccguggucuuugaauaaagucugagugggcggcaaaaaaaaaaaaaaaaaaaaaaaaaaaaaaaaaaaaaaaaaaaaaaaaaaaaaaaaaaaaaaaaaaaaaaaaaaaaaaaaaaaaaaaaaaaaaaaaaaaa

SEQ ID NO: 26061 - RNA, 4086 nt, Artificial Sequence
  SARS-CoV-2/Wuhan/WIV05/2019__EPI_ISL_402128 spike protein mRNA gc (1-1273)(H69del_V70del_Y144del_N501Y_A570D_D614G_P681H_T716I_S982 A_D1118H)
gggaaauaagagagaaaagaagaguaagaagaaauauaagaccccggcgccgccaccauguucguguuccugguccuccugccccuggugagcucccagugcgugaaccucaccacccgcacgcagcugccgcccgccuacaccaacagcuucacccggggcgucuacuaccccgacaagguguuccgcuccagcgugcugcacuccacccaggaccucuuccugcccuucuucagcaacgucacgugguuccacgccaucuccgggaccaacggcaccaagcgguucgacaacccggugcugcccuucaacgacggggucuacuucgcgagcaccgagaaguccaacaucauccgcggcuggaucuucgggacgacccucgacagcaagacccagucccugcugaucgugaacaacgccaccaacguggucaucaaggugugcgaguuccaguucugcaacgaccccuuccucggcguguaccacaagaacaacaagagcuggauggaguccgaguuccgggucuacagcuccgccaacaacugcacguucgaguacgugagccagcccuuccugauggaccuggagggcaagcaggggaacuucaagaaccuccgcgaguucguguucaagaacaucgacggcuacuucaagaucuacuccaagcacaccccgaucaaccugguccgggaccugccccagggguucagcgcccucgagccccugguggaccugcccaucggcaucaacaucacccgcuuccagacccuccuggcccugcaccgguccuaccucacgccgggggacagcagcuccggcuggaccgcgggcgccgccgccuacuacgugggguaccugcagccccgcaccuuccugcucaaguacaacgagaacggcaccaucacggacgcggucgacugcgcccuggacccccugagcgagaccaagugcacccucaaguccuucaccguggagaaggggaucuaccagacgagcaacuuccgggugcagcccaccgaguccaucguccgcuucccgaacaucaccaaccugugccccuucggcgagguguucaacgccacccgguucgccagcgucuacgccuggaaccgcaagcggaucuccaacugcguggcggacuacagcgugcuguacaacuccgccagcuucuccacguucaagugcuacggcgucagccccaccaagcucaacgaccugugcuucaccaacguguacgccgacuccuucgugauccgcggggacgagguccggcagaucgcccccggccagaccgggaagaucgccgacuacaacuacaagcugccggacgacuucacgggcugcgugaucgcguggaacagcaacaaccucgacuccaaggucgggggcaacuacaacuaccuguaccgccuguuccgcaagagcaaccucaagcccuucgagcgggacaucuccaccgagaucuaccaggccggcagcacccccugcaacgggguggagggcuucaacugcuacuucccccugcaguccuacggguuccagccgaccuacggcgugggguaccagcccuaccggguggucgugcugagcuucgagcuccugcacgcccccgccacggugugcggccccaagaaguccaccaaccuggucaagaacaagugcgugaacuucaacuucaacggccucaccgggaccggcgugcugaccgagagcaacaagaaguuccugccguuccagcaguucgggcgcgacaucgacgacacgaccgacgcgguccgcgacccccagacccuggagauccucgacaucacccccugcagcuucggcgggguguccgugaucacgccgggcaccaacaccagcaaccaggucgccgugcuguaccagggcgugaacugcaccgagguccccguggccauccacgccgaccagcugacgcccaccuggcggguguacuccaccggcagcaacgucuuccagacccgcgccgggugccucaucggcgcggagcacgugaacaacuccuacgagugcgacauccccaucggggccggcaucugcgccagcuaccagacgcagaccaacucccaccggcgcgcccggagcguggcgucccagagcaucaucgccuacaccaugucccugggcgccgagaacagcgucgccuacuccaacaacagcaucgccauccccaucaacuucacgaucuccgugaccaccgagauccugcccgugagcaugaccaagacgagcgucgacugcaccauguacaucugcggggacuccaccgagugcagcaaccuccugcugcaguacggcuccuucugcacccagcucaaccgcgcgcugacggggaucgccguggagcaggacaagaacacccaggagguguucgcccaggucaagcagaucuacaagacgcccccgaucaaggacuucggcggguucaacuucagccagauccugcccgaccccuccaagcccagcaagcgguccuucaucgaggaccuccuguucaacaaggugacccuggccgacgccggcuucaucaagcaguacggcgacugccucggggacaucgcggcccgcgaccugaucugcgcccagaaguucaacggccugaccgugcucccgccccugcugaccgacgagaugaucgcccaguacaccagcgcccuccuggcggggaccaucacguccggcuggaccuucggggccggcgccgcccugcagauccccuucgcgaugcagauggccuaccgguucaacggcaucggggucacccagaacgugcucuacgagaaccagaagcugaucgccaaccaguucaacagcgccaucggcaagauccaggacucccugagcuccaccgccagcgcgcucgggaagcugcaggacguggucaaccagaacgcccaggcccugaacacgcucgugaagcagcuguccagcaacuucggcgccaucuccagcgugcugaacgacauccucgcccgccuggacaaggucgaggccgaggugcagaucgaccggcugaucaccgggcgccuccagagccugcagaccuacgugacccagcagcugauccgggcggccgagauccgcgccagcgccaaccucgccgcgaccaagauguccgagugcguccugggccagagcaagcggguggacuucugcggcaagggguaccaccugauguccuucccccagagcgccccgcacggcguggucuuccuccacgugacguacguccccgcccaggagaagaacuucaccaccgcccccgcgaucugccacgacgggaaggcccacuucccccgcgagggcguguucguguccaacgggacccacugguucgucacgcagcggaacuucuacgagccgcagaucaucaccacccacaacaccuucgugagcggcaacugcgacguggucaucggcaucgugaacaacacgguguacgacccccugcagcccgagcuggacuccuucaaggaggagcucgacaaguacuucaagaaccacaccagccccgacgucgaccugggggacaucuccggcaucaacgccagcguggugaacauccagaaggagaucgaccgccugaacgaggucgccaagaaccucaacgagucccugaucgaccugcaggagcucgggaaguacgagcaguacaucaaguggccgugguacaucuggcugggcuucaucgccggccugaucgcgaucgugauggugaccaucaugcucugcugcaugaccagcugcugcuccugccugaaggggugcugcagcugcggcuccugcugcaaguucgacgaggacgacagcgagcccguccugaagggggugaagcuccacuacacgugauaauaggcuggagccucgguggccuagcuucuugccccuugggccuccccccagccccuccuccccuuccugcacccguacccccguggucuuugaauaaagucugagugggcggcaaaaaaaaaaaaaaaaaaaaaaaaaaaaaaaaaaaaaaaaaaaaaaaaaaaaaaaaaaaaaaaaaaaaaaaaaaaaaaaaaaaaaaaaaaaaaaaaaaaa

SEQ ID NO: 26062 - RNA, 4095 nt, Artificial Sequence
  SARS-CoV-2/Wuhan/WIV05/2019__EPI_ISL_402128 spike protein mRNA gc (1-1273)(K417N_E484K_N501Y_D614G)
gggaaauaagagagaaaagaagaguaagaagaaauauaagaccccggcgccgccaccauguucguguuccugguccuccugccccuggugagcucccagugcgugaaccucaccacccgcacgcagcugccgcccgccuacaccaacagcuucacccggggcgucuacuaccccgacaagguguuccgcuccagcgugcugcacuccacccaggaccucuuccugcccuucuucagcaacgucacgugguuccacgccauccacguguccgggaccaacggcaccaagcgguucgacaacccggugcugcccuucaacgacggggucuacuucgcgagcaccgagaaguccaacaucauccgcggcuggaucuucgggacgacccucgacagcaagacccagucccugcugaucgugaacaacgccaccaacguggucaucaaggugugcgaguuccaguucugcaacgaccccuuccucggcguguacuaccacaagaacaacaagagcuggauggaguccgaguuccgggucuacagcuccgccaacaacugcacguucgaguacgugagccagcccuuccugauggaccuggagggcaagcaggggaacuucaagaaccuccgcgaguucguguucaagaacaucgacggcuacuucaagaucuacuccaagcacaccccgaucaaccugguccgggaccugccccagggguucagcgcccucgagccccugguggaccugcccaucggcaucaacaucacccgcuuccagacccuccuggcccugcaccgguccuaccucacgccgggggacagcagcuccggcuggaccgcgggcgccgccgccuacuacgugggguaccugcagccccgcaccuuccugcucaaguacaacgagaacggcaccaucacggacgcggucgacugcgcccuggacccccugagcgagaccaagugcacccucaaguccuucaccguggagaaggggaucuaccagacgagcaacuuccgggugcagcccaccgaguccaucguccgcuucccgaacaucaccaaccugugccccuucggcgagguguucaacgccacccgguucgccagcgucuacgccuggaaccgcaagcggaucuccaacugcguggcggacuacagcgugcuguacaacuccgccagcuucuccacguucaagugcuacggcgucagccccaccaagcucaacgaccugugcuucaccaacguguacgccgacuccuucgugauccgcggggacgagguccggcagaucgcccccggccagaccgggaacaucgccgacuacaacuacaagcugccggacgacuucacgggcugcgugaucgcguggaacagcaacaaccucgacuccaaggucgggggcaacuacaacuaccuguaccgccuguuccgcaagagcaaccucaagcccuucgagcgggacaucuccaccgagaucuaccaggccggcagcacccccugcaacggggugaagggcuucaacugcuacuucccccugcaguccuacggguuccagccgaccuacggcgugggguaccagcccuaccggguggucgugcugagcuucgagcuccugcacgcccccgccacggugugcggccccaagaaguccaccaaccuggucaagaacaagugcgugaacuucaacuucaacggccucaccgggaccggcgugcugaccgagagcaacaagaaguuccugccguuccagcaguucgggcgcgacaucgccgacacgaccgacgcgguccgcgacccccagacccuggagauccucgacaucacccccugcagcuucggcgggguguccgugaucacgccgggcaccaacaccagcaaccaggucgccgugcuguaccagggcgugaacugcaccgagguccccguggccauccacgccgaccagcugacgcccaccuggcggguguacuccaccggcagcaacgucuuccagacccgcgccgggugccucaucggcgcggagcacgugaacaacuccuacgagugcgacauccccaucggggccggcaucugcgccagcuaccagacgcagaccaacuccccgcggcgcgcccggagcguggcgucccagagcaucaucgccuacaccaugucccugggcgccgagaacagcgucgccuacuccaacaacagcaucgccauccccaccaacuucacgaucuccgugaccaccgagauccugcccgugagcaugaccaagacgagcgucgacugcaccauguacaucugcggggacuccaccgagugcagcaaccuccugcugcaguacggcuccuucugcacccagcucaaccgcgcgcugacggggaucgccguggagcaggacaagaacacccaggagguguucgcccaggucaagcagaucuacaagacgcccccgaucaaggacuucggcggguucaacuucagccagauccugcccgaccccuccaagcccagcaagcgguccuucaucgaggaccuccuguucaacaaggugacccuggccgacgccggcuucaucaagcaguacggcgacugccucggggacaucgcggcccgcgaccugaucugcgcccagaaguucaacggccugaccgugcucccgccccugcugaccgacgagaugaucgcccaguacaccagcgcccuccuggcggggaccaucacguccggcuggaccuucggggccggcgccgcccugcagauccccuucgcgaugcagauggccuaccgguucaacggcaucggggucacccagaacgugcucuacgagaaccagaagcugaucgccaaccaguucaacagcgccaucggcaagauccaggacucccugagcuccaccgccagcgcgcucgggaagcugcaggacguggucaaccagaacgcccaggcccugaacacgcucgugaagcagcuguccagcaacuucggcgccaucuccagcgugcugaacgacauccucucccgccuggacaaggucgaggccgaggugcagaucgaccggcugaucaccgggcgccuccagagccugcagaccuacgugacccagcagcugauccgggcggccgagauccgcgccagcgccaaccucgccgcgaccaagauguccgagugcguccugggccagagcaagcggguggacuucugcggcaagggguaccaccugauguccuucccccagagcgccccgcacggcguggucuuccuccacgugacguacguccccgcccaggagaagaacuucaccaccgcccccgcgaucugccacgacgggaaggcccacuucccccgcgagggcguguucguguccaacgggacccacugguucgucacgcagcggaacuucuacgagccgcagaucaucaccaccgacaacaccuucgugagcggcaacugcgacguggucaucggcaucgugaacaacacgguguacgacccccugcagcccgagcuggacuccuucaaggaggagcucgacaaguacuucaagaaccacaccagccccgacgucgaccugggggacaucuccggcaucaacgccagcguggugaacauccagaaggagaucgaccgccugaacgaggucgccaagaaccucaacgagucccugaucgaccugcaggagcucgggaaguacgagcaguacaucaaguggccgugguacaucuggcugggcuucaucgccggccugaucgcgaucgugauggugaccaucaugcucugcugcaugaccagcugcugcuccugccugaaggggugcugcagcugcggcuccugcugcaaguucgacgaggacgacagcgagcccguccugaagggggugaagcuccacuacacgugauaauaggcuggagccucgguggccuagcuucuugccccuugggccuccccccagccccuccuccccuuccugcacccguacccccguggucuuugaauaaagucugagugggcggcaaaaaaaaaaaaaaaaaaaaaaaaaaaaaaaaaaaaaaaaaaaaaaaaaaaaaaaaaaaaaaaaaaaaaaaaaaaaaaaaaaaaaaaaaaaaaaaaaaaa

SEQ ID NO: 26063 - RNA, 4086 nt, Artificial Sequence
  SARS-CoV-2/Wuhan/WIV05/2019__EPI_ISL_402128 spike protein mRNA gc (1-1273)(L18F_D80A_D215G_L242del_A243del_L244del_R246I_K417N_E484 K_N501Y_D614G_A701V)
gggaaauaagagagaaaagaagaguaagaagaaauauaagaccccggcgccgccaccauguucguguuccugguccuccugccccuggugagcucccagugcgugaacuucaccacccgcacgcagcugccgcccgccuacaccaacagcuucacccggggcgucuacuaccccgacaagguguuccgcuccagcgugcugcacuccacccaggaccucuuccugcccuucuucagcaacgucacgugguuccacgccauccacguguccgggaccaacggcaccaagcgguucgccaacccggugcugcccuucaacgacggggucuacuucgcgagcaccgagaaguccaacaucauccgcggcuggaucuucgggacgacccucgacagcaagacccagucccugcugaucgugaacaacgccaccaacguggucaucaaggugugcgaguuccaguucugcaacgaccccuuccucggcguguacuaccacaagaacaacaagagcuggauggaguccgaguuccgggucuacagcuccgccaacaacugcacguucgaguacgugagccagcccuuccugauggaccuggagggcaagcaggggaacuucaagaaccuccgcgaguucguguucaagaacaucgacggcuacuucaagaucuacuccaagcacaccccgaucaaccugguccggggccugccccagggguucagcgcccucgagccccugguggaccugcccaucggcaucaacaucacccgcuuccagacccuccacaucuccuaccucacgccgggggacagcagcuccggcuggaccgcgggcgccgccgccuacuacgugggguaccugcagccccgcaccuuccugcucaaguacaacgagaacggcaccaucacggacgcggucgacugcgcccuggacccccugagcgagaccaagugcacccucaaguccuucaccguggagaaggggaucuaccagacgagcaacuuccgggugcagcccaccgaguccaucguccgcuucccgaacaucaccaaccugugccccuucggcgagguguucaacgccacccgguucgccagcgucuacgccuggaaccgcaagcggaucuccaacugcguggcggacuacagcgugcuguacaacuccgccagcuucuccacguucaagugcuacggcgucagccccaccaagcucaacgaccugugcuucaccaacguguacgccgacuccuucgugauccgcggggacgagguccggcagaucgcccccggccagaccgggaacaucgccgacuacaacuacaagcugccggacgacuucacgggcugcgugaucgcguggaacagcaacaaccucgacuccaaggucgggggcaacuacaacuaccuguaccgccuguuccgcaagagcaaccucaagcccuucgagcgggacaucuccaccgagaucuaccaggccggcagcacccccugcaacggggugaagggcuucaacugcuacuucccccugcaguccuacggguuccagccgaccuacggcgugggguaccagcccuaccggguggucgugcugagcuucgagcuccugcacgcccccgccacggugugcggccccaagaaguccaccaaccuggucaagaacaagugcgugaacuucaacuucaacggccucaccgggaccggcgugcugaccgagagcaacaagaaguuccugccguuccagcaguucgggcgcgacaucgccgacacgaccgacgcgguccgcgacccccagacccuggagauccucgacaucacccccugcagcuucggcgggguguccgugaucacgccgggcaccaacaccagcaaccaggucgccgugcuguaccagggcgugaacugcaccgagguccccguggccauccacgccgaccagcugacgcccaccuggcggguguacuccaccggcagcaacgucuuccagacccgcgccgggugccucaucggcgcggagcacgugaacaacuccuacgagugcgacauccccaucggggccggcaucugcgccagcuaccagacgcagaccaacuccccgcggcgcgcccggagcguggcgucccagagcaucaucgccuacaccaugucccugggcguggagaacagcgucgccuacuccaacaacagcaucgccauccccaccaacuucacgaucuccgugaccaccgagauccugcccgugagcaugaccaagacgagcgucgacugcaccauguacaucugcggggacuccaccgagugcagcaaccuccugcugcaguacggcuccuucugcacccagcucaaccgcgcgcugacggggaucgccguggagcaggacaagaacacccaggagguguucgcccaggucaagcagaucuacaagacgcccccgaucaaggacuucggcggguucaacuucagccagauccugcccgaccccuccaagcccagcaagcgguccuucaucgaggaccuccuguucaacaaggugacccuggccgacgccggcuucaucaagcaguacggcgacugccucggggacaucgcggcccgcgaccugaucugcgcccagaaguucaacggccugaccgugcucccgccccugcugaccgacgagaugaucgcccaguacaccagcgcccuccuggcggggaccaucacguccggcuggaccuucggggccggcgccgcccugcagauccccuucgcgaugcagauggccuaccgguucaacggcaucggggucacccagaacgugcucuacgagaaccagaagcugaucgccaaccaguucaacagcgccaucggcaagauccaggacucccugagcuccaccgccagcgcgcucgggaagcugcaggacguggucaaccagaacgcccaggcccugaacacgcucgugaagcagcuguccagcaacuucggcgccaucuccagcgugcugaacgacauccucucccgccuggacaaggucgaggccgaggugcagaucgaccggcugaucaccgggcgccuccagagccugcagaccuacgugacccagcagcugauccgggcggccgagauccgcgccagcgccaaccucgccgcgaccaagauguccgagugcguccugggccagagcaagcggguggacuucugcggcaagggguaccaccugauguccuucccccagagcgccccgcacggcguggucuuccuccacgugacguacguccccgcccaggagaagaacuucaccaccgcccccgcgaucugccacgacgggaaggcccacuucccccgcgagggcguguucguguccaacgggacccacugguucgucacgcagcggaacuucuacgagccgcagaucaucaccaccgacaacaccuucgugagcggcaacugcgacguggucaucggcaucgugaacaacacgguguacgacccccugcagcccgagcuggacuccuucaaggaggagcucgacaaguacuucaagaaccacaccagccccgacgucgaccugggggacaucuccggcaucaacgccagcguggugaacauccagaaggagaucgaccgccugaacgaggucgccaagaaccucaacgagucccugaucgaccugcaggagcucgggaaguacgagcaguacaucaaguggccgugguacaucuggcugggcuucaucgccggccugaucgcgaucgugauggugaccaucaugcucugcugcaugaccagcugcugcuccugccugaaggggugcugcagcugcggcuccugcugcaaguucgacgaggacgacagcgagcccguccugaagggggugaagcuccacuacacgugauaauaggcuggagccucgguggccuagcuucuugccccuugggccuccccccagccccuccuccccuuccugcacccguacccccguggucuuugaauaaagucugagugggcggcaaaaaaaaaaaaaaaaaaaaaaaaaaaaaaaaaaaaaaaaaaaaaaaaaaaaaaaaaaaaaaaaaaaaaaaaaaaaaaaaaaaaaaaaaaaaaaaaaaaa

SEQ ID NO: 26064 - RNA, 4095 nt, Artificial Sequence
  SARS-CoV-2/Wuhan/WIV05/2019__EPI_ISL_402128 spike protein mRNA gc (1-1273)(E484K_D614G)
gggaaauaagagagaaaagaagaguaagaagaaauauaagaccccggcgccgccaccauguucguguuccugguccuccugccccuggugagcucccagugcgugaaccucaccacccgcacgcagcugccgcccgccuacaccaacagcuucacccggggcgucuacuaccccgacaagguguuccgcuccagcgugcugcacuccacccaggaccucuuccugcccuucuucagcaacgucacgugguuccacgccauccacguguccgggaccaacggcaccaagcgguucgacaacccggugcugcccuucaacgacggggucuacuucgcgagcaccgagaaguccaacaucauccgcggcuggaucuucgggacgacccucgacagcaagacccagucccugcugaucgugaacaacgccaccaacguggucaucaaggugugcgaguuccaguucugcaacgaccccuuccucggcguguacuaccacaagaacaacaagagcuggauggaguccgaguuccgggucuacagcuccgccaacaacugcacguucgaguacgugagccagcccuuccugauggaccuggagggcaagcaggggaacuucaagaaccuccgcgaguucguguucaagaacaucgacggcuacuucaagaucuacuccaagcacaccccgaucaaccugguccgggaccugccccagggguucagcgcccucgagccccugguggaccugcccaucggcaucaacaucacccgcuuccagacccuccuggcccugcaccgguccuaccucacgccgggggacagcagcuccggcuggaccgcgggcgccgccgccuacuacgugggguaccugcagccccgcaccuuccugcucaaguacaacgagaacggcaccaucacggacgcggucgacugcgcccuggacccccugagcgagaccaagugcacccucaaguccuucaccguggagaaggggaucuaccagacgagcaacuuccgggugcagcccaccgaguccaucguccgcuucccgaacaucaccaaccugugccccuucggcgagguguucaacgccacccgguucgccagcgucuacgccuggaaccgcaagcggaucuccaacugcguggcggacuacagcgugcuguacaacuccgccagcuucuccacguucaagugcuacggcgucagccccaccaagcucaacgaccugugcuucaccaacguguacgccgacuccuucgugauccgcggggacgagguccggcagaucgcccccggccagaccgggaagaucgccgacuacaacuacaagcugccggacgacuucacgggcugcgugaucgcguggaacagcaacaaccucgacuccaaggucgggggcaacuacaacuaccuguaccgccuguuccgcaagagcaaccucaagcccuucgagcgggacaucuccaccgagaucuaccaggccggcagcacccccugcaacggggugaagggcuucaacugcuacuucccccugcaguccuacggguuccagccgaccaacggcgugggguaccagcccuaccggguggucgugcugagcuucgagcuccugcacgcccccgccacggugugcggccccaagaaguccaccaaccuggucaagaacaagugcgugaacuucaacuucaacggccucaccgggaccggcgugcugaccgagagcaacaagaaguuccugccguuccagcaguucgggcgcgacaucgccgacacgaccgacgcgguccgcgacccccagacccuggagauccucgacaucacccccugcagcuucggcgggguguccgugaucacgccgggcaccaacaccagcaaccaggucgccgugcuguaccagggcgugaacugcaccgagguccccguggccauccacgccgaccagcugacgcccaccuggcggguguacuccaccggcagcaacgucuuccagacccgcgccgggugccucaucggcgcggagcacgugaacaacuccuacgagugcgacauccccaucggggccggcaucugcgccagcuaccagacgcagaccaacuccccgcggcgcgcccggagcguggcgucccagagcaucaucgccuacaccaugucccugggcgccgagaacagcgucgccuacuccaacaacagcaucgccauccccaccaacuucacgaucuccgugaccaccgagauccugcccgugagcaugaccaagacgagcgucgacugcaccauguacaucugcggggacuccaccgagugcagcaaccuccugcugcaguacggcuccuucugcacccagcucaaccgcgcgcugacggggaucgccguggagcaggacaagaacacccaggagguguucgcccaggucaagcagaucuacaagacgcccccgaucaaggacuucggcggguucaacuucagccagauccugcccgaccccuccaagcccagcaagcgguccuucaucgaggaccuccuguucaacaaggugacccuggccgacgccggcuucaucaagcaguacggcgacugccucggggacaucgcggcccgcgaccugaucugcgcccagaaguucaacggccugaccgugcucccgccccugcugaccgacgagaugaucgcccaguacaccagcgcccuccuggcggggaccaucacguccggcuggaccuucggggccggcgccgcccugcagauccccuucgcgaugcagauggccuaccgguucaacggcaucggggucacccagaacgugcucuacgagaaccagaagcugaucgccaaccaguucaacagcgccaucggcaagauccaggacucccugagcuccaccgccagcgcgcucgggaagcugcaggacguggucaaccagaacgcccaggcccugaacacgcucgugaagcagcuguccagcaacuucggcgccaucuccagcgugcugaacgacauccucucccgccuggacaaggucgaggccgaggugcagaucgaccggcugaucaccgggcgccuccagagccugcagaccuacgugacccagcagcugauccgggcggccgagauccgcgccagcgccaaccucgccgcgaccaagauguccgagugcguccugggccagagcaagcggguggacuucugcggcaagggguaccaccugauguccuucccccagagcgccccgcacggcguggucuuccuccacgugacguacguccccgcccaggagaagaacuucaccaccgcccccgcgaucugccacgacgggaaggcccacuucccccgcgagggcguguucguguccaacgggacccacugguucgucacgcagcggaacuucuacgagccgcagaucaucaccaccgacaacaccuucgugagcggcaacugcgacguggucaucggcaucgugaacaacacgguguacgacccccugcagcccgagcuggacuccuucaaggaggagcucgacaaguacuucaagaaccacaccagccccgacgucgaccugggggacaucuccggcaucaacgccagcguggugaacauccagaaggagaucgaccgccugaacgaggucgccaagaaccucaacgagucccugaucgaccugcaggagcucgggaaguacgagcaguacaucaaguggccgugguacaucuggcugggcuucaucgccggccugaucgcgaucgugauggugaccaucaugcucugcugcaugaccagcugcugcuccugccugaaggggugcugcagcugcggcuccugcugcaaguucgacgaggacgacagcgagcccguccugaagggggugaagcuccacuacacgugauaauaggcuggagccucgguggccuagcuucuugccccuugggccuccccccagccccuccuccccuuccugcacccguacccccguggucuuugaauaaagucugagugggcggcaaaaaaaaaaaaaaaaaaaaaaaaaaaaaaaaaaaaaaaaaaaaaaaaaaaaaaaaaaaaaaaaaaaaaaaaaaaaaaaaaaaaaaaaaaaaaaaaaaaa

SEQ ID NO: 26065 - RNA, 4095 nt, Artificial Sequence
  SARS-CoV-2/Wuhan/WIV05/2019__EPI_ISL_402128 spike protein mRNA gc (1-1273)(L18F_T20N_P26S_D138Y_R190S_K417T_E484K_N501Y_D614G_H655Y _T1027I)
gggaaauaagagagaaaagaagaguaagaagaaauauaagaccccggcgccgccaccauguucguguuccugguccuccugccccuggugagcucccagugcgugaacuucaccaaccgcacgcagcugccgagcgccuacaccaacagcuucacccggggcgucuacuaccccgacaagguguuccgcuccagcgugcugcacuccacccaggaccucuuccugcccuucuucagcaacgucacgugguuccacgccauccacguguccgggaccaacggcaccaagcgguucgacaacccggugcugcccuucaacgacggggucuacuucgcgagcaccgagaaguccaacaucauccgcggcuggaucuucgggacgacccucgacagcaagacccagucccugcugaucgugaacaacgccaccaacguggucaucaaggugugcgaguuccaguucugcaacuaccccuuccucggcguguacuaccacaagaacaacaagagcuggauggaguccgaguuccgggucuacagcuccgccaacaacugcacguucgaguacgugagccagcccuuccugauggaccuggagggcaagcaggggaacuucaagaaccucagcgaguucguguucaagaacaucgacggcuacuucaagaucuacuccaagcacaccccgaucaaccugguccgggaccugccccagggguucagcgcccucgagccccugguggaccugcccaucggcaucaacaucacccgcuuccagacccuccuggcccugcaccgguccuaccucacgccgggggacagcagcuccggcuggaccgcgggcgccgccgccuacuacgugggguaccugcagccccgcaccuuccugcucaaguacaacgagaacggcaccaucacggacgcggucgacugcgcccuggacccccugagcgagaccaagugcacccucaaguccuucaccguggagaaggggaucuaccagacgagcaacuuccgggugcagcccaccgaguccaucguccgcuucccgaacaucaccaaccugugccccuucggcgagguguucaacgccacccgguucgccagcgucuacgccuggaaccgcaagcggaucuccaacugcguggcggacuacagcgugcuguacaacuccgccagcuucuccacguucaagugcuacggcgucagccccaccaagcucaacgaccugugcuucaccaacguguacgccgacuccuucgugauccgcggggacgagguccggcagaucgcccccggccagaccgggaccaucgccgacuacaacuacaagcugccggacgacuucacgggcugcgugaucgcguggaacagcaacaaccucgacuccaaggucgggggcaacuacaacuaccuguaccgccuguuccgcaagagcaaccucaagcccuucgagcgggacaucuccaccgagaucuaccaggccggcagcacccccugcaacggggugaagggcuucaacugcuacuucccccugcaguccuacggguuccagccgaccuacggcgugggguaccagcccuaccggguggucgugcugagcuucgagcuccugcacgcccccgccacggugugcggccccaagaaguccaccaaccuggucaagaacaagugcgugaacuucaacuucaacggccucaccgggaccggcgugcugaccgagagcaacaagaaguuccugccguuccagcaguucgggcgcgacaucgccgacacgaccgacgcgguccgcgacccccagacccuggagauccucgacaucacccccugcagcuucggcgggguguccgugaucacgccgggcaccaacaccagcaaccaggucgccgugcuguaccagggcgugaacugcaccgagguccccguggccauccacgccgaccagcugacgcccaccuggcggguguacuccaccggcagcaacgucuuccagacccgcgccgggugccucaucggcgcggaguacgugaacaacuccuacgagugcgacauccccaucggggccggcaucugcgccagcuaccagacgcagaccaacuccccgcggcgcgcccggagcguggcgucccagagcaucaucgccuacaccaugucccugggcgccgagaacagcgucgccuacuccaacaacagcaucgccauccccaccaacuucacgaucuccgugaccaccgagauccugcccgugagcaugaccaagacgagcgucgacugcaccauguacaucugcggggacuccaccgagugcagcaaccuccugcugcaguacggcuccuucugcacccagcucaaccgcgcgcugacggggaucgccguggagcaggacaagaacacccaggagguguucgcccaggucaagcagaucuacaagacgcccccgaucaaggacuucggcggguucaacuucagccagauccugcccgaccccuccaagcccagcaagcgguccuucaucgaggaccuccuguucaacaaggugacccuggccgacgccggcuucaucaagcaguacggcgacugccucggggacaucgcggcccgcgaccugaucugcgcccagaaguucaacggccugaccgugcucccgccccugcugaccgacgagaugaucgcccaguacaccagcgcccuccuggcggggaccaucacguccggcuggaccuucggggccggcgccgcccugcagauccccuucgcgaugcagauggccuaccgguucaacggcaucggggucacccagaacgugcucuacgagaaccagaagcugaucgccaaccaguucaacagcgccaucggcaagauccaggacucccugagcuccaccgccagcgcgcucgggaagcugcaggacguggucaaccagaacgcccaggcccugaacacgcucgugaagcagcuguccagcaacuucggcgccaucuccagcgugcugaacgacauccucucccgccuggacaaggucgaggccgaggugcagaucgaccggcugaucaccgggcgccuccagagccugcagaccuacgugacccagcagcugauccgggcggccgagauccgcgccagcgccaaccucgccgcgaucaagauguccgagugcguccugggccagagcaagcggguggacuucugcggcaagggguaccaccugauguccuucccccagagcgccccgcacggcguggucuuccuccacgugacguacguccccgcccaggagaagaacuucaccaccgcccccgcgaucugccacgacgggaaggcccacuucccccgcgagggcguguucguguccaacgggacccacugguucgucacgcagcggaacuucuacgagccgcagaucaucaccaccgacaacaccuucgugagcggcaacugcgacguggucaucggcaucgugaacaacacgguguacgacccccugcagcccgagcuggacuccuucaaggaggagcucgacaaguacuucaagaaccacaccagccccgacgucgaccugggggacaucuccggcaucaacgccagcguggugaacauccagaaggagaucgaccgccugaacgaggucgccaagaaccucaacgagucccugaucgaccugcaggagcucgggaaguacgagcaguacaucaaguggccgugguacaucuggcugggcuucaucgccggccugaucgcgaucgugauggugaccaucaugcucugcugcaugaccagcugcugcuccugccugaaggggugcugcagcugcggcuccugcugcaaguucgacgaggacgacagcgagcccguccugaagggggugaagcuccacuacacgugauaauaggcuggagccucgguggccuagcuucuugccccuugggccuccccccagccccuccuccccuuccugcacccguacccccguggucuuugaauaaagucugagugggcggcaaaaaaaaaaaaaaaaaaaaaaaaaaaaaaaaaaaaaaaaaaaaaaaaaaaaaaaaaaaaaaaaaaaaaaaaaaaaaaaaaaaaaaaaaaaaaaaaaaaa

SEQ ID NO: 26066 - RNA, 4095 nt, Artificial Sequence
  SARS-CoV-2/Wuhan/WIV05/2019__EPI_ISL_402128 spike protein mRNA gc (1-1273)(S13I_W152C_L452R_D614G)
gggaaauaagagagaaaagaagaguaagaagaaauauaagaccccggcgccgccaccauguucguguuccugguccuccugccccuggugagcauccagugcgugaaccucaccacccgcacgcagcugccgcccgccuacaccaacagcuucacccggggcgucuacuaccccgacaagguguuccgcuccagcgugcugcacuccacccaggaccucuuccugcccuucuucagcaacgucacgugguuccacgccauccacguguccgggaccaacggcaccaagcgguucgacaacccggugcugcccuucaacgacggggucuacuucgcgagcaccgagaaguccaacaucauccgcggcuggaucuucgggacgacccucgacagcaagacccagucccugcugaucgugaacaacgccaccaacguggucaucaaggugugcgaguuccaguucugcaacgaccccuuccucggcguguacuaccacaagaacaacaagagcugcauggaguccgaguuccgggucuacagcuccgccaacaacugcacguucgaguacgugagccagcccuuccugauggaccuggagggcaagcaggggaacuucaagaaccuccgcgaguucguguucaagaacaucgacggcuacuucaagaucuacuccaagcacaccccgaucaaccugguccgggaccugccccagggguucagcgcccucgagccccugguggaccugcccaucggcaucaacaucacccgcuuccagacccuccuggcccugcaccgguccuaccucacgccgggggacagcagcuccggcuggaccgcgggcgccgccgccuacuacgugggguaccugcagccccgcaccuuccugcucaaguacaacgagaacggcaccaucacggacgcggucgacugcgcccuggacccccugagcgagaccaagugcacccucaaguccuucaccguggagaaggggaucuaccagacgagcaacuuccgggugcagcccaccgaguccaucguccgcuucccgaacaucaccaaccugugccccuucggcgagguguucaacgccacccgguucgccagcgucuacgccuggaaccgcaagcggaucuccaacugcguggcggacuacagcgugcuguacaacuccgccagcuucuccacguucaagugcuacggcgucagccccaccaagcucaacgaccugugcuucaccaacguguacgccgacuccuucgugauccgcggggacgagguccggcagaucgcccccggccagaccgggaagaucgccgacuacaacuacaagcugccggacgacuucacgggcugcgugaucgcguggaacagcaacaaccucgacuccaaggucgggggcaacuacaacuaccgcuaccgccuguuccgcaagagcaaccucaagcccuucgagcgggacaucuccaccgagaucuaccaggccggcagcacccccugcaacgggguggagggcuucaacugcuacuucccccugcaguccuacggguuccagccgaccaacggcgugggguaccagcccuaccggguggucgugcugagcuucgagcuccugcacgcccccgccacggugugcggccccaagaaguccaccaaccuggucaagaacaagugcgugaacuucaacuucaacggccucaccgggaccggcgugcugaccgagagcaacaagaaguuccugccguuccagcaguucgggcgcgacaucgccgacacgaccgacgcgguccgcgacccccagacccuggagauccucgacaucacccccugcagcuucggcgggguguccgugaucacgccgggcaccaacaccagcaaccaggucgccgugcuguaccagggcgugaacugcaccgagguccccguggccauccacgccgaccagcugacgcccaccuggcggguguacuccaccggcagcaacgucuuccagacccgcgccgggugccucaucggcgcggagcacgugaacaacuccuacgagugcgacauccccaucggggccggcaucugcgccagcuaccagacgcagaccaacuccccgcggcgcgcccggagcguggcgucccagagcaucaucgccuacaccaugucccugggcgccgagaacagcgucgccuacuccaacaacagcaucgccauccccaccaacuucacgaucuccgugaccaccgagauccugcccgugagcaugaccaagacgagcgucgacugcaccauguacaucugcggggacuccaccgagugcagcaaccuccugcugcaguacggcuccuucugcacccagcucaaccgcgcgcugacggggaucgccguggagcaggacaagaacacccaggagguguucgcccaggucaagcagaucuacaagacgcccccgaucaaggacuucggcggguucaacuucagccagauccugcccgaccccuccaagcccagcaagcgguccuucaucgaggaccuccuguucaacaaggugacccuggccgacgccggcuucaucaagcaguacggcgacugccucggggacaucgcggcccgcgaccugaucugcgcccagaaguucaacggccugaccgugcucccgccccugcugaccgacgagaugaucgcccaguacaccagcgcccuccuggcggggaccaucacguccggcuggaccuucggggccggcgccgcccugcagauccccuucgcgaugcagauggccuaccgguucaacggcaucggggucacccagaacgugcucuacgagaaccagaagcugaucgccaaccaguucaacagcgccaucggcaagauccaggacucccugagcuccaccgccagcgcgcucgggaagcugcaggacguggucaaccagaacgcccaggcccugaacacgcucgugaagcagcuguccagcaacuucggcgccaucuccagcgugcugaacgacauccucucccgccuggacaaggucgaggccgaggugcagaucgaccggcugaucaccgggcgccuccagagccugcagaccuacgugacccagcagcugauccgggcggccgagauccgcgccagcgccaaccucgccgcgaccaagauguccgagugcguccugggccagagcaagcggguggacuucugcggcaagggguaccaccugauguccuucccccagagcgccccgcacggcguggucuuccuccacgugacguacguccccgcccaggagaagaacuucaccaccgcccccgcgaucugccacgacgggaaggcccacuucccccgcgagggcguguucguguccaacgggacccacugguucgucacgcagcggaacuucuacgagccgcagaucaucaccaccgacaacaccuucgugagcggcaacugcgacguggucaucggcaucgugaacaacacgguguacgacccccugcagcccgagcuggacuccuucaaggaggagcucgacaaguacuucaagaaccacaccagccccgacgucgaccugggggacaucuccggcaucaacgccagcguggugaacauccagaaggagaucgaccgccugaacgaggucgccaagaaccucaacgagucccugaucgaccugcaggagcucgggaaguacgagcaguacaucaaguggccgugguacaucuggcugggcuucaucgccggccugaucgcgaucgugauggugaccaucaugcucugcugcaugaccagcugcugcuccugccugaaggggugcugcagcugcggcuccugcugcaaguucgacgaggacgacagcgagcccguccugaagggggugaagcuccacuacacgugauaauaggcuggagccucgguggccuagcuucuugccccuugggccuccccccagccccuccuccccuuccugcacccguacccccguggucuuugaauaaagucugagugggcggcaaaaaaaaaaaaaaaaaaaaaaaaaaaaaaaaaaaaaaaaaaaaaaaaaaaaaaaaaaaaaaaaaaaaaaaaaaaaaaaaaaaaaaaaaaaaaaaaaaaa

SEQ ID NO: 26067 - RNA, 4095 nt, Artificial Sequence; identical to SEQ ID NO: 26049
  SARS-CoV-2/Wuhan/WIV05/2019__EPI_ISL_402128 spike protein mRNA gc (1-1273)

SEQ ID NO: 26068 - RNA, 4095 nt, Artificial Sequence
  SARS-CoV-2/Wuhan/WIV05/2019__EPI_ISL_402128 spike protein mRNA gc (1-1273)(D614G)
gggaaauaagagagaaaagaagaguaagaagaaauauaagaccccggcgccgccaccauguucguguuccugguccuccugccccuggugagcucccagugcgugaaccucaccacccgcacgcagcugccgcccgccuacaccaacagcuucacccggggcgucuacuaccccgacaagguguuccgcuccagcgugcugcacuccacccaggaccucuuccugcccuucuucagcaacgucacgugguuccacgccauccacguguccgggaccaacggcaccaagcgguucgacaacccggugcugcccuucaacgacggggucuacuucgcgagcaccgagaaguccaacaucauccgcggcuggaucuucgggacgacccucgacagcaagacccagucccugcugaucgugaacaacgccaccaacguggucaucaaggugugcgaguuccaguucugcaacgaccccuuccucggcguguacuaccacaagaacaacaagagcuggauggaguccgaguuccgggucuacagcuccgccaacaacugcacguucgaguacgugagccagcccuuccugauggaccuggagggcaagcaggggaacuucaagaaccuccgcgaguucguguucaagaacaucgacggcuacuucaagaucuacuccaagcacaccccgaucaaccugguccgggaccugccccagggguucagcgcccucgagccccugguggaccugcccaucggcaucaacaucacccgcuuccagacccuccuggcccugcaccgguccuaccucacgccgggggacagcagcuccggcuggaccgcgggcgccgccgccuacuacgugggguaccugcagccccgcaccuuccugcucaaguacaacgagaacggcaccaucacggacgcggucgacugcgcccuggacccccugagcgagaccaagugcacccucaaguccuucaccguggagaaggggaucuaccagacgagcaacuuccgggugcagcccaccgaguccaucguccgcuucccgaacaucaccaaccugugccccuucggcgagguguucaacgccacccgguucgccagcgucuacgccuggaaccgcaagcggaucuccaacugcguggcggacuacagcgugcuguacaacuccgccagcuucuccacguucaagugcuacggcgucagccccaccaagcucaacgaccugugcuucaccaacguguacgccgacuccuucgugauccgcggggacgagguccggcagaucgcccccggccagaccgggaagaucgccgacuacaacuacaagcugccggacgacuucacgggcugcgugaucgcguggaacagcaacaaccucgacuccaaggucgggggcaacuacaacuaccuguaccgccuguuccgcaagagcaaccucaagcccuucgagcgggacaucuccaccgagaucuaccaggccggcagcacccccugcaacgggguggagggcuucaacugcuacuucccccugcaguccuacggguuccagccgaccaacggcgugggguaccagcccuaccggguggucgugcugagcuucgagcuccugcacgcccccgccacggugugcggccccaagaaguccaccaaccuggucaagaacaagugcgugaacuucaacuucaacggccucaccgggaccggcgugcugaccgagagcaacaagaaguuccugccguuccagcaguucgggcgcgacaucgccgacacgaccgacgcgguccgcgacccccagacccuggagauccucgacaucacccccugcagcuucggcgggguguccgugaucacgccgggcaccaacaccagcaaccaggucgccgugcuguaccagggcgugaacugcaccgagguccccguggccauccacgccgaccagcugacgcccaccuggcggguguacuccaccgggagcaacgucuuccagacccgcgccggcugccucaucggggcggagcacgugaacaacuccuacgagugcgacauccccaucggcgccggcaucugcgccagcuaccagacgcagaccaacuccccgcggcgcgcccggagcguggcgucccagagcaucaucgccuacaccaugucccugggggccgagaacagcgucgccuacuccaacaacagcaucgccauccccaccaacuucacgaucuccgugaccaccgagauccugcccgugagcaugaccaagacgagcgucgacugcaccauguacaucugcggcgacuccaccgagugcagcaaccuccugcugcaguacggguccuucugcacccagcucaaccgcgcgcugacgggcaucgccguggagcaggacaagaacacccaggagguguucgcccaggucaagcagaucuacaagacgcccccgaucaaggacuucgggggcuucaacuucagccagauccugcccgaccccuccaagcccagcaagcgguccuucaucgaggaccuccuguucaacaaggugacccuggccgacgccggcuucaucaagcaguacggggacugccucggcgacaucgcggcccgcgaccugaucugcgcccagaaguucaacgggcugaccgugcucccgccccugcugaccgacgagaugaucgcccaguacaccagcgcccuccuggcgggcaccaucacguccggguggaccuucggcgccggcgccgcccugcagauccccuucgcgaugcagauggccuaccgguucaacgggaucggcgucacccagaacgugcucuacgagaaccagaagcugaucgccaaccaguucaacagcgccaucgggaagauccaggacucccugagcuccaccgccagcgcgcucggcaagcugcaggacguggucaaccagaacgcccaggcccugaacacgcucgugaagcagcuguccagcaacuucggggccaucuccagcgugcugaacgacauccucucccgccuggacaaggucgaggccgaggugcagaucgaccggcugaucaccggccgccuccagagccugcagaccuacgugacccagcagcugauccgggcggccgagauccgcgccagcgccaaccucgccgcgaccaagauguccgagugcguccugggccagagcaagcggguggacuucugcgggaagggcuaccaccugauguccuucccccagagcgccccgcacgggguggucuuccuccacgugacguacguccccgcccaggagaagaacuucaccaccgcccccgcgaucugccacgacggcaaggcccacuucccccgcgaggggguguucguguccaacggcacccacugguucgucacgcagcggaacuucuacgagccgcagaucaucaccaccgacaacaccuucgugagcggcaacugcgacguggucaucgggaucgugaacaacacgguguacgacccccugcagcccgagcuggacuccuucaaggaggagcucgacaaguacuucaagaaccacaccagccccgacgucgaccugggcgacaucuccgggaucaacgccagcguggugaacauccagaaggagaucgaccgccugaacgaggucgccaagaaccucaacgagucccugaucgaccugcaggagcucggcaaguacgagcaguacaucaaguggccgugguacaucuggcugggcuucaucgccgggcugaucgcgaucgugauggugaccaucaugcucugcugcaugaccagcugcugcuccugccugaagggcugcugcagcugcggguccugcugcaaguucgacgaggacgacagcgagcccguccugaagggcgugaagcuccacuacacgugauaauaggcuggagccucgguggccuagcuucuugccccuugggccuccccccagccccuccuccccuuccugcacccguacccccguggucuuugaauaaagucugagugggcggcaaaaaaaaaaaaaaaaaaaaaaaaaaaaaaaaaaaaaaaaaaaaaaaaaaaaaaaaaaaaaaaaaaaaaaaaaaaaaaaaaaaaaaaaaaaaaaaaaaaa

SEQ ID NO: 26069 - RNA, 4095 nt, Artificial Sequence
  SARS-CoV-2/Wuhan/WIV05/2019__EPI_ISL_402128 spike protein mRNA gc (1-1273)(A222V_D614G)
gggaaauaagagagaaaagaagaguaagaagaaauauaagaccccggcgccgccaccauguucguguuccugguccuccugccccuggugagcucccagugcgugaaccucaccacccgcacgcagcugccgcccgccuacaccaacagcuucacccggggcgucuacuaccccgacaagguguuccgcuccagcgugcugcacuccacccaggaccucuuccugcccuucuucagcaacgucacgugguuccacgccauccacguguccgggaccaacggcaccaagcgguucgacaacccggugcugcccuucaacgacggggucuacuucgcgagcaccgagaaguccaacaucauccgcggcuggaucuucgggacgacccucgacagcaagacccagucccugcugaucgugaacaacgccaccaacguggucaucaaggugugcgaguuccaguucugcaacgaccccuuccucggcguguacuaccacaagaacaacaagagcuggauggaguccgaguuccgggucuacagcuccgccaacaacugcacguucgaguacgugagccagcccuuccugauggaccuggagggcaagcaggggaacuucaagaaccuccgcgaguucguguucaagaacaucgacggcuacuucaagaucuacuccaagcacaccccgaucaaccugguccgggaccugccccagggguucagcgugcucgagccccugguggaccugcccaucggcaucaacaucacccgcuuccagacccuccuggcccugcaccgguccuaccucacgccgggggacagcagcuccggcuggaccgccggcgcggccgccuacuacgucggguaccugcagccccgcaccuuccugcucaaguacaacgagaacggcaccaucacggacgccguggacugcgcgcuggacccccugagcgagaccaagugcacccucaaguccuucaccguggagaaggggaucuaccagacgagcaacuuccggguccagcccaccgaguccaucgugcgcuucccgaacaucaccaaccugugccccuucggcgaggucuucaacgccacccgguucgccagcguguacgccuggaaccgcaagcggaucuccaacugcguggccgacuacagcguccuguacaacuccgcgagcuucuccacguucaagugcuacggcgugagccccaccaagcucaacgaccugugcuucaccaacguguacgccgacuccuucgucauccgcggggacgaggugcggcagaucgcccccggccagaccgggaagaucgccgacuacaacuacaagcugccggacgacuucacgggcugcgugaucgccuggaacagcaacaaccucgacuccaaggucgggggcaacuacaacuaccuguaccgccuguuccgcaagagcaaccucaagcccuucgagcgggacaucuccaccgagaucuaccaggcgggcagcacccccugcaacgggguggagggcuucaacugcuacuucccccugcaguccuacggguuccagccgaccaacggcgugggguaccagcccuaccgggucguggugcugagcuucgagcuccugcacgcccccgccacggucugcggccccaagaaguccaccaaccuggugaagaacaagugcgugaacuucaacuucaacggccucaccgggaccggcguccugaccgagagcaacaagaaguuccugccguuccagcaguucgggcgcgacaucgccgacacgaccgacgccgugcgcgacccccagacccuggagauccucgacaucacccccugcagcuucggcgggguguccgucaucacgccgggcaccaacaccagcaaccagguggcggugcuguaccagggcgucaacugcaccgaggugcccguggccauccacgccgaccagcugacgcccaccuggcgggucuacuccaccgggagcaacguguuccagacccgcgccggcugccucaucggggccgagcacgugaacaacuccuacgagugcgacauccccaucggcgcgggcaucugcgccagcuaccagacgcagaccaacuccccgcggcgcgcccggagcgucgccucccagagcaucaucgcguacaccaugucccugggggccgagaacagcguggccuacuccaacaacagcaucgccauccccaccaacuucacgaucuccgugaccaccgagauccugcccgucagcaugaccaagacgagcguggacugcaccauguacaucugcggcgacuccaccgagugcagcaaccuccugcugcaguacggguccuucugcacccagcucaaccgcgcccugacgggcaucgcgguggagcaggacaagaacacccaggaggucuucgcccaggugaagcagaucuacaagacgcccccgaucaaggacuucgggggcuucaacuucagccagauccugcccgaccccuccaagcccagcaagcgguccuucaucgaggaccuccuguucaacaaggugacccuggccgacgccggcuucaucaagcaguacggggacugccucggcgacaucgccgcgcgcgaccugaucugcgcccagaaguucaacgggcugaccguccucccgccccugcugaccgacgagaugaucgcccaguacaccagcgcccuccuggccggcaccaucacguccggguggaccuucggcgcgggcgccgcccugcagauccccuucgccaugcagauggcguaccgguucaacgggaucggcgugacccagaacgugcucuacgagaaccagaagcugaucgccaaccaguucaacagcgccaucgggaagauccaggacucccugagcuccaccgccagcgcccucggcaagcugcaggacgucgugaaccagaacgcgcaggcccugaacacgcucgugaagcagcuguccagcaacuucggggccaucuccagcguccugaacgacauccucucccgccuggacaagguggaggccgaggugcagaucgaccggcugaucaccggccgccuccagagccugcagaccuacgucacccagcagcugauccgggccgcggagauccgcgccagcgccaaccucgccgccaccaagauguccgagugcgugcugggccagagcaagcggguggacuucugcgggaagggcuaccaccugauguccuucccccagagcgcgccgcacggggucguguuccuccacgucacguacgugcccgcccaggagaagaacuucaccaccgcccccgccaucugccacgacggcaaggcgcacuucccccgcgaggggguguucgucuccaacggcacccacugguucgugacgcagcggaacuucuacgagccgcagaucaucaccaccgacaacaccuucgugagcggcaacugcgacgucgugaucgggaucgugaacaacacggucuacgacccccugcagcccgagcuggacuccuucaaggaggagcucgacaaguacuucaagaaccacaccagccccgacguggaccugggcgacaucuccgggaucaacgccagcguggucaacauccagaaggagaucgaccgccugaacgagguggccaagaaccucaacgagucccugaucgaccugcaggagcucggcaaguacgagcaguacaucaaguggccgugguacaucuggcugggcuucaucgccgggcugaucgccaucgugauggucaccaucaugcucugcugcaugaccagcugcugcuccugccugaagggcugcugcagcugcggguccugcugcaaguucgacgaggacgacagcgagcccgugcugaagggcgugaagcuccacuacacgugauaauaggcuggagccucgguggccuagcuucuugccccuugggccuccccccagccccuccuccccuuccugcacccguacccccguggucuuugaauaaagucugagugggcggcaaaaaaaaaaaaaaaaaaaaaaaaaaaaaaaaaaaaaaaaaaaaaaaaaaaaaaaaaaaaaaaaaaaaaaaaaaaaaaaaaaaaaaaaaaaaaaaaaaaa

SEQ ID NO: 26070 - RNA, 4095 nt, Artificial Sequence
  SARS-CoV-2/Wuhan/WIV05/2019__EPI_ISL_402128 spike protein mRNA gc (1-1273)(N439K_D614G)
gggaaauaagagagaaaagaagaguaagaagaaauauaagaccccggcgccgccaccauguucguguuccugguccuccugccccuggugagcucccagugcgugaaccucaccacccgcacgcagcugccgcccgccuacaccaacagcuucacccggggcgucuacuaccccgacaagguguuccgcuccagcgugcugcacuccacccaggaccucuuccugcccuucuucagcaacgucacgugguuccacgccauccacguguccgggaccaacggcaccaagcgguucgacaacccggugcugcccuucaacgacggggucuacuucgcgagcaccgagaaguccaacaucauccgcggcuggaucuucgggacgacccucgacagcaagacccagucccugcugaucgugaacaacgccaccaacguggucaucaaggugugcgaguuccaguucugcaacgaccccuuccucggcguguacuaccacaagaacaacaagagcuggauggaguccgaguuccgggucuacagcuccgccaacaacugcacguucgaguacgugagccagcccuuccugauggaccuggagggcaagcaggggaacuucaagaaccuccgcgaguucguguucaagaacaucgacggcuacuucaagaucuacuccaagcacaccccgaucaaccugguccgggaccugccccagggguucagcgcccucgagccccugguggaccugcccaucggcaucaacaucacccgcuuccagacccuccuggcccugcaccgguccuaccucacgccgggggacagcagcuccggcuggaccgcgggcgccgccgccuacuacgugggguaccugcagccccgcaccuuccugcucaaguacaacgagaacggcaccaucacggacgcggucgacugcgcccuggacccccugagcgagaccaagugcacccucaaguccuucaccguggagaaggggaucuaccagacgagcaacuuccgggugcagcccaccgaguccaucguccgcuucccgaacaucaccaaccugugccccuucggcgagguguucaacgccacccgguucgccagcgucuacgccuggaaccgcaagcggaucuccaacugcguggcggacuacagcgugcuguacaacuccgccagcuucuccacguucaagugcuacggcgucagccccaccaagcucaacgaccugugcuucaccaacguguacgccgacuccuucgugauccgcggggacgagguccggcagaucgcccccggccagaccgggaagaucgccgacuacaacuacaagcugccggacgacuucacgggcugcgugaucgcguggaacagcaagaaccucgacuccaaggucgggggcaacuacaacuaccuguaccgccuguuccgcaagagcaaccucaagcccuucgagcgggacaucuccaccgagaucuaccaggccggcagcacccccugcaacgggguggagggcuucaacugcuacuucccccugcaguccuacggguuccagccgaccaacggcgugggguaccagcccuaccggguggucgugcugagcuucgagcuccugcacgcccccgccacggugugcggccccaagaaguccaccaaccuggucaagaacaagugcgugaacuucaacuucaacggccucaccgggaccggcgugcugaccgagagcaacaagaaguuccugccguuccagcaguucgggcgcgacaucgccgacacgaccgacgcgguccgcgacccccagacccuggagauccucgacaucacccccugcagcuucggcgggguguccgugaucacgccgggcaccaacaccagcaaccaggucgccgugcuguaccagggcgugaacugcaccgagguccccguggccauccacgccgaccagcugacgcccaccuggcggguguacuccaccgggagcaacgucuuccagacccgcgccggcugccucaucggggcggagcacgugaacaacuccuacgagugcgacauccccaucggcgccggcaucugcgccagcuaccagacgcagaccaacuccccgcggcgcgcccggagcguggcgucccagagcaucaucgccuacaccaugucccugggggccgagaacagcgucgccuacuccaacaacagcaucgccauccccaccaacuucacgaucuccgugaccaccgagauccugcccgugagcaugaccaagacgagcgucgacugcaccauguacaucugcggcgacuccaccgagugcagcaaccuccugcugcaguacggguccuucugcacccagcucaaccgcgcgcugacgggcaucgccguggagcaggacaagaacacccaggagguguucgcccaggucaagcagaucuacaagacgcccccgaucaaggacuucgggggcuucaacuucagccagauccugcccgaccccuccaagcccagcaagcgguccuucaucgaggaccuccuguucaacaaggugacccuggccgacgccggcuucaucaagcaguacggggacugccucggcgacaucgcggcccgcgaccugaucugcgcccagaaguucaacgggcugaccgugcucccgccccugcugaccgacgagaugaucgcccaguacaccagcgcccuccuggcgggcaccaucacguccggguggaccuucggcgccggcgccgcccugcagauccccuucgcgaugcagauggccuaccgguucaacgggaucggcgucacccagaacgugcucuacgagaaccagaagcugaucgccaaccaguucaacagcgccaucgggaagauccaggacucccugagcuccaccgccagcgcgcucggcaagcugcaggacguggucaaccagaacgcccaggcccugaacacgcucgugaagcagcuguccagcaacuucggggccaucuccagcgugcugaacgacauccucucccgccuggacaaggucgaggccgaggugcagaucgaccggcugaucaccggccgccuccagagccugcagaccuacgugacccagcagcugauccgggcggccgagauccgcgccagcgccaaccucgccgcgaccaagauguccgagugcguccugggccagagcaagcggguggacuucugcgggaagggcuaccaccugauguccuucccccagagcgccccgcacgggguggucuuccuccacgugacguacguccccgcccaggagaagaacuucaccaccgcccccgcgaucugccacgacggcaaggcccacuucccccgcgaggggguguucguguccaacggcacccacugguucgucacgcagcggaacuucuacgagccgcagaucaucaccaccgacaacaccuucgugagcggcaacugcgacguggucaucgggaucgugaacaacacgguguacgacccccugcagcccgagcuggacuccuucaaggaggagcucgacaaguacuucaagaaccacaccagccccgacgucgaccugggcgacaucuccgggaucaacgccagcguggugaacauccagaaggagaucgaccgccugaacgaggucgccaagaaccucaacgagucccugaucgaccugcaggagcucggcaaguacgagcaguacaucaaguggccgugguacaucuggcugggcuucaucgccgggcugaucgcgaucgugauggugaccaucaugcucugcugcaugaccagcugcugcuccugccugaagggcugcugcagcugcggguccugcugcaaguucgacgaggacgacagcgagcccguccugaagggcgugaagcuccacuacacgugauaauaggcuggagccucgguggccuagcuucuugccccuugggccuccccccagccccuccuccccuuccugcacccguacccccguggucuuugaauaaagucugagugggcggcaaaaaaaaaaaaaaaaaaaaaaaaaaaaaaaaaaaaaaaaaaaaaaaaaaaaaaaaaaaaaaaaaaaaaaaaaaaaaaaaaaaaaaaaaaaaaaaaaaaa

SEQ ID NO: 26071 - RNA, 4095 nt, Artificial Sequence
  SARS-CoV-2/Wuhan/WIV05/2019__EPI_ISL_402128 spike protein mRNA gc (1-1273)(S477N_D614G)
gggaaauaagagagaaaagaagaguaagaagaaauauaagaccccggcgccgccaccauguucguguuccugguccuccugccccuggugagcucccagugcgugaaccucaccacccgcacgcagcugccgcccgccuacaccaacagcuucacccggggcgucuacuaccccgacaagguguuccgcuccagcgugcugcacuccacccaggaccucuuccugcccuucuucagcaacgucacgugguuccacgccauccacguguccgggaccaacggcaccaagcgguucgacaacccggugcugcccuucaacgacggggucuacuucgcgagcaccgagaaguccaacaucauccgcggcuggaucuucgggacgacccucgacagcaagacccagucccugcugaucgugaacaacgccaccaacguggucaucaaggugugcgaguuccaguucugcaacgaccccuuccucggcguguacuaccacaagaacaacaagagcuggauggaguccgaguuccgggucuacagcuccgccaacaacugcacguucgaguacgugagccagcccuuccugauggaccuggagggcaagcaggggaacuucaagaaccuccgcgaguucguguucaagaacaucgacggcuacuucaagaucuacuccaagcacaccccgaucaaccugguccgggaccugccccagggguucagcgcccucgagccccugguggaccugcccaucggcaucaacaucacccgcuuccagacccuccuggcccugcaccgguccuaccucacgccgggggacagcagcuccggcuggaccgcgggcgccgccgccuacuacgugggguaccugcagccccgcaccuuccugcucaaguacaacgagaacggcaccaucacggacgcggucgacugcgcccuggacccccugagcgagaccaagugcacccucaaguccuucaccguggagaaggggaucuaccagacgagcaacuuccgggugcagcccaccgaguccaucguccgcuucccgaacaucaccaaccugugccccuucggcgagguguucaacgccacccgguucgccagcgucuacgccuggaaccgcaagcggaucuccaacugcguggcggacuacagcgugcuguacaacuccgccagcuucuccacguucaagugcuacggcgucagccccaccaagcucaacgaccugugcuucaccaacguguacgccgacuccuucgugauccgcggggacgagguccggcagaucgcccccggccagaccgggaagaucgccgacuacaacuacaagcugccggacgacuucacgggcugcgugaucgcguggaacagcaacaaccucgacuccaaggucgggggcaacuacaacuaccuguaccgccuguuccgcaagagcaaccucaagcccuucgagcgggacaucuccaccgagaucuaccaggccggcaacacccccugcaacgggguggagggcuucaacugcuacuucccccugcagagcuacggguuccagccgaccaacggcgugggguaccagcccuaccggguggucgugcuguccuucgagcuccugcacgcccccgccacggugugcggccccaagaaguccaccaaccuggucaagaacaagugcgugaacuucaacuucaacggccucaccgggaccggcgugcugaccgagagcaacaagaaguuccugccguuccagcaguucgggcgcgacaucgccgacacgaccgacgcgguccgcgacccccagacccuggagauccucgacaucacccccugcagcuucggcggggugagcgugaucacgccgggcaccaacaccuccaaccaggucgccgugcuguaccagggcgugaacugcaccgagguccccguggccauccacgccgaccagcugacgcccaccuggcggguguacagcaccggguccaacgucuuccagacccgcgccggcugccucaucggggcggagcacgugaacaacagcuacgagugcgacauccccaucggcgccggcaucugcgccuccuaccagacgcagaccaacagcccgcggcgcgcccgguccguggcgagccaguccaucaucgccuacaccaugagccugggggccgagaacuccgucgccuacagcaacaacuccaucgccauccccaccaacuucacgaucagcgugaccaccgagauccugcccguguccaugaccaagacgagcgucgacugcaccauguacaucugcggcgacagcaccgagugcuccaaccuccugcugcaguacgggagcuucugcacccagcucaaccgcgcgcugacgggcaucgccguggagcaggacaagaacacccaggagguguucgcccaggucaagcagaucuacaagacgcccccgaucaaggacuucgggggcuucaacuucucccagauccugcccgaccccagcaagcccuccaagcggagcuucaucgaggaccuccuguucaacaaggugacccuggccgacgccggcuucaucaagcaguacggggacugccucggcgacaucgcggcccgcgaccugaucugcgcccagaaguucaacgggcugaccgugcucccgccccugcugaccgacgagaugaucgcccaguacaccuccgcccuccuggcgggcaccaucacgagcggguggaccuucggcgccggcgccgcccugcagauccccuucgcgaugcagauggccuaccgguucaacgggaucggcgucacccagaacgugcucuacgagaaccagaagcugaucgccaaccaguucaacuccgccaucgggaagauccaggacagccuguccagcaccgccuccgcgcucggcaagcugcaggacguggucaaccagaacgcccaggcccugaacacgcucgugaagcagcugagcuccaacuucggggccaucagcuccgugcugaacgacauccucagccgccuggacaaggucgaggccgaggugcagaucgaccggcugaucaccggccgccuccagucccugcagaccuacgugacccagcagcugauccgggcggccgagauccgcgccagcgccaaccucgccgcgaccaagaugagcgagugcguccugggccaguccaagcggguggacuucugcgggaagggcuaccaccugaugagcuucccccaguccgccccgcacgggguggucuuccuccacgugacguacguccccgcccaggagaagaacuucaccaccgcccccgcgaucugccacgacggcaaggcccacuucccccgcgaggggguguucgugagcaacggcacccacugguucgucacgcagcggaacuucuacgagccgcagaucaucaccaccgacaacaccuucguguccggcaacugcgacguggucaucgggaucgugaacaacacgguguacgacccccugcagcccgagcuggacagcuucaaggaggagcucgacaaguacuucaagaaccacaccucccccgacgucgaccugggcgacaucagcgggaucaacgccuccguggugaacauccagaaggagaucgaccgccugaacgaggucgccaagaaccucaacgagagccugaucgaccugcaggagcucggcaaguacgagcaguacaucaaguggccgugguacaucuggcugggcuucaucgccgggcugaucgcgaucgugauggugaccaucaugcucugcugcaugaccuccugcugcagcugccugaagggcugcugcuccugcgggagcugcugcaaguucgacgaggacgacuccgagcccguccugaagggcgugaagcuccacuacacgugauaauaggcuggagccucgguggccuagcuucuugccccuugggccuccccccagccccuccuccccuuccugcacccguacccccguggucuuugaauaaagucugagugggcggcaaaaaaaaaaaaaaaaaaaaaaaaaaaaaaaaaaaaaaaaaaaaaaaaaaaaaaaaaaaaaaaaaaaaaaaaaaaaaaaaaaaaaaaaaaaaaaaaaaaa

SEQ ID NO: 26072 - RNA, 4095 nt, Artificial Sequence
  SARS-CoV-2/Wuhan/WIV05/2019__EPI_ISL_402128 spike protein mRNA gc (1-1273)(N501Y_D614G)
gggaaauaagagagaaaagaagaguaagaagaaauauaagaccccggcgccgccaccauguucguguuccugguccuccugccccuggugagcucccagugcgugaaccucaccacccgcacgcagcugccgcccgccuacaccaacagcuucacccggggcgucuacuaccccgacaagguguuccgcuccagcgugcugcacuccacccaggaccucuuccugcccuucuucagcaacgucacgugguuccacgccauccacguguccgggaccaacggcaccaagcgguucgacaacccggugcugcccuucaacgacggggucuacuucgcgagcaccgagaaguccaacaucauccgcggcuggaucuucgggacgacccucgacagcaagacccagucccugcugaucgugaacaacgccaccaacguggucaucaaggugugcgaguuccaguucugcaacgaccccuuccucggcguguacuaccacaagaacaacaagagcuggauggaguccgaguuccgggucuacagcuccgccaacaacugcacguucgaguacgugagccagcccuuccugauggaccuggagggcaagcaggggaacuucaagaaccuccgcgaguucguguucaagaacaucgacggcuacuucaagaucuacuccaagcacaccccgaucaaccugguccgggaccugccccagggguucagcgcccucgagccccugguggaccugcccaucggcaucaacaucacccgcuuccagacccuccuggcccugcaccgguccuaccucacgccgggggacagcagcuccggcuggaccgcgggcgccgccgccuacuacgugggguaccugcagccccgcaccuuccugcucaaguacaacgagaacggcaccaucacggacgcggucgacugcgcccuggacccccugagcgagaccaagugcacccucaaguccuucaccguggagaaggggaucuaccagacgagcaacuuccgggugcagcccaccgaguccaucguccgcuucccgaacaucaccaaccugugccccuucggcgagguguucaacgccacccgguucgccagcgucuacgccuggaaccgcaagcggaucuccaacugcguggcggacuacagcgugcuguacaacuccgccagcuucuccacguucaagugcuacggcgucagccccaccaagcucaacgaccugugcuucaccaacguguacgccgacuccuucgugauccgcggggacgagguccggcagaucgcccccggccagaccgggaagaucgccgacuacaacuacaagcugccggacgacuucacgggcugcgugaucgcguggaacagcaacaaccucgacuccaaggucgggggcaacuacaacuaccuguaccgccuguuccgcaagagcaaccucaagcccuucgagcgggacaucuccaccgagaucuaccaggccggcagcacccccugcaacgggguggagggcuucaacugcuacuucccccugcaguccuacggguuccagccgaccuacggcgugggguaccagcccuaccggguggucgugcugagcuucgagcuccugcacgcccccgccacggugugcggccccaagaaguccaccaaccuggucaagaacaagugcgugaacuucaacuucaacggccucaccgggaccggcgugcugaccgagagcaacaagaaguuccugccguuccagcaguucgggcgcgacaucgccgacacgaccgacgcgguccgcgacccccagacccuggagauccucgacaucacccccugcagcuucggcgggguguccgugaucacgccgggcaccaacaccagcaaccaggucgccgugcuguaccagggcgugaacugcaccgagguccccguggccauccacgccgaccagcugacgcccaccuggcggguguacuccaccgggagcaacgucuuccagacccgcgccggcugccucaucggggcggagcacgugaacaacuccuacgagugcgacauccccaucggcgccggcaucugcgccagcuaccagacgcagaccaacuccccgcggcgcgcccggagcguggcgucccagagcaucaucgccuacaccaugucccugggggccgagaacagcgucgccuacuccaacaacagcaucgccauccccaccaacuucacgaucuccgugaccaccgagauccugcccgugagcaugaccaagacgagcgucgacugcaccauguacaucugcggcgacuccaccgagugcagcaaccuccugcugcaguacggguccuucugcacccagcucaaccgcgcgcugacgggcaucgccguggagcaggacaagaacacccaggagguguucgcccaggucaagcagaucuacaagacgcccccgaucaaggacuucgggggcuucaacuucagccagauccugcccgaccccuccaagcccagcaagcgguccuucaucgaggaccuccuguucaacaaggugacccuggccgacgccggcuucaucaagcaguacggggacugccucggcgacaucgcggcccgcgaccugaucugcgcccagaaguucaacgggcugaccgugcucccgccccugcugaccgacgagaugaucgcccaguacaccagcgcccuccuggcgggcaccaucacguccggguggaccuucggcgccggcgccgcccugcagauccccuucgcgaugcagauggccuaccgguucaacgggaucggcgucacccagaacgugcucuacgagaaccagaagcugaucgccaaccaguucaacagcgccaucgggaagauccaggacucccugagcuccaccgccagcgcgcucggcaagcugcaggacguggucaaccagaacgcccaggcccugaacacgcucgugaagcagcuguccagcaacuucggggccaucuccagcgugcugaacgacauccucucccgccuggacaaggucgaggccgaggugcagaucgaccggcugaucaccggccgccuccagagccugcagaccuacgugacccagcagcugauccgggcggccgagauccgcgccagcgccaaccucgccgcgaccaagauguccgagugcguccugggccagagcaagcggguggacuucugcgggaagggcuaccaccugauguccuucccccagagcgccccgcacgggguggucuuccuccacgugacguacguccccgcccaggagaagaacuucaccaccgcccccgcgaucugccacgacggcaaggcccacuucccccgcgaggggguguucguguccaacggcacccacugguucgucacgcagcggaacuucuacgagccgcagaucaucaccaccgacaacaccuucgugagcggcaacugcgacguggucaucgggaucgugaacaacacgguguacgacccccugcagcccgagcuggacuccuucaaggaggagcucgacaaguacuucaagaaccacaccagccccgacgucgaccugggcgacaucuccgggaucaacgccagcguggugaacauccagaaggagaucgaccgccugaacgaggucgccaagaaccucaacgagucccugaucgaccugcaggagcucggcaaguacgagcaguacaucaaguggccgugguacaucuggcugggcuucaucgccgggcugaucgcgaucgugauggugaccaucaugcucugcugcaugaccagcugcugcuccugccugaagggcugcugcagcugcggguccugcugcaaguucgacgaggacgacagcgagcccguccugaagggcgugaagcuccacuacacgugauaauaggcuggagccucgguggccuagcuucuugccccuugggccuccccccagccccuccuccccuuccugcacccguacccccguggucuuugaauaaagucugagugggcggcaaaaaaaaaaaaaaaaaaaaaaaaaaaaaaaaaaaaaaaaaaaaaaaaaaaaaaaaaaaaaaaaaaaaaaaaaaaaaaaaaaaaaaaaaaaaaaaaaaaa

SEQ ID NO: 26073 - RNA, 4089 nt, Artificial Sequence
  SARS-CoV-2/Wuhan/WIV05/2019__EPI_ISL_402128 spike protein mRNA gc (1-1273)(H69del_V70del_D614G)
gggaaauaagagagaaaagaagaguaagaagaaauauaagaccccggcgccgccaccauguucguguuccugguccuccugccccuggugagcucccagugcgugaaccucaccacccgcacgcagcugccgcccgccuacaccaacagcuucacccggggcgucuacuaccccgacaagguguuccgcuccagcgugcugcacuccacccaggaccucuuccugcccuucuucagcaacgucacgugguuccacgccaucuccgggaccaacggcaccaagcgguucgacaacccggugcugcccuucaacgacgggguguacuucgcgagcaccgagaaguccaacaucauccgcggcuggaucuucgggacgacccucgacagcaagacccagucccugcugaucgucaacaacgccaccaacguggugaucaaggucugcgaguuccaguucugcaacgaccccuuccucggcguguacuaccacaagaacaacaagagcuggauggaguccgaguuccggguguacagcuccgccaacaacugcacguucgaguacgucagccagcccuuccugauggaccuggagggcaagcaggggaacuucaagaaccuccgcgaguucguguucaagaacaucgacggcuacuucaagaucuacuccaagcacaccccgaucaaccuggugcgggaccugccccagggguucagcgcccucgagccccuggucgaccugcccaucggcaucaacaucacccgcuuccagacccuccuggcccugcaccgguccuaccucacgccgggggacagcagcuccggcuggaccgcgggcgccgccgccuacuacgugggguaccugcagccccgcaccuuccugcucaaguacaacgagaacggcaccaucacggacgcgguggacugcgcccuggacccccugagcgagaccaagugcacccucaaguccuucaccgucgagaaggggaucuaccagacgagcaacuuccgggugcagcccaccgaguccaucgugcgcuucccgaacaucaccaaccugugccccuucggcgaggucuucaacgccacccgguucgccagcguguacgccuggaaccgcaagcggaucuccaacugcgucgcggacuacagcgugcuguacaacuccgccagcuucuccacguucaagugcuacggcgugagccccaccaagcucaacgaccugugcuucaccaacgucuacgccgacuccuucgugauccgcggggacgaggugcggcagaucgcccccggccagaccgggaagaucgccgacuacaacuacaagcugccggacgacuucacgggcugcgucaucgcguggaacagcaacaaccucgacuccaaggucgggggcaacuacaacuaccuguaccgccuguuccgcaagagcaaccucaagcccuucgagcgggacaucuccaccgagaucuaccaggccggcagcacccccugcaacgggguggagggcuucaacugcuacuucccccugcaguccuacggguuccagccgaccaacggcgugggguaccagcccuaccggguggugguccugagcuucgagcuccugcacgcccccgccacggugugcggccccaagaaguccaccaaccuggugaagaacaagugcgucaacuucaacuucaacggccucaccgggaccggcgugcugaccgagagcaacaagaaguuccugccguuccagcaguucgggcgcgacaucgccgacacgaccgacgcggugcgcgacccccagacccuggagauccucgacaucacccccugcagcuucggcggggucuccgugaucacgccgggcaccaacaccagcaaccagguggccguccuguaccagggcgugaacugcaccgaggugcccgucgccauccacgccgaccagcugacgcccaccuggcggguguacuccaccgggagcaacguguuccagacccgcgccggcugccucaucggggcggagcacgucaacaacuccuacgagugcgacauccccaucggcgccggcaucugcgccagcuaccagacgcagaccaacuccccgcggcgcgcccggagcguggcgucccagagcaucaucgccuacaccaugucccugggggccgagaacagcguggccuacuccaacaacagcaucgccauccccaccaacuucacgaucuccgucaccaccgagauccugcccgugagcaugaccaagacgagcguggacugcaccauguacaucugcggcgacuccaccgagugcagcaaccuccugcugcaguacggguccuucugcacccagcucaaccgcgcgcugacgggcaucgccgucgagcaggacaagaacacccaggagguguucgcccaggugaagcagaucuacaagacgcccccgaucaaggacuucgggggcuucaacuucagccagauccugcccgaccccuccaagcccagcaagcgguccuucaucgaggaccuccuguucaacaaggucacccuggccgacgccggcuucaucaagcaguacggggacugccucggcgacaucgcggcccgcgaccugaucugcgcccagaaguucaacgggcugaccgugcucccgccccugcugaccgacgagaugaucgcccaguacaccagcgcccuccuggcgggcaccaucacguccggguggaccuucggcgccggcgccgcccugcagauccccuucgcgaugcagauggccuaccgguucaacgggaucggcgugacccagaacguccucuacgagaaccagaagcugaucgccaaccaguucaacagcgccaucgggaagauccaggacucccugagcuccaccgccagcgcgcucggcaagcugcaggacguggugaaccagaacgcccaggcccugaacacgcucgucaagcagcuguccagcaacuucggggccaucuccagcgugcugaacgacauccucucccgccuggacaagguggaggccgagguccagaucgaccggcugaucaccggccgccuccagagccugcagaccuacgugacccagcagcugauccgggcggccgagauccgcgccagcgccaaccucgccgcgaccaagauguccgagugcgugcugggccagagcaagcgggucgacuucugcgggaagggcuaccaccugauguccuucccccagagcgccccgcacggggugguguuccuccacgucacguacgugcccgcccaggagaagaacuucaccaccgcccccgcgaucugccacgacggcaaggcccacuucccccgcgagggggucuucguguccaacggcacccacugguucgugacgcagcggaacuucuacgagccgcagaucaucaccaccgacaacaccuucgucagcggcaacugcgacguggugaucgggaucgucaacaacacgguguacgacccccugcagcccgagcuggacuccuucaaggaggagcucgacaaguacuucaagaaccacaccagccccgacguggaccugggcgacaucuccgggaucaacgccagcgucgugaacauccagaaggagaucgaccgccugaacgagguggccaagaaccucaacgagucccugaucgaccugcaggagcucggcaaguacgagcaguacaucaaguggccgugguacaucuggcugggcuucaucgccgggcugaucgcgaucgucauggugaccaucaugcucugcugcaugaccagcugcugcuccugccugaagggcugcugcagcugcggguccugcugcaaguucgacgaggacgacagcgagcccgugcugaagggcgucaagcuccacuacacgugauaauaggcuggagccucgguggccuagcuucuugccccuugggccuccccccagccccuccuccccuuccugcacccguacccccguggucuuugaauaaagucugagugggcggcaaaaaaaaaaaaaaaaaaaaaaaaaaaaaaaaaaaaaaaaaaaaaaaaaaaaaaaaaaaaaaaaaaaaaaaaaaaaaaaaaaaaaaaaaaaaaaaaaaaa

SEQ ID NO: 26074 - RNA, 4095 nt, Artificial Sequence
  SARS-CoV-2/Wuhan/WIV05/2019__EPI_ISL_402128 spike protein mRNA gc (1-1273)(Y453F_D614G)
gggaaauaagagagaaaagaagaguaagaagaaauauaagaccccggcgccgccaccauguucguguuccugguccuccugccccuggugagcucccagugcgugaaccucaccacccgcacgcagcugccgcccgccuacaccaacagcuucacccggggcgucuacuaccccgacaagguguuccgcuccagcgugcugcacuccacccaggaccucuuccugcccuucuucagcaacgucacgugguuccacgccauccacguguccgggaccaacggcaccaagcgguucgacaacccggugcugcccuucaacgacggggucuacuucgcgagcaccgagaaguccaacaucauccgcggcuggaucuucgggacgacccucgacagcaagacccagucccugcugaucgugaacaacgccaccaacguggucaucaaggugugcgaguuccaguucugcaacgaccccuuccucggcguguacuaccacaagaacaacaagagcuggauggaguccgaguuccgggucuacagcuccgccaacaacugcacguucgaguacgugagccagcccuuccugauggaccuggagggcaagcaggggaacuucaagaaccuccgcgaguucguguucaagaacaucgacggcuacuucaagaucuacuccaagcacaccccgaucaaccugguccgggaccugccccagggguucagcgcccucgagccccugguggaccugcccaucggcaucaacaucacccgcuuccagacccuccuggcccugcaccgguccuaccucacgccgggggacagcagcuccggcuggaccgcgggcgccgccgccuacuacgugggguaccugcagccccgcaccuuccugcucaaguacaacgagaacggcaccaucacggacgcggucgacugcgcccuggacccccugagcgagaccaagugcacccucaaguccuucaccguggagaaggggaucuaccagacgagcaacuuccgggugcagcccaccgaguccaucguccgcuucccgaacaucaccaaccugugccccuucggcgagguguucaacgccacccgguucgccagcgucuacgccuggaaccgcaagcggaucuccaacugcguggcggacuacagcgugcuguacaacuccgccagcuucuccacguucaagugcuacggcgucagccccaccaagcucaacgaccugugcuucaccaacguguacgccgacuccuucgugauccgcggggacgagguccggcagaucgcccccggccagaccgggaagaucgccgacuacaacuacaagcugccggacgacuucacgggcugcgugaucgcguggaacagcaacaaccucgacuccaaggucgggggcaacuacaacuaccuguuccgccuguuccgcaagagcaaccucaagcccuucgagcgggacaucuccaccgagaucuaccaggccggcagcacccccugcaacgggguggagggcuucaacugcuacuucccccugcaguccuacggguuccagccgaccaacggcgugggguaccagcccuaccggguggucgugcugagcuucgagcuccugcacgcccccgccacggugugcggccccaagaaguccaccaaccuggucaagaacaagugcgugaacuucaacuucaacggccucaccgggaccggcgugcugaccgagagcaacaagaaguuccugccguuccagcaguucgggcgcgacaucgccgacacgaccgacgcgguccgcgacccccagacccuggagauccucgacaucacccccugcagcuucggcgggguguccgugaucacgccgggcaccaacaccagcaaccaggucgccgugcuguaccagggcgugaacugcaccgagguccccguggccauccacgccgaccagcugacgcccaccuggcggguguacuccaccgggagcaacgucuuccagacccgcgccggcugccucaucggggcggagcacgugaacaacuccuacgagugcgacauccccaucggcgccggcaucugcgccagcuaccagacgcagaccaacuccccgcggcgcgcccggagcguggcgucccagagcaucaucgccuacaccaugucccugggggccgagaacagcgucgccuacuccaacaacagcaucgccauccccaccaacuucacgaucuccgugaccaccgagauccugcccgugagcaugaccaagacgagcgucgacugcaccauguacaucugcggcgacuccaccgagugcagcaaccuccugcugcaguacggguccuucugcacccagcucaaccgcgcgcugacgggcaucgccguggagcaggacaagaacacccaggagguguucgcccaggucaagcagaucuacaagacgcccccgaucaaggacuucgggggcuucaacuucagccagauccugcccgaccccuccaagcccagcaagcgguccuucaucgaggaccuccuguucaacaaggugacccuggccgacgccggcuucaucaagcaguacggggacugccucggcgacaucgcggcccgcgaccugaucugcgcccagaaguucaacgggcugaccgugcucccgccccugcugaccgacgagaugaucgcccaguacaccagcgcccuccuggcgggcaccaucacguccggguggaccuucggcgccggcgccgcccugcagauccccuucgcgaugcagauggccuaccgguucaacgggaucggcgucacccagaacgugcucuacgagaaccagaagcugaucgccaaccaguucaacagcgccaucgggaagauccaggacucccugagcuccaccgccagcgcgcucggcaagcugcaggacguggucaaccagaacgcccaggcccugaacacgcucgugaagcagcuguccagcaacuucggggccaucuccagcgugcugaacgacauccucucccgccuggacaaggucgaggccgaggugcagaucgaccggcugaucaccggccgccuccagagccugcagaccuacgugacccagcagcugauccgggcggccgagauccgcgccagcgccaaccucgccgcgaccaagauguccgagugcguccugggccagagcaagcggguggacuucugcgggaagggcuaccaccugauguccuucccccagagcgccccgcacgggguggucuuccuccacgugacguacguccccgcccaggagaagaacuucaccaccgcccccgcgaucugccacgacggcaaggcccacuucccccgcgaggggguguucguguccaacggcacccacugguucgucacgcagcggaacuucuacgagccgcagaucaucaccaccgacaacaccuucgugagcggcaacugcgacguggucaucgggaucgugaacaacacgguguacgacccccugcagcccgagcuggacuccuucaaggaggagcucgacaaguacuucaagaaccacaccagccccgacgucgaccugggcgacaucuccgggaucaacgccagcguggugaacauccagaaggagaucgaccgccugaacgaggucgccaagaaccucaacgagucccugaucgaccugcaggagcucggcaaguacgagcaguacaucaaguggccgugguacaucuggcugggcuucaucgccgggcugaucgcgaucgugauggugaccaucaugcucugcugcaugaccagcugcugcuccugccugaagggcugcugcagcugcggguccugcugcaaguucgacgaggacgacagcgagcccguccugaagggcgugaagcuccacuacacgugauaauaggcuggagccucgguggccuagcuucuugccccuugggccuccccccagccccuccuccccuuccugcacccguacccccguggucuuugaauaaagucugagugggcggcaaaaaaaaaaaaaaaaaaaaaaaaaaaaaaaaaaaaaaaaaaaaaaaaaaaaaaaaaaaaaaaaaaaaaaaaaaaaaaaaaaaaaaaaaaaaaaaaaaaa

SEQ ID NO: 26075 - RNA, 4095 nt, Artificial Sequence
  SARS-CoV-2/Wuhan/WIV05/2019__EPI_ISL_402128 spike protein mRNA gc (1-1273)(D614G_I692V)
gggaaauaagagagaaaagaagaguaagaagaaauauaagaccccggcgccgccaccauguucguguuccugguccuccugccccuggugagcucccagugcgugaaccucaccacccgcacgcagcugccgcccgccuacaccaacagcuucacccggggcgucuacuaccccgacaagguguuccgcuccagcgugcugcacuccacccaggaccucuuccugcccuucuucagcaacgucacgugguuccacgccauccacguguccgggaccaacggcaccaagcgguucgacaacccggugcugcccuucaacgacggggucuacuucgcgagcaccgagaaguccaacaucauccgcggcuggaucuucgggacgacccucgacagcaagacccagucccugcugaucgugaacaacgccaccaacguggucaucaaggugugcgaguuccaguucugcaacgaccccuuccucggcguguacuaccacaagaacaacaagagcuggauggaguccgaguuccgggucuacagcuccgccaacaacugcacguucgaguacgugagccagcccuuccugauggaccuggagggcaagcaggggaacuucaagaaccuccgcgaguucguguucaagaacaucgacggcuacuucaagaucuacuccaagcacaccccgaucaaccugguccgggaccugccccagggguucagcgcccucgagccccugguggaccugcccaucggcaucaacaucacccgcuuccagacccuccuggcccugcaccgguccuaccucacgccgggggacagcagcuccggcuggaccgcgggcgccgccgccuacuacgugggguaccugcagccccgcaccuuccugcucaaguacaacgagaacggcaccaucacggacgcggucgacugcgcccuggacccccugagcgagaccaagugcacccucaaguccuucaccguggagaaggggaucuaccagacgagcaacuuccgggugcagcccaccgaguccaucguccgcuucccgaacaucaccaaccugugccccuucggcgagguguucaacgccacccgguucgccagcgucuacgccuggaaccgcaagcggaucuccaacugcguggcggacuacagcgugcuguacaacuccgccagcuucuccacguucaagugcuacggcgucagccccaccaagcucaacgaccugugcuucaccaacguguacgccgacuccuucgugauccgcggggacgagguccggcagaucgcccccggccagaccgggaagaucgccgacuacaacuacaagcugccggacgacuucacgggcugcgugaucgcguggaacagcaacaaccucgacuccaaggucgggggcaacuacaacuaccuguaccgccuguuccgcaagagcaaccucaagcccuucgagcgggacaucuccaccgagaucuaccaggccggcagcacccccugcaacgggguggagggcuucaacugcuacuucccccugcaguccuacggguuccagccgaccaacggcgugggguaccagcccuaccggguggucgugcugagcuucgagcuccugcacgcccccgccacggugugcggccccaagaaguccaccaaccuggucaagaacaagugcgugaacuucaacuucaacggccucaccgggaccggcgugcugaccgagagcaacaagaaguuccugccguuccagcaguucgggcgcgacaucgccgacacgaccgacgcgguccgcgacccccagacccuggagauccucgacaucacccccugcagcuucggcgggguguccgugaucacgccgggcaccaacaccagcaaccaggucgccgugcuguaccagggcgugaacugcaccgagguccccguggccauccacgccgaccagcugacgcccaccuggcggguguacuccaccgggagcaacgucuuccagacccgcgccggcugccucaucggggcggagcacgugaacaacuccuacgagugcgacauccccaucggcgccggcaucugcgccagcuaccagacgcagaccaacuccccgcggcgcgcccggagcguggcgucccagagcgucaucgccuacaccaugucccugggggccgagaacagcguggccuacuccaacaacagcaucgccauccccaccaacuucacgaucuccgugaccaccgagauccugcccgucagcaugaccaagacgagcguggacugcaccauguacaucugcggcgacuccaccgagugcagcaaccuccugcugcaguacggguccuucugcacccagcucaaccgcgcgcugacgggcaucgccguggagcaggacaagaacacccaggaggucuucgcccaggugaagcagaucuacaagacgcccccgaucaaggacuucgggggcuucaacuucagccagauccugcccgaccccuccaagcccagcaagcgguccuucaucgaggaccuccuguucaacaaggugacccuggccgacgccggcuucaucaagcaguacggggacugccucggcgacaucgcggcccgcgaccugaucugcgcccagaaguucaacgggcugaccguccucccgccccugcugaccgacgagaugaucgcccaguacaccagcgcccuccuggcgggcaccaucacguccggguggaccuucggcgccggcgccgcccugcagauccccuucgcgaugcagauggccuaccgguucaacgggaucggcgugacccagaacgugcucuacgagaaccagaagcugaucgccaaccaguucaacagcgccaucgggaagauccaggacucccugagcuccaccgccagcgcgcucggcaagcugcaggacgucgugaaccagaacgcccaggcccugaacacgcucgugaagcagcuguccagcaacuucggggccaucuccagcguccugaacgacauccucucccgccuggacaagguggaggccgaggugcagaucgaccggcugaucaccggccgccuccagagccugcagaccuacgucacccagcagcugauccgggcggccgagauccgcgccagcgccaaccucgccgcgaccaagauguccgagugcgugcugggccagagcaagcggguggacuucugcgggaagggcuaccaccugauguccuucccccagagcgccccgcacggggucguguuccuccacgucacguacgugcccgcccaggagaagaacuucaccaccgcccccgcgaucugccacgacggcaaggcccacuucccccgcgaggggguguucgucuccaacggcacccacugguucgugacgcagcggaacuucuacgagccgcagaucaucaccaccgacaacaccuucgugagcggcaacugcgacgucgugaucgggaucgugaacaacacggucuacgacccccugcagcccgagcuggacuccuucaaggaggagcucgacaaguacuucaagaaccacaccagccccgacguggaccugggcgacaucuccgggaucaacgccagcguggucaacauccagaaggagaucgaccgccugaacgagguggccaagaaccucaacgagucccugaucgaccugcaggagcucggcaaguacgagcaguacaucaaguggccgugguacaucuggcugggcuucaucgccgggcugaucgcgaucgugauggucaccaucaugcucugcugcaugaccagcugcugcuccugccugaagggcugcugcagcugcggguccugcugcaaguucgacgaggacgacagcgagcccgugcugaagggcgugaagcuccacuacacgugauaauaggcuggagccucgguggccuagcuucuugccccuugggccuccccccagccccuccuccccuuccugcacccguacccccguggucuuugaauaaagucugagugggcggcaaaaaaaaaaaaaaaaaaaaaaaaaaaaaaaaaaaaaaaaaaaaaaaaaaaaaaaaaaaaaaaaaaaaaaaaaaaaaaaaaaaaaaaaaaaaaaaaaaaa

SEQ ID NO: 26076 - RNA, 4095 nt, Artificial Sequence
  SARS-CoV-2/Wuhan/WIV05/2019__EPI_ISL_402128 spike protein mRNA gc (1-1273)(D614G_M1229I)
gggaaauaagagagaaaagaagaguaagaagaaauauaagaccccggcgccgccaccauguucguguuccugguccuccugccccuggugagcucccagugcgugaaccucaccacccgcacgcagcugccgcccgccuacaccaacagcuucacccggggcgucuacuaccccgacaagguguuccgcuccagcgugcugcacuccacccaggaccucuuccugcccuucuucagcaacgucacgugguuccacgccauccacguguccgggaccaacggcaccaagcgguucgacaacccggugcugcccuucaacgacggggucuacuucgcgagcaccgagaaguccaacaucauccgcggcuggaucuucgggacgacccucgacagcaagacccagucccugcugaucgugaacaacgccaccaacguggucaucaaggugugcgaguuccaguucugcaacgaccccuuccucggcguguacuaccacaagaacaacaagagcuggauggaguccgaguuccgggucuacagcuccgccaacaacugcacguucgaguacgugagccagcccuuccugauggaccuggagggcaagcaggggaacuucaagaaccuccgcgaguucguguucaagaacaucgacggcuacuucaagaucuacuccaagcacaccccgaucaaccugguccgggaccugccccagggguucagcgcccucgagccccugguggaccugcccaucggcaucaacaucacccgcuuccagacccuccuggcccugcaccgguccuaccucacgccgggggacagcagcuccggcuggaccgcgggcgccgccgccuacuacgugggguaccugcagccccgcaccuuccugcucaaguacaacgagaacggcaccaucacggacgcggucgacugcgcccuggacccccugagcgagaccaagugcacccucaaguccuucaccguggagaaggggaucuaccagacgagcaacuuccgggugcagcccaccgaguccaucguccgcuucccgaacaucaccaaccugugccccuucggcgagguguucaacgccacccgguucgccagcgucuacgccuggaaccgcaagcggaucuccaacugcguggcggacuacagcgugcuguacaacuccgccagcuucuccacguucaagugcuacggcgucagccccaccaagcucaacgaccugugcuucaccaacguguacgccgacuccuucgugauccgcggggacgagguccggcagaucgcccccggccagaccgggaagaucgccgacuacaacuacaagcugccggacgacuucacgggcugcgugaucgcguggaacagcaacaaccucgacuccaaggucgggggcaacuacaacuaccuguaccgccuguuccgcaagagcaaccucaagcccuucgagcgggacaucuccaccgagaucuaccaggccggcagcacccccugcaacgggguggagggcuucaacugcuacuucccccugcaguccuacggguuccagccgaccaacggcgugggguaccagcccuaccggguggucgugcugagcuucgagcuccugcacgcccccgccacggugugcggccccaagaaguccaccaaccuggucaagaacaagugcgugaacuucaacuucaacggccucaccgggaccggcgugcugaccgagagcaacaagaaguuccugccguuccagcaguucgggcgcgacaucgccgacacgaccgacgcgguccgcgacccccagacccuggagauccucgacaucacccccugcagcuucggcgggguguccgugaucacgccgggcaccaacaccagcaaccaggucgccgugcuguaccagggcgugaacugcaccgagguccccguggccauccacgccgaccagcugacgcccaccuggcggguguacuccaccgggagcaacgucuuccagacccgcgccggcugccucaucggggcggagcacgugaacaacuccuacgagugcgacauccccaucggcgccggcaucugcgccagcuaccagacgcagaccaacuccccgcggcgcgcccggagcguggcgucccagagcaucaucgccuacaccaugucccugggggccgagaacagcgucgccuacuccaacaacagcaucgccauccccaccaacuucacgaucuccgugaccaccgagauccugcccgugagcaugaccaagacgagcgucgacugcaccauguacaucugcggcgacuccaccgagugcagcaaccuccugcugcaguacggguccuucugcacccagcucaaccgcgcgcugacgggcaucgccguggagcaggacaagaacacccaggagguguucgcccaggucaagcagaucuacaagacgcccccgaucaaggacuucgggggcuucaacuucagccagauccugcccgaccccuccaagcccagcaagcgguccuucaucgaggaccuccuguucaacaaggugacccuggccgacgccggcuucaucaagcaguacggggacugccucggcgacaucgcggcccgcgaccugaucugcgcccagaaguucaacgggcugaccgugcucccgccccugcugaccgacgagaugaucgcccaguacaccagcgcccuccuggcgggcaccaucacguccggguggaccuucggcgccggcgccgcccugcagauccccuucgcgaugcagauggccuaccgguucaacgggaucggcgucacccagaacgugcucuacgagaaccagaagcugaucgccaaccaguucaacagcgccaucgggaagauccaggacucccugagcuccaccgccagcgcgcucggcaagcugcaggacguggucaaccagaacgcccaggcccugaacacgcucgugaagcagcuguccagcaacuucggggccaucuccagcgugcugaacgacauccucucccgccuggacaaggucgaggccgaggugcagaucgaccggcugaucaccggccgccuccagagccugcagaccuacgugacccagcagcugauccgggcggccgagauccgcgccagcgccaaccucgccgcgaccaagauguccgagugcguccugggccagagcaagcggguggacuucugcgggaagggcuaccaccugauguccuucccccagagcgccccgcacgggguggucuuccuccacgugacguacguccccgcccaggagaagaacuucaccaccgcccccgcgaucugccacgacggcaaggcccacuucccccgcgaggggguguucguguccaacggcacccacugguucgucacgcagcggaacuucuacgagccgcagaucaucaccaccgacaacaccuucgugagcggcaacugcgacguggucaucgggaucgugaacaacacgguguacgacccccugcagcccgagcuggacuccuucaaggaggagcucgacaaguacuucaagaaccacaccagccccgacgucgaccugggcgacaucuccgggaucaacgccagcguggugaacauccagaaggagaucgaccgccugaacgaggucgccaagaaccucaacgagucccugaucgaccugcaggagcucggcaaguacgagcaguacaucaaguggccgugguacaucuggcugggcuucaucgccgggcugaucgcgaucgugaucgugaccaucaugcucugcugcaugaccagcugcugcuccugccugaagggcugcugcagcugcggguccugcugcaaguucgacgaggacgacagcgagcccguccugaagggcgugaagcuccacuacacgugauaauaggcuggagccucgguggccuagcuucuugccccuugggccuccccccagccccuccuccccuuccugcacccguacccccguggucuuugaauaaagucugagugggcggcaaaaaaaaaaaaaaaaaaaaaaaaaaaaaaaaaaaaaaaaaaaaaaaaaaaaaaaaaaaaaaaaaaaaaaaaaaaaaaaaaaaaaaaaaaaaaaaaaaaa

SEQ ID NO: 26077 - RNA, 4089 nt, Artificial Sequence
  SARS-CoV-2/Wuhan/WIV05/2019__EPI_ISL_402128 spike protein mRNA gc (1-1273)(H69del_V70del_A222V_Y453F_S477N_D614G_I692V)
gggaaauaagagagaaaagaagaguaagaagaaauauaagaccccggcgccgccaccauguucguguuccugguccuccugccccuggugagcucccagugcgugaaccucaccacccgcacgcagcugccgcccgccuacaccaacagcuucacccggggcgucuacuaccccgacaagguguuccgcuccagcgugcugcacuccacccaggaccucuuccugcccuucuucagcaacgucacgugguuccacgccaucuccgggaccaacggcaccaagcgguucgacaacccggugcugcccuucaacgacgggguguacuucgcgagcaccgagaaguccaacaucauccgcggcuggaucuucgggacgacccucgacagcaagacccagucccugcugaucgucaacaacgccaccaacguggugaucaaggucugcgaguuccaguucugcaacgaccccuuccucggcguguacuaccacaagaacaacaagagcuggauggaguccgaguuccggguguacagcuccgccaacaacugcacguucgaguacgucagccagcccuuccugauggaccuggagggcaagcaggggaacuucaagaaccuccgcgaguucguguucaagaacaucgacggcuacuucaagaucuacuccaagcacaccccgaucaaccuggugcgggaccugccccagggguucagcguccucgagccccugguggaccugcccaucggcaucaacaucacccgcuuccagacccuccuggcccugcaccgguccuaccucacgccgggggacagcagcuccggcuggaccgccggcgcggccgccuacuacgugggguaccugcagccccgcaccuuccugcucaaguacaacgagaacggcaccaucacggacgccgucgacugcgcgcuggacccccugagcgagaccaagugcacccucaaguccuucaccguggagaaggggaucuaccagacgagcaacuuccgggugcagcccaccgaguccaucguccgcuucccgaacaucaccaaccugugccccuucggcgagguguucaacgccacccgguucgccagcgucuacgccuggaaccgcaagcggaucuccaacugcguggccgacuacagcgugcuguacaacuccgcgagcuucuccacguucaagugcuacggcgucagccccaccaagcucaacgaccugugcuucaccaacguguacgccgacuccuucgugauccgcggggacgagguccggcagaucgcccccggccagaccgggaagaucgccgacuacaacuacaagcugccggacgacuucacgggcugcgugaucgccuggaacagcaacaaccucgacuccaaggucgggggcaacuacaacuaccuguuccgccuguuccgcaagagcaaccucaagcccuucgagcgggacaucuccaccgagaucuaccaggcgggcaacacccccugcaacgggguggagggcuucaacugcuacuucccccugcagagcuacggguuccagccgaccaacggcgugggguaccagcccuaccggguggucgugcuguccuucgagcuccugcacgcccccgccacggugugcggccccaagaaguccaccaaccuggucaagaacaagugcgugaacuucaacuucaacggccucaccgggaccggcgugcugaccgagagcaacaagaaguuccugccguuccagcaguucgggcgcgacaucgccgacacgaccgacgccguccgcgacccccagacccuggagauccucgacaucacccccugcagcuucggcggggugagcgugaucacgccgggcaccaacaccuccaaccaggucgcggugcuguaccagggcgugaacugcaccgagguccccguggccauccacgccgaccagcugacgcccaccuggcggguguacagcaccggguccaacgucuuccagacccgcgccggcugccucaucggggccgagcacgugaacaacagcuacgagugcgacauccccaucggcgcgggcaucugcgccuccuaccagacgcagaccaacagcccgcggcgcgcccgguccguggccagccaguccgucaucgcguacaccaugagccugggggccgagaacuccguggccuacagcaacaacuccaucgccauccccaccaacuucacgaucagcgugaccaccgagauccugcccgucuccaugaccaagacgagcguggacugcaccauguacaucugcggcgacagcaccgagugcuccaaccuccugcugcaguacgggagcuucugcacccagcucaaccgcgcccugacgggcaucgcgguggagcaggacaagaacacccaggaggucuucgcccaggugaagcagaucuacaagacgcccccgaucaaggacuucgggggcuucaacuucucccagauccugcccgaccccagcaagcccuccaagcggagcuucaucgaggaccuccuguucaacaaggugacccuggccgacgccggcuucaucaagcaguacggggacugccucggcgacaucgccgcgcgcgaccugaucugcgcccagaaguucaacgggcugaccguccucccgccccugcugaccgacgagaugaucgcccaguacaccuccgcccuccuggccggcaccaucacgagcggguggaccuucggcgcgggcgccgcccugcagauccccuucgccaugcagauggcguaccgguucaacgggaucggcgugacccagaacgugcucuacgagaaccagaagcugaucgccaaccaguucaacuccgccaucgggaagauccaggacagccuguccagcaccgccuccgcccucggcaagcugcaggacgucgugaaccagaacgcgcaggcccugaacacgcucgugaagcagcugagcuccaacuucggggccaucagcuccguccugaacgacauccucagccgccuggacaagguggaggccgaggugcagaucgaccggcugaucaccggccgccuccagucccugcagaccuacgucacccagcagcugauccgggccgcggagauccgcgccagcgccaaccucgccgccaccaagaugagcgagugcgugcugggccaguccaagcggguggacuucugcgggaagggcuaccaccugaugagcuucccccaguccgcgccgcacggggucguguuccuccacgucacguacgugcccgcccaggagaagaacuucaccaccgcccccgccaucugccacgacggcaaggcgcacuucccccgcgaggggguguucgucagcaacggcacccacugguucgugacgcagcggaacuucuacgagccgcagaucaucaccaccgacaacaccuucguguccggcaacugcgacgucgugaucgggaucgugaacaacacggucuacgacccccugcagcccgagcuggacagcuucaaggaggagcucgacaaguacuucaagaaccacaccucccccgacguggaccugggcgacaucagcgggaucaacgccuccguggucaacauccagaaggagaucgaccgccugaacgagguggccaagaaccucaacgagagccugaucgaccugcaggagcucggcaaguacgagcaguacaucaaguggccgugguacaucuggcugggcuucaucgccgggcugaucgccaucgugauggucaccaucaugcucugcugcaugaccuccugcugcagcugccugaagggcugcugcuccugcgggagcugcugcaaguucgacgaggacgacuccgagcccgugcugaagggcgugaagcuccacuacacgugauaauaggcuggagccucgguggccuagcuucuugccccuugggccuccccccagccccuccuccccuuccugcacccguacccccguggucuuugaauaaagucugagugggcggcaaaaaaaaaaaaaaaaaaaaaaaaaaaaaaaaaaaaaaaaaaaaaaaaaaaaaaaaaaaaaaaaaaaaaaaaaaaaaaaaaaaaaaaaaaaaaaaaaaaa

SEQ ID NO: 26078 - RNA, 4089 nt, Artificial Sequence
  SARS-CoV-2/Wuhan/WIV05/2019__EPI_ISL_402128 spike protein mRNA gc (1-1273)(H69del_V70del_Y453F_D614G_I692V_M1229I)
gggaaauaagagagaaaagaagaguaagaagaaauauaagaccccggcgccgccaccauguucguguuccugguccuccugccccuggugagcucccagugcgugaaccucaccacccgcacgcagcugccgcccgccuacaccaacagcuucacccggggcgucuacuaccccgacaagguguuccgcuccagcgugcugcacuccacccaggaccucuuccugcccuucuucagcaacgucacgugguuccacgccaucuccgggaccaacggcaccaagcgguucgacaacccggugcugcccuucaacgacgggguguacuucgcgagcaccgagaaguccaacaucauccgcggcuggaucuucgggacgacccucgacagcaagacccagucccugcugaucgucaacaacgccaccaacguggugaucaaggucugcgaguuccaguucugcaacgaccccuuccucggcguguacuaccacaagaacaacaagagcuggauggaguccgaguuccggguguacagcuccgccaacaacugcacguucgaguacgucagccagcccuuccugauggaccuggagggcaagcaggggaacuucaagaaccuccgcgaguucguguucaagaacaucgacggcuacuucaagaucuacuccaagcacaccccgaucaaccuggugcgggaccugccccagggguucagcgcccucgagccccuggucgaccugcccaucggcaucaacaucacccgcuuccagacccuccuggcccugcaccgguccuaccucacgccgggggacagcagcuccggcuggaccgcgggcgccgccgccuacuacgugggguaccugcagccccgcaccuuccugcucaaguacaacgagaacggcaccaucacggacgcgguggacugcgcccuggacccccugagcgagaccaagugcacccucaaguccuucaccgucgagaaggggaucuaccagacgagcaacuuccgggugcagcccaccgaguccaucgugcgcuucccgaacaucaccaaccugugccccuucggcgaggucuucaacgccacccgguucgccagcguguacgccuggaaccgcaagcggaucuccaacugcgucgcggacuacagcgugcuguacaacuccgccagcuucuccacguucaagugcuacggcgugagccccaccaagcucaacgaccugugcuucaccaacgucuacgccgacuccuucgugauccgcggggacgaggugcggcagaucgcccccggccagaccgggaagaucgccgacuacaacuacaagcugccggacgacuucacgggcugcgucaucgcguggaacagcaacaaccucgacuccaaggucgggggcaacuacaacuaccuguuccgccuguuccgcaagagcaaccucaagcccuucgagcgggacaucuccaccgagaucuaccaggccggcagcacccccugcaacgggguggagggcuucaacugcuacuucccccugcaguccuacggguuccagccgaccaacggcgugggguaccagcccuaccggguggugguccugagcuucgagcuccugcacgcccccgccacggugugcggccccaagaaguccaccaaccuggugaagaacaagugcgucaacuucaacuucaacggccucaccgggaccggcgugcugaccgagagcaacaagaaguuccugccguuccagcaguucgggcgcgacaucgccgacacgaccgacgcggugcgcgacccccagacccuggagauccucgacaucacccccugcagcuucggcggggucuccgugaucacgccgggcaccaacaccagcaaccagguggccguccuguaccagggcgugaacugcaccgaggugcccgucgccauccacgccgaccagcugacgcccaccuggcggguguacuccaccgggagcaacguguuccagacccgcgccggcugccucaucggggcggagcacgucaacaacuccuacgagugcgacauccccaucggcgccggcaucugcgccagcuaccagacgcagaccaacuccccgcggcgcgcccggagcguggcgucccagagcgugaucgccuacaccaugucccugggggccgagaacagcgucgccuacuccaacaacagcaucgccauccccaccaacuucacgaucuccgugaccaccgagauccugcccgugagcaugaccaagacgagcgucgacugcaccauguacaucugcggcgacuccaccgagugcagcaaccuccugcugcaguacggguccuucugcacccagcucaaccgcgcgcugacgggcaucgccguggagcaggacaagaacacccaggagguguucgcccaggucaagcagaucuacaagacgcccccgaucaaggacuucgggggcuucaacuucagccagauccugcccgaccccuccaagcccagcaagcgguccuucaucgaggaccuccuguucaacaaggugacccuggccgacgccggcuucaucaagcaguacggggacugccucggcgacaucgcggcccgcgaccugaucugcgcccagaaguucaacgggcugaccgugcucccgccccugcugaccgacgagaugaucgcccaguacaccagcgcccuccuggcgggcaccaucacguccggguggaccuucggcgccggcgccgcccugcagauccccuucgcgaugcagauggccuaccgguucaacgggaucggcgucacccagaacgugcucuacgagaaccagaagcugaucgccaaccaguucaacagcgccaucgggaagauccaggacucccugagcuccaccgccagcgcgcucggcaagcugcaggacguggucaaccagaacgcccaggcccugaacacgcucgugaagcagcuguccagcaacuucggggccaucuccagcgugcugaacgacauccucucccgccuggacaaggucgaggccgaggugcagaucgaccggcugaucaccggccgccuccagagccugcagaccuacgugacccagcagcugauccgggcggccgagauccgcgccagcgccaaccucgccgcgaccaagauguccgagugcguccugggccagagcaagcggguggacuucugcgggaagggcuaccaccugauguccuucccccagagcgccccgcacgggguggucuuccuccacgugacguacguccccgcccaggagaagaacuucaccaccgcccccgcgaucugccacgacggcaaggcccacuucccccgcgaggggguguucguguccaacggcacccacugguucgucacgcagcggaacuucuacgagccgcagaucaucaccaccgacaacaccuucgugagcggcaacugcgacguggucaucgggaucgugaacaacacgguguacgacccccugcagcccgagcuggacuccuucaaggaggagcucgacaaguacuucaagaaccacaccagccccgacgucgaccugggcgacaucuccgggaucaacgccagcguggugaacauccagaaggagaucgaccgccugaacgaggucgccaagaaccucaacgagucccugaucgaccugcaggagcucggcaaguacgagcaguacaucaaguggccgugguacaucuggcugggcuucaucgccgggcugaucgcgaucgugaucgugaccaucaugcucugcugcaugaccagcugcugcuccugccugaagggcugcugcagcugcggguccugcugcaaguucgacgaggacgacagcgagcccguccugaagggcgugaagcuccacuacacgugauaauaggcuggagccucgguggccuagcuucuugccccuugggccuccccccagccccuccuccccuuccugcacccguacccccguggucuuugaauaaagucugagugggcggcaaaaaaaaaaaaaaaaaaaaaaaaaaaaaaaaaaaaaaaaaaaaaaaaaaaaaaaaaaaaaaaaaaaaaaaaaaaaaaaaaaaaaaaaaaaaaaaaaaaa

SEQ ID NO: 26079 - RNA, 4086 nt, Artificial Sequence
  SARS-CoV-2/Wuhan/WIV05/2019__EPI_ISL_402128 spike protein mRNA gc (1-1273)(H69del_V70del_Y144del_N501Y_A570D_D614G_P681H_T716I_S982 A_D1118H)
gggaaauaagagagaaaagaagaguaagaagaaauauaagaccccggcgccgccaccauguucguguuccugguccuccugccccuggugagcucccagugcgugaaccucaccacccgcacgcagcugccgcccgccuacaccaacagcuucacccggggcgucuacuaccccgacaagguguuccgcuccagcgugcugcacuccacccaggaccucuuccugcccuucuucagcaacgucacgugguuccacgccaucuccgggaccaacggcaccaagcgguucgacaacccggugcugcccuucaacgacgggguguacuucgcgagcaccgagaaguccaacaucauccgcggcuggaucuucgggacgacccucgacagcaagacccagucccugcugaucgucaacaacgccaccaacguggugaucaaggucugcgaguuccaguucugcaacgaccccuuccucggcguguaccacaagaacaacaagagcuggauggaguccgaguuccggguguacagcuccgccaacaacugcacguucgaguacgucagccagcccuuccugauggaccuggagggcaagcaggggaacuucaagaaccuccgcgaguucguguucaagaacaucgacggcuacuucaagaucuacuccaagcacaccccgaucaaccuggugcgggaccugccccagggguucagcgcccucgagccccuggucgaccugcccaucggcaucaacaucacccgcuuccagacccuccuggcccugcaccgguccuaccucacgccgggggacagcagcuccggcuggaccgcgggcgccgccgccuacuacgugggguaccugcagccccgcaccuuccugcucaaguacaacgagaacggcaccaucacggacgcgguggacugcgcccuggacccccugagcgagaccaagugcacccucaaguccuucaccgucgagaaggggaucuaccagacgagcaacuuccgggugcagcccaccgaguccaucgugcgcuucccgaacaucaccaaccugugccccuucggcgaggucuucaacgccacccgguucgccagcguguacgccuggaaccgcaagcggaucuccaacugcgucgcggacuacagcgugcuguacaacuccgccagcuucuccacguucaagugcuacggcgugagccccaccaagcucaacgaccugugcuucaccaacgucuacgccgacuccuucgugauccgcggggacgaggugcggcagaucgcccccggccagaccgggaagaucgccgacuacaacuacaagcugccggacgacuucacgggcugcgucaucgcguggaacagcaacaaccucgacuccaaggucgggggcaacuacaacuaccuguaccgccuguuccgcaagagcaaccucaagcccuucgagcgggacaucuccaccgagaucuaccaggccggcagcacccccugcaacgggguggagggcuucaacugcuacuucccccugcaguccuacggguuccagccgaccuacggcgugggguaccagcccuaccggguggugguccugagcuucgagcuccugcacgcccccgccacggugugcggccccaagaaguccaccaaccuggugaagaacaagugcgucaacuucaacuucaacggccucaccgggaccggcgugcugaccgagagcaacaagaaguuccugccguuccagcaguucgggcgcgacaucgacgacacgaccgacgccgugcgcgacccccagacccuggagauccucgacaucacccccugcagcuucggcggggucuccgugaucacgccgggcaccaacaccagcaaccagguggcgguccuguaccagggcgugaacugcaccgaggugcccgucgccauccacgccgaccagcugacgcccaccuggcggguguacuccaccgggagcaacguguuccagacccgcgccggcugccucaucggggccgagcacgucaacaacuccuacgagugcgacauccccaucggcgcgggcaucugcgccagcuaccagacgcagaccaacucccaccggcgcgcccggagcguggccucccagagcaucaucgcguacaccaugucccugggggccgagaacagcguggccuacuccaacaacagcaucgccaucccgaucaacuucaccaucuccgucacgaccgagauccugcccgugagcaugaccaagaccagcguggacugcacgauguacaucugcggcgacuccaccgagugcagcaaccuccugcugcaguacggguccuucugcacccagcucaaccgcgcccugaccggcaucgcggucgagcaggacaagaacacgcaggagguguucgcccaggugaagcagaucuacaagaccccgcccaucaaggacuucgggggcuucaacuucagccagauccugcccgaccccuccaagcccagcaagcgguccuucaucgaggaccuccuguucaacaaggucacccuggccgacgccggcuucaucaagcaguacggggacugccucggcgacaucgccgcgcgcgaccugaucugcgcccagaaguucaacgggcugaccgugcugcccccgcuccugacggacgagaugaucgcccaguacaccagcgcccuccuggccggcaccaucaccuccggguggacguucggcgcgggcgccgcccugcagauccccuucgccaugcagauggcguaccgguucaacgggaucggcgugacccagaacguccucuacgagaaccagaagcugaucgccaaccaguucaacagcgccaucgggaagauccaggacucccugagcuccaccgccagcgcccucggcaagcugcaggacguggugaaccagaacgcgcaggcccugaacacccucgucaagcagcuguccagcaacuucggggccaucuccagcgugcugaacgacauccucgcccgccuggacaagguggaggccgagguccagaucgaccggcugaucacgggccgccuccagucccugcagaccuacgugacccagcagcugauccgggcggccgagauccgcgccagcgccaaccucgccgcgaccaagaugagcgagugcgugcugggccaguccaagcgggucgacuucugcgggaagggcuaccaccugaugagcuucccccaguccgcgccccacggggugguguuccuccacgucaccuacgugccggcccaggagaagaacuucacgaccgcccccgccaucugccacgacggcaaggcccacuucccccgcgagggggucuucgugagcaacggcacccacugguucgugacccagcggaacuucuacgagccccagaucaucacgacccacaacaccuucgucuccggcaacugcgacguggugaucgggaucgucaacaacaccguguacgacccgcugcagcccgagcuggacagcuucaaggaggagcucgacaaguacuucaagaaccacacgucccccgacguggaccugggcgacaucagcgggaucaacgccuccgucgugaacauccagaaggagaucgaccgccugaacgagguggccaagaaccucaacgagagccugaucgaccugcaggagcucggcaaguacgagcaguacaucaaguggcccugguacaucuggcugggcuucaucgccgggcugaucgcgaucgucauggugaccaucaugcucugcugcaugaccuccugcugcagcugccugaagggcugcugcuccugcgggagcugcugcaaguucgacgaggacgacuccgagccggugcugaagggcgucaagcuccacuacaccugauaauaggcuggagccucgguggccuagcuucuugccccuugggccuccccccagccccuccuccccuuccugcacccguacccccguggucuuugaauaaagucugagugggcggcaaaaaaaaaaaaaaaaaaaaaaaaaaaaaaaaaaaaaaaaaaaaaaaaaaaaaaaaaaaaaaaaaaaaaaaaaaaaaaaaaaaaaaaaaaaaaaaaaaaa

SEQ ID NO: 26080 - RNA, 4095 nt, Artificial Sequence
  SARS-CoV-2/Wuhan/WIV05/2019__EPI_ISL_402128 spike protein mRNA gc (1-1273)(K417N_E484K_N501Y_D614G)
gggaaauaagagagaaaagaagaguaagaagaaauauaagaccccggcgccgccaccauguucguguuccugguccuccugccccuggugagcucccagugcgugaaccucaccacccgcacgcagcugccgcccgccuacaccaacagcuucacccggggcgucuacuaccccgacaagguguuccgcuccagcgugcugcacuccacccaggaccucuuccugcccuucuucagcaacgucacgugguuccacgccauccacguguccgggaccaacggcaccaagcgguucgacaacccggugcugcccuucaacgacggggucuacuucgcgagcaccgagaaguccaacaucauccgcggcuggaucuucgggacgacccucgacagcaagacccagucccugcugaucgugaacaacgccaccaacguggucaucaaggugugcgaguuccaguucugcaacgaccccuuccucggcguguacuaccacaagaacaacaagagcuggauggaguccgaguuccgggucuacagcuccgccaacaacugcacguucgaguacgugagccagcccuuccugauggaccuggagggcaagcaggggaacuucaagaaccuccgcgaguucguguucaagaacaucgacggcuacuucaagaucuacuccaagcacaccccgaucaaccugguccgggaccugccccagggguucagcgcccucgagccccugguggaccugcccaucggcaucaacaucacccgcuuccagacccuccuggcccugcaccgguccuaccucacgccgggggacagcagcuccggcuggaccgcgggcgccgccgccuacuacgugggguaccugcagccccgcaccuuccugcucaaguacaacgagaacggcaccaucacggacgcggucgacugcgcccuggacccccugagcgagaccaagugcacccucaaguccuucaccguggagaaggggaucuaccagacgagcaacuuccgggugcagcccaccgaguccaucguccgcuucccgaacaucaccaaccugugccccuucggcgagguguucaacgccacccgguucgccagcgucuacgccuggaaccgcaagcggaucuccaacugcguggcggacuacagcgugcuguacaacuccgccagcuucuccacguucaagugcuacggcgucagccccaccaagcucaacgaccugugcuucaccaacguguacgccgacuccuucgugauccgcggggacgagguccggcagaucgcccccggccagaccgggaacaucgccgacuacaacuacaagcugccggacgacuucacgggcugcgugaucgcguggaacagcaacaaccucgacuccaaggucgggggcaacuacaacuaccuguaccgccuguuccgcaagagcaaccucaagcccuucgagcgggacaucuccaccgagaucuaccaggccggcagcacccccugcaacggggugaagggcuucaacugcuacuucccccugcaguccuacggguuccagccgaccuacggcgugggguaccagcccuaccggguggucgugcugagcuucgagcuccugcacgcccccgccacggugugcggccccaagaaguccaccaaccuggucaagaacaagugcgugaacuucaacuucaacggccucaccgggaccggcgugcugaccgagagcaacaagaaguuccugccguuccagcaguucgggcgcgacaucgccgacacgaccgacgcgguccgcgacccccagacccuggagauccucgacaucacccccugcagcuucggcgggguguccgugaucacgccgggcaccaacaccagcaaccaggucgccgugcuguaccagggcgugaacugcaccgagguccccguggccauccacgccgaccagcugacgcccaccuggcggguguacuccaccgggagcaacgucuuccagacccgcgccggcugccucaucggggcggagcacgugaacaacuccuacgagugcgacauccccaucggcgccggcaucugcgccagcuaccagacgcagaccaacuccccgcggcgcgcccggagcguggcgucccagagcaucaucgccuacaccaugucccugggggccgagaacagcgucgccuacuccaacaacagcaucgccauccccaccaacuucacgaucuccgugaccaccgagauccugcccgugagcaugaccaagacgagcgucgacugcaccauguacaucugcggcgacuccaccgagugcagcaaccuccugcugcaguacggguccuucugcacccagcucaaccgcgcgcugacgggcaucgccguggagcaggacaagaacacccaggagguguucgcccaggucaagcagaucuacaagacgcccccgaucaaggacuucgggggcuucaacuucagccagauccugcccgaccccuccaagcccagcaagcgguccuucaucgaggaccuccuguucaacaaggugacccuggccgacgccggcuucaucaagcaguacggggacugccucggcgacaucgcggcccgcgaccugaucugcgcccagaaguucaacgggcugaccgugcucccgccccugcugaccgacgagaugaucgcccaguacaccagcgcccuccuggcgggcaccaucacguccggguggaccuucggcgccggcgccgcccugcagauccccuucgcgaugcagauggccuaccgguucaacgggaucggcgucacccagaacgugcucuacgagaaccagaagcugaucgccaaccaguucaacagcgccaucgggaagauccaggacucccugagcuccaccgccagcgcgcucggcaagcugcaggacguggucaaccagaacgcccaggcccugaacacgcucgugaagcagcuguccagcaacuucggggccaucuccagcgugcugaacgacauccucucccgccuggacaaggucgaggccgaggugcagaucgaccggcugaucaccggccgccuccagagccugcagaccuacgugacccagcagcugauccgggcggccgagauccgcgccagcgccaaccucgccgcgaccaagauguccgagugcguccugggccagagcaagcggguggacuucugcgggaagggcuaccaccugauguccuucccccagagcgccccgcacgggguggucuuccuccacgugacguacguccccgcccaggagaagaacuucaccaccgcccccgcgaucugccacgacggcaaggcccacuucccccgcgaggggguguucguguccaacggcacccacugguucgucacgcagcggaacuucuacgagccgcagaucaucaccaccgacaacaccuucgugagcggcaacugcgacguggucaucgggaucgugaacaacacgguguacgacccccugcagcccgagcuggacuccuucaaggaggagcucgacaaguacuucaagaaccacaccagccccgacgucgaccugggcgacaucuccgggaucaacgccagcguggugaacauccagaaggagaucgaccgccugaacgaggucgccaagaaccucaacgagucccugaucgaccugcaggagcucggcaaguacgagcaguacaucaaguggccgugguacaucuggcugggcuucaucgccgggcugaucgcgaucgugauggugaccaucaugcucugcugcaugaccagcugcugcuccugccugaagggcugcugcagcugcggguccugcugcaaguucgacgaggacgacagcgagcccguccugaagggcgugaagcuccacuacacgugauaauaggcuggagccucgguggccuagcuucuugccccuugggccuccccccagccccuccuccccuuccugcacccguacccccguggucuuugaauaaagucugagugggcggcaaaaaaaaaaaaaaaaaaaaaaaaaaaaaaaaaaaaaaaaaaaaaaaaaaaaaaaaaaaaaaaaaaaaaaaaaaaaaaaaaaaaaaaaaaaaaaaaaaaa

SEQ ID NO: 26081 - RNA, 4086 nt, Artificial Sequence
  SARS-CoV-2/Wuhan/WIV05/2019__EPI_ISL_402128 spike protein mRNA gc (1-1273)(L18F_D80A_D215G_L242del_A243del_L244del_R246I_K417N_E484 K_N501Y_D614G_A701V)
gggaaauaagagagaaaagaagaguaagaagaaauauaagaccccggcgccgccaccauguucguguuccugguccuccugccccuggugagcucccagugcgugaacuucaccacccgcacgcagcucccgcccgccuacaccaacagcuucacccggggcgucuacuaccccgacaagguguuccgcuccagcgugcugcacuccacccaggaccuguuccuccccuucuucagcaacgucacgugguuccacgccauccacguguccgggaccaacggcaccaagcgguucgcgaacccggugcugcccuucaacgacggggucuacuucgccagcaccgagaaguccaacaucauccgcggcuggaucuucgggacgacccuggacagcaagacccagucccuccugaucgugaacaacgccaccaacguggucaucaaggugugcgaguuccaguucugcaacgaccccuuccugggcguguacuaccacaagaacaacaagagcuggauggaguccgaguuccgggucuacagcuccgccaacaacugcacguucgaguacgugagccagcccuuccucauggaccuggagggcaagcaggggaacuucaagaaccugcgcgaguucguguucaagaacaucgacggcuacuucaagaucuacuccaagcacaccccgaucaaccucguccgggggcugccccagggcuucagcgcccuggagccccucguggaccugcccaucgggaucaacaucacccgcuuccagacccugcacaucuccuaccucacgccgggcgacagcagcuccggcuggaccgcgggggccgccgccuacuacgugggcuaccugcagccccggaccuuccugcucaaguacaacgagaacgggaccaucacggacgcggucgacugcgcccuggacccccugagcgagaccaagugcacccucaaguccuucaccguggagaagggcaucuaccagacgagcaacuuccgcgugcagcccaccgaguccaucguccgguucccgaacaucaccaaccugugccccuucggcgagguguucaacgccacccgcuucgccagcgucuacgccuggaaccggaagcgcaucuccaacugcguggcggacuacagcgugcuguacaacuccgccagcuucuccacguucaagugcuacggggucagccccaccaagcucaacgaccugugcuucaccaacguguacgccgacuccuucgugauccggggcgacgagguccgccagaucgcccccgggcagaccggcaacaucgccgacuacaacuacaagcugccggacgacuucacggggugcgugaucgcguggaacagcaacaaccucgacuccaaggugggcggcaacuacaacuaccuguaccggcuguuccgcaagagcaaccucaagcccuucgagcgggacaucuccaccgagaucuaccaggccgggagcacccccugcaacggcgucaagggguucaacugcuacuucccccugcaguccuacggcuuccagccgaccuacggggugggcuaccagcccuaccgcguggucgugcugagcuucgagcuccugcacgcccccgccacggugugcggccccaagaaguccaccaaccuggucaagaacaagugcgugaacuucaacuucaacgggcucaccggcaccggggugcugaccgagagcaacaagaaguuccugccguuccagcaguucggccgggacaucgccgacacgaccgacgcgguccgcgacccccagacccucgagauccuggacaucacccccugcagcuucgggggcguguccgugaucacgccgggcaccaacaccagcaaccaggucgccgugcuguaccagggggugaacugcaccgagguccccguggccauccacgccgaccagcugacgcccaccuggcgcguguacuccaccggcagcaacgucuuccagacccgggccgggugccucaucggcgcggagcacgugaacaacuccuacgagugcgacauccccaucggcgccgggaucugcgccagcuaccagacgcagaccaacuccccgcgccgggcccgcagcguggcgucccagagcaucaucgccuacaccaugucccugggcgucgagaacagcguggccuacuccaacaacagcaucgccauccccaccaacuucacgaucuccgugaccaccgagauccugcccgucagcaugaccaagacgagcguggacugcaccauguacaucugcggggacuccaccgagugcagcaaccuccugcugcaguacggcuccuucugcacccagcucaaccgggcccugacggggaucgcgguggagcaggacaagaacacccaggaggucuucgcccaggugaagcagaucuacaagacgcccccgaucaaggacuucggcggcuucaacuucagccagauccugcccgaccccuccaagcccagcaagcgcuccuucaucgaggaccuccuguucaacaaggugacccuggccgacgccggguucaucaagcaguacggcgacugccucggggacaucgccgcgcgggaccugaucugcgcccagaaguucaacggccugaccguccucccgccccugcugaccgacgagaugaucgcccaguacaccagcgcccuccuggccgggaccaucacguccggcuggaccuucggcgcgggggccgcccugcagauccccuucgccaugcagauggcguaccgcuucaacggcaucggggugacccagaacgugcucuacgagaaccagaagcugaucgccaaccaguucaacagcgccaucggcaagauccaggacucccugagcuccaccgccagcgcccucgggaagcugcaggacgucgugaaccagaacgcgcaggcccugaacacgcucgugaagcagcuguccagcaacuucggcgccaucuccagcguccugaacgacauccucucccggcuggacaagguggaggccgaggugcagaucgaccgccugaucaccggccggcuccagagccugcagaccuacgucacccagcagcugauccgcgccgcggagauccgggccagcgccaaccucgccgccaccaagauguccgagugcgugcuggggcagagcaagcgcguggacuucugcggcaagggguaccaccugauguccuucccccagagcgcgccgcacggcgucguguuccuccacgucacguacgugcccgcccaggagaagaacuucaccaccgcccccgccaucugccacgacgggaaggcgcacuucccccgggagggcguguucgucuccaacggcacccacugguucgugacgcagcgcaacuucuacgagccgcagaucaucaccaccgacaacaccuucgugagcgggaacugcgacgucgugaucggcaucgugaacaacacggucuacgacccccugcagcccgagcuggacuccuucaaggaggagcucgacaaguacuucaagaaccacaccagccccgacguggaccugggggacaucuccggcaucaacgccagcguggucaacauccagaaggagaucgaccggcugaacgagguggccaagaaccucaacgagucccugaucgaccugcaggagcucggcaaguacgagcaguacaucaaguggccgugguacaucuggcugggguucaucgccggccugaucgccaucgugauggucaccaucaugcucugcugcaugaccagcugcugcuccugccugaaggggugcugcagcugcggcuccugcugcaaguucgacgaggacgacagcgagcccgugcugaagggggugaagcuccacuacacgugauaauaggcuggagccucgguggccuagcuucuugccccuugggccuccccccagccccuccuccccuuccugcacccguacccccguggucuuugaauaaagucugagugggcggcaaaaaaaaaaaaaaaaaaaaaaaaaaaaaaaaaaaaaaaaaaaaaaaaaaaaaaaaaaaaaaaaaaaaaaaaaaaaaaaaaaaaaaaaaaaaaaaaaaaa

SEQ ID NO: 26082 - RNA, 4095 nt, Artificial Sequence
  SARS-CoV-2/Wuhan/WIV05/2019__EPI_ISL_402128 spike protein mRNA gc (1-1273)(E484K_D614G)
gggaaauaagagagaaaagaagaguaagaagaaauauaagaccccggcgccgccaccauguucguguuccugguccuccugccccuggugagcucccagugcgugaaccucaccacccgcacgcagcugccgcccgccuacaccaacagcuucacccggggcgucuacuaccccgacaagguguuccgcuccagcgugcugcacuccacccaggaccucuuccugcccuucuucagcaacgucacgugguuccacgccauccacguguccgggaccaacggcaccaagcgguucgacaacccggugcugcccuucaacgacggggucuacuucgcgagcaccgagaaguccaacaucauccgcggcuggaucuucgggacgacccucgacagcaagacccagucccugcugaucgugaacaacgccaccaacguggucaucaaggugugcgaguuccaguucugcaacgaccccuuccucggcguguacuaccacaagaacaacaagagcuggauggaguccgaguuccgggucuacagcuccgccaacaacugcacguucgaguacgugagccagcccuuccugauggaccuggagggcaagcaggggaacuucaagaaccuccgcgaguucguguucaagaacaucgacggcuacuucaagaucuacuccaagcacaccccgaucaaccugguccgggaccugccccagggguucagcgcccucgagccccugguggaccugcccaucggcaucaacaucacccgcuuccagacccuccuggcccugcaccgguccuaccucacgccgggggacagcagcuccggcuggaccgcgggcgccgccgccuacuacgugggguaccugcagccccgcaccuuccugcucaaguacaacgagaacggcaccaucacggacgcggucgacugcgcccuggacccccugagcgagaccaagugcacccucaaguccuucaccguggagaaggggaucuaccagacgagcaacuuccgggugcagcccaccgaguccaucguccgcuucccgaacaucaccaaccugugccccuucggcgagguguucaacgccacccgguucgccagcgucuacgccuggaaccgcaagcggaucuccaacugcguggcggacuacagcgugcuguacaacuccgccagcuucuccacguucaagugcuacggcgucagccccaccaagcucaacgaccugugcuucaccaacguguacgccgacuccuucgugauccgcggggacgagguccggcagaucgcccccggccagaccgggaagaucgccgacuacaacuacaagcugccggacgacuucacgggcugcgugaucgcguggaacagcaacaaccucgacuccaaggucgggggcaacuacaacuaccuguaccgccuguuccgcaagagcaaccucaagcccuucgagcgggacaucuccaccgagaucuaccaggccggcagcacccccugcaacggggugaagggcuucaacugcuacuucccccugcaguccuacggguuccagccgaccaacggcgugggguaccagcccuaccggguggucgugcugagcuucgagcuccugcacgcccccgccacggugugcggccccaagaaguccaccaaccuggucaagaacaagugcgugaacuucaacuucaacggccucaccgggaccggcgugcugaccgagagcaacaagaaguuccugccguuccagcaguucgggcgcgacaucgccgacacgaccgacgcgguccgcgacccccagacccuggagauccucgacaucacccccugcagcuucggcgggguguccgugaucacgccgggcaccaacaccagcaaccaggucgccgugcuguaccagggcgugaacugcaccgagguccccguggccauccacgccgaccagcugacgcccaccuggcggguguacuccaccgggagcaacgucuuccagacccgcgccggcugccucaucggggcggagcacgugaacaacuccuacgagugcgacauccccaucggcgccggcaucugcgccagcuaccagacgcagaccaacuccccgcggcgcgcccggagcguggcgucccagagcaucaucgccuacaccaugucccugggggccgagaacagcgucgccuacuccaacaacagcaucgccauccccaccaacuucacgaucuccgugaccaccgagauccugcccgugagcaugaccaagacgagcgucgacugcaccauguacaucugcggcgacuccaccgagugcagcaaccuccugcugcaguacggguccuucugcacccagcucaaccgcgcgcugacgggcaucgccguggagcaggacaagaacacccaggagguguucgcccaggucaagcagaucuacaagacgcccccgaucaaggacuucgggggcuucaacuucagccagauccugcccgaccccuccaagcccagcaagcgguccuucaucgaggaccuccuguucaacaaggugacccuggccgacgccggcuucaucaagcaguacggggacugccucggcgacaucgcggcccgcgaccugaucugcgcccagaaguucaacgggcugaccgugcucccgccccugcugaccgacgagaugaucgcccaguacaccagcgcccuccuggcgggcaccaucacguccggguggaccuucggcgccggcgccgcccugcagauccccuucgcgaugcagauggccuaccgguucaacgggaucggcgucacccagaacgugcucuacgagaaccagaagcugaucgccaaccaguucaacagcgccaucgggaagauccaggacucccugagcuccaccgccagcgcgcucggcaagcugcaggacguggucaaccagaacgcccaggcccugaacacgcucgugaagcagcuguccagcaacuucggggccaucuccagcgugcugaacgacauccucucccgccuggacaaggucgaggccgaggugcagaucgaccggcugaucaccggccgccuccagagccugcagaccuacgugacccagcagcugauccgggcggccgagauccgcgccagcgccaaccucgccgcgaccaagauguccgagugcguccugggccagagcaagcggguggacuucugcgggaagggcuaccaccugauguccuucccccagagcgccccgcacgggguggucuuccuccacgugacguacguccccgcccaggagaagaacuucaccaccgcccccgcgaucugccacgacggcaaggcccacuucccccgcgaggggguguucguguccaacggcacccacugguucgucacgcagcggaacuucuacgagccgcagaucaucaccaccgacaacaccuucgugagcggcaacugcgacguggucaucgggaucgugaacaacacgguguacgacccccugcagcccgagcuggacuccuucaaggaggagcucgacaaguacuucaagaaccacaccagccccgacgucgaccugggcgacaucuccgggaucaacgccagcguggugaacauccagaaggagaucgaccgccugaacgaggucgccaagaaccucaacgagucccugaucgaccugcaggagcucggcaaguacgagcaguacaucaaguggccgugguacaucuggcugggcuucaucgccgggcugaucgcgaucgugauggugaccaucaugcucugcugcaugaccagcugcugcuccugccugaagggcugcugcagcugcggguccugcugcaaguucgacgaggacgacagcgagcccguccugaagggcgugaagcuccacuacacgugauaauaggcuggagccucgguggccuagcuucuugccccuugggccuccccccagccccuccuccccuuccugcacccguacccccguggucuuugaauaaagucugagugggcggcaaaaaaaaaaaaaaaaaaaaaaaaaaaaaaaaaaaaaaaaaaaaaaaaaaaaaaaaaaaaaaaaaaaaaaaaaaaaaaaaaaaaaaaaaaaaaaaaaaaa

SEQ ID NO: 26083 - RNA, 4095 nt, Artificial Sequence
  SARS-CoV-2/Wuhan/WIV05/2019__EPI_ISL_402128 spike protein mRNA gc (1-1273)(L18F_T20N_P26S_D138Y_R190S_K417T_E484K_N501Y_D614G_H655Y _T1027I)
gggaaauaagagagaaaagaagaguaagaagaaauauaagaccccggcgccgccaccauguucguguuccugguccuccugccccuggugagcucccagugcgugaacuucaccaaccgcacccagcucccgagcgccuacacgaacuccuucacccggggcgucuacuaccccgacaagguguuccgcagcuccgugcugcacagcacccaggaccuguuccuccccuucuucuccaacgucaccugguuccacgccauccacgugagcgggacgaacggcaccaagcgguucgacaaccccgugcugccguucaacgacggggucuacuucgcguccaccgagaaguccaacaucauccgcggcuggaucuucgggaccacgcuggacuccaagacccagagccuccugaucgugaacaacgccaccaacguggucaucaaggugugcgaguuccaguucugcaacuaccccuuccugggcguguacuaccacaagaacaacaaguccuggauggagagcgaguuccgggucuacuccagcgccaacaacugcaccuucgaguacgugucccagcccuuccucauggaccuggagggcaagcaggggaacuucaagaaccugagcgaguucguguucaagaacaucgacggcuacuucaagaucuacuccaagcacacgcccaucaaccucguccgcgaccugccgcagggguucagcgcccuggagccccucguggaccugcccaucggcaucaacaucacccgguuccagacccugcucgcccugcaccgcagcuaccugacccccggggacuccagcuccggcuggacggcgggcgccgccgccuacuacgugggguaccuccagccgcggaccuuccugcugaaguacaacgagaacggcaccaucaccgacgcggucgacugcgcccucgacccccugagcgagacgaagugcacccugaaguccuucaccguggagaaggggaucuaccagaccagcaacuuccgcgugcagcccacggaguccaucguccgguuccccaacaucaccaaccucugcccguucggcgagguguucaacgccacccgcuucgccagcgucuacgccuggaaccggaagcgcaucuccaacugcguggcggacuacagcgugcuguacaacuccgccagcuucuccaccuucaagugcuacggcgucagccccacgaagcugaacgaccucugcuucaccaacguguacgccgacuccuucgugauccgcggggacgagguccggcagaucgcccccggccagaccgggaccaucgccgacuacaacuacaagcugcccgacgacuucacgggcugcgugaucgcguggaacagcaacaaccuggacuccaaggucgggggcaacuacaacuaccucuaccggcuguuccgcaagagcaaccugaagccguucgagcgggacaucuccaccgagaucuaccaggccggcagcacccccugcaacggggugaagggcuucaacugcuacuucccccuccagagcuacggguuccagcccaccuacggcgugggguaccagccguaccgcguggucgugcuguccuucgagcugcuccacgcccccgccacggugugcggccccaagaaguccaccaaccuggucaagaacaagugcgugaacuucaacuucaacggccugaccgggaccggcgugcucaccgagagcaacaagaaguuccugcccuuccagcaguucgggcgggacaucgccgacacgaccgacgcgguccgcgacccgcagacccuggagauccuggacaucacccccugcagcuucggcgggguguccgugaucacgcccggcaccaacaccagcaaccaggucgccgugcucuaccagggcgugaacugcaccgaggucccgguggccauccacgccgaccagcugacgcccaccuggcgcguguacuccaccgggagcaacgucuuccagacccgggccggcugccugaucggggcggaguacgugaacaacuccuacgagugcgacauccccaucggcgccggcaucugcgccagcuaccagacgcagaccaacagcccccgccgggcccgcagcguggcgucccagagcaucaucgccuacaccaugucccucggggccgagaacagcgucgccuacuccaacaacagcaucgccaucccgaccaacuucacgaucagcgugaccaccgagauccugcccguguccaugaccaagacgagcgucgacugcaccauguacaucugcggcgacuccaccgagugcagcaaccugcuccugcaguacggguccuucugcacccagcugaaccgggcgcucacgggcaucgccguggagcaggacaagaacacccaggagguguucgcccaggucaagcagaucuacaagaccccgcccaucaaggacuucgggggcuucaacuucagccagauccugcccgaccccuccaagcccagcaagcgcuccuucaucgaggaccuccuguucaacaaggugacccuggccgacgccggcuucaucaagcaguacggggacugccugggcgacaucgcggcccgggaccucaucugcgcccagaaguucaacgggcugacggugcugcccccgcuccugaccgacgagaugaucgcccaguacaccagcgcccugcucgcgggcaccaucacguccggguggaccuucggcgccggcgccgcccugcagauccccuucgcgaugcagauggccuaccgcuucaacgggaucggcgucacccagaacgugcuguacgagaaccagaagcucaucgccaaccaguucaacagcgccaucgggaagauccaggacucccugagcuccaccgccagcgcgcugggcaagcuccaggacguggucaaccagaacgcccaggcccugaacacgcuggugaagcagcucuccagcaacuucggggccaucuccagcgugcugaacgacauccugagccggcucgacaaggucgaggccgaggugcagaucgaccgccugaucaccggccggcugcagucccuccagaccuacgugacccagcagcugauccgcgcggccgagauccgggccagcgccaaccuggccgcgaucaagauguccgagugcguccucggccagagcaagcgcguggacuucugcgggaagggcuaccaccugauguccuucccccagagcgcgccccacgggguggucuuccugcacgugaccuacgucccggcccaggagaagaacuucacgaccgcccccgccaucugccacgacggcaaggcccacuucccccgggaggggguguucguguccaacggcacccacugguucgucacccagcgcaacuucuacgagccccagaucaucacgaccgacaacaccuucgugagcggcaacugcgacguggucaucgggaucgugaacaacaccguguacgacccgcuccagcccgagcuggacuccuucaaggaggagcuggacaaguacuucaagaaccacacgagccccgacgucgaccucggcgacaucuccgggaucaacgccagcguggugaacauccagaaggagaucgaccggcugaacgaggucgccaagaaccugaacgagucccucaucgaccugcaggagcugggcaaguacgagcaguacaucaaguggcccugguacaucuggcucggcuucaucgccgggcugaucgcgaucgugauggugaccaucaugcugugcugcaugaccagcugcugcuccugccucaagggcugcugcagcugcggguccugcugcaaguucgacgaggacgacagcgagccgguccugaagggcgugaagcugcacuacaccugauaauaggcuggagccucgguggccuagcuucuugccccuugggccuccccccagccccuccuccccuuccugcacccguacccccguggucuuugaauaaagucugagugggcggcaaaaaaaaaaaaaaaaaaaaaaaaaaaaaaaaaaaaaaaaaaaaaaaaaaaaaaaaaaaaaaaaaaaaaaaaaaaaaaaaaaaaaaaaaaaaaaaaaaaa

SEQ ID NO: 26084 - RNA, 4095 nt, Artificial Sequence
  SARS-CoV-2/Wuhan/WIV05/2019__EPI_ISL_402128 spike protein mRNA gc (1-1273)(S13I_W152C_L452R_D614G)
gggaaauaagagagaaaagaagaguaagaagaaauauaagaccccggcgccgccaccauguucguguuccugguccuccugccccuggugagcauccagugcgugaaccucaccacccgcacgcagcugccgcccgccuacaccaacuccuucacccggggcgucuacuaccccgacaagguguuccgcagcuccgugcugcacagcacccaggaccucuuccugcccuucuucuccaacgucacgugguuccacgccauccacgugagcgggaccaacggcaccaagcgguucgacaacccggugcugcccuucaacgacggggucuacuucgcguccaccgagaaguccaacaucauccgcggcuggaucuucgggacgacccucgacagcaagacccagagccugcugaucgugaacaacgccaccaacguggucaucaaggugugcgaguuccaguucugcaacgaccccuuccucggcguguacuaccacaagaacaacaaguccugcauggagagcgaguuccgggucuacuccagcgccaacaacugcacguucgaguacgugucccagcccuuccugauggaccuggagggcaagcaggggaacuucaagaaccuccgcgaguucguguucaagaacaucgacggcuacuucaagaucuacagcaagcacaccccgaucaaccugguccgggaccugccccagggguucuccgcccucgagccccugguggaccugcccaucggcaucaacaucacccgcuuccagacccuccuggcccugcaccggagcuaccucacgccgggggacuccagcagcggcuggaccgcgggcgccgccgccuacuacgugggguaccugcagccccgcaccuuccugcucaaguacaacgagaacggcaccaucacggacgcggucgacugcgcccuggacccccuguccgagaccaagugcacccucaagagcuucaccguggagaaggggaucuaccagacguccaacuuccgggugcagcccaccgagagcaucguccgcuucccgaacaucaccaaccugugccccuucggcgagguguucaacgccacccgguucgccuccgucuacgccuggaaccgcaagcggaucagcaacugcguggcggacuacuccgugcuguacaacagcgccuccuucagcacguucaagugcuacggcgucucccccaccaagcucaacgaccugugcuucaccaacguguacgccgacagcuucgugauccgcggggacgagguccggcagaucgcccccggccagaccgggaagaucgccgacuacaacuacaagcugccggacgacuucacgggcugcgugaucgcguggaacuccaacaaccucgacagcaaggucgggggcaacuacaacuaccgcuaccggcuguuccgcaaguccaaccugaagcccuucgagcgggacaucagcaccgagaucuaccaggccggcuccacccccugcaacgggguggagggcuucaacugcuacuucccccuccagagcuacggguuccagccgaccaacggcgugggguaccagcccuaccgcguggucgugcuguccuucgagcugcuccacgcccccgccacggugugcggccccaagaaguccaccaaccuggucaagaacaagugcgugaacuucaacuucaacggccugaccgggaccggcgugcucaccgagagcaacaagaaguuccugccguuccagcaguucgggcgcgacaucgccgacacgaccgacgcgguccgggacccccagacccuggagauccuggacaucacccccugcagcuucggcggggugagcgugaucacgccgggcaccaacaccuccaaccaggucgccgugcucuaccagggcgugaacugcaccgagguccccguggccauccacgccgaccagcugacgcccaccuggcgcguguacagcaccggguccaacgucuuccagacccgggccggcugccugaucggggcggagcacgugaacaacagcuacgagugcgacauccccaucggcgccggcaucugcgccuccuaccagacgcagaccaacagcccgcgccgggcccgcuccguggcgagccaguccaucaucgccuacaccaugagccucggggccgagaacuccgucgccuacagcaacaacuccaucgccauccccaccaacuucacgaucagcgugaccaccgagauccugcccguguccaugaccaagacgagcgucgacugcaccauguacaucugcggcgacagcaccgagugcuccaaccugcuccugcaguacgggagcuucugcacccagcugaaccgggcgcucacgggcaucgccguggagcaggacaagaacacccaggagguguucgcccaggucaagcagaucuacaagacgcccccgaucaaggacuucgggggcuucaacuucucccagauccugcccgaccccagcaagcccuccaagcgcagcuucaucgaggaccuccuguucaacaaggugacccuggccgacgccggcuucaucaagcaguacggggacugccugggcgacaucgcggcccgggaccucaucugcgcccagaaguucaacgggcugaccgugcugccgccccuccugaccgacgagaugaucgcccaguacaccuccgcccugcucgcgggcaccaucacgagcggguggaccuucggcgccggcgccgcccugcagauccccuucgcgaugcagauggccuaccgcuucaacgggaucggcgucacccagaacgugcuguacgagaaccagaagcucaucgccaaccaguucaacuccgccaucgggaagauccaggacagccuguccagcaccgccuccgcgcugggcaagcuccaggacguggucaaccagaacgcccaggcccugaacacgcuggugaagcagcucagcuccaacuucggggccaucagcuccgugcugaacgacauccugagccggcucgacaaggucgaggccgaggugcagaucgaccgccugaucaccggccggcugcagucccuccagaccuacgugacccagcagcugauccgcgcggccgagauccgggccagcgccaaccuggccgcgaccaagaugagcgagugcguccucggccaguccaagcgcguggacuucugcgggaagggcuaccaccugaugagcuucccccaguccgccccgcacgggguggucuuccugcacgugacguacguccccgcccaggagaagaacuucaccaccgcccccgcgaucugccacgacggcaaggcccacuucccccgggaggggguguucgugagcaacggcacccacugguucgucacgcagcgcaacuucuacgagccgcagaucaucaccaccgacaacaccuucguguccggcaacugcgacguggucaucgggaucgugaacaacacgguguacgacccccuccagcccgagcuggacagcuucaaggaggagcuggacaaguacuucaagaaccacaccucccccgacgucgaccucggcgacaucagcgggaucaacgccuccguggugaacauccagaaggagaucgaccggcugaacgaggucgccaagaaccugaacgagagccucaucgaccugcaggagcugggcaaguacgagcaguacaucaaguggccgugguacaucuggcucggcuucaucgccgggcugaucgcgaucgugauggugaccaucaugcugugcugcaugaccuccugcugcagcugccucaagggcugcugcuccugcgggagcugcugcaaguucgacgaggacgacuccgagcccguccugaagggcgugaagcugcacuacacgugauaauaggcuggagccucgguggccuagcuucuugccccuugggccuccccccagccccuccuccccuuccugcacccguacccccguggucuuugaauaaagucugagugggcggcaaaaaaaaaaaaaaaaaaaaaaaaaaaaaaaaaaaaaaaaaaaaaaaaaaaaaaaaaaaaaaaaaaaaaaaaaaaaaaaaaaaaaaaaaaaaaaaaaaaa

SEQ ID NO: 26085 - RNA, 4095 nt, Artificial Sequence
  SARS-CoV-2/Wuhan/WIV05/2019__EPI_ISL_402128 spike protein mRNA gc (1-1273)
gggaaauaagagagaaaagaagaguaagaagaaauauaagaccccggcgccgccaccauguucguguuccuggugcugcugccccuggugagcagccagugcgugaaccugaccacccggacccagcugccaccagccuacaccaacagcuucacccggggcgucuacuaccccgacaagguguuccggagcagcguccugcacagcacccaggaccuguuccugcccuucuucagcaacgugaccugguuccacgccauccacgugagcggcaccaacggcaccaagcgguucgacaaccccgugcugcccuucaacgacggcguguacuucgccagcaccgagaagagcaacaucauccggggcuggaucuucggcaccacccuggacagcaagacccagagccugcugaucgugaauaacgccaccaacguggugaucaaggugugcgaguuccaguucugcaacgaccccuuccugggcguguacuaccacaagaacaacaagagcuggauggagagcgaguuccggguguacagcagcgccaacaacugcaccuucgaguacgugagccagcccuuccugauggaccuggagggcaagcagggcaacuucaagaaccugcgggaguucguguucaagaacaucgacggcuacuucaagaucuacagcaagcacaccccaaucaaccuggugcgggaucugccccagggcuucucagcccuggagccccugguggaccugcccaucggcaucaacaucacccgguuccagacccugcuggcccugcaccggagcuaccugaccccaggcgacagcagcagcggguggacagcaggcgcggcugcuuacuacgugggcuaccugcagccccggaccuuccugcugaaguacaacgagaacggcaccaucaccgacgccguggacugcgcccuggacccucugagcgagaccaagugcacccugaagagcuucaccguggagaagggcaucuaccagaccagcaacuuccgggugcagcccaccgagagcaucgugcgguuccccaacaucaccaaccugugccccuucggcgagguguucaacgccacccgguucgccagcguguacgccuggaaccggaagcggaucagcaacugcguggccgacuacagcgugcuguacaacagcgccagcuucagcaccuucaagugcuacggcgugagccccaccaagcugaacgaccugugcuucaccaacguguacgccgacagcuucgugauccguggcgacgaggugcggcagaucgcacccggccagacaggcaagaucgccgacuacaacuacaagcugcccgacgacuucaccggcugcgugaucgccuggaacagcaacaaccucgacagcaaggugggcggcaacuacaacuaccuguaccggcuguuccggaagagcaaccugaagcccuucgagcgggacaucagcaccgagaucuaccaagccggcuccaccccuugcaacggcguggagggcuucaacugcuacuucccucugcagagcuacggcuuccagcccaccaacggcgugggcuaccagcccuaccgggugguggugcugagcuucgagcugcugcacgccccagccaccguguguggccccaagaagagcaccaaccuggugaagaacaagugcgugaacuucaacuucaacggccuuaccggcaccggcgugcugaccgagagcaacaagaaauuccugcccuuucagcaguucggccgggacaucgccgacaccaccgacgcugugcgggauccccagacccuggagauccuggacaucaccccuugcagcuucggcggcgugagcgugaucaccccaggcaccaacaccagcaaccagguggccgugcuguaccaggacgugaacugcaccgaggugcccguggccauccacgccgaccagcugacacccaccuggcgggucuacagcaccggcagcaacguguuccagacccgggccgguugccugaucggcgccgagcacgugaacaacagcuacgagugcgacauccccaucggcgccggcaucugugccagcuaccagacccagaccaauucaccccggagggcaaggagcguggccagccagagcaucaucgccuacaccaugagccugggcgccgagaacagcguggccuacagcaacaacagcaucgccauccccaccaacuucaccaucagcgugaccaccgagauucugcccgugagcaugaccaagaccagcguggacugcaccauguacaucugcggcgacagcaccgagugcagcaaccugcugcugcaguacggcagcuucugcacccagcugaaccgggcccugaccggcaucgccguggagcaggacaagaacacccaggagguguucgcccaggugaagcagaucuacaagaccccucccaucaaggacuucggcggcuucaacuucagccagauccugcccgaccccagcaagcccagcaagcggagcuucaucgaggaccugcuguucaacaaggugacccuagccgacgccggcuucaucaagcaguacggcgacugccucggcgacauagccgcccgggaccugaucugcgcccagaaguucaacggccugaccgugcugccuccccugcugaccgacgagaugaucgcccaguacaccagcgcccuguuagccggaaccaucaccagcggcuggacuuucggcgcuggagccgcucugcagauccccuucgccaugcagauggccuaccgguucaacggcaucggcgugacccagaacgugcuguacgagaaccagaagcugaucgccaaccaguucaacagcgccaucggcaagauccaggacagccugagcagcaccgcuagcgcccugggcaagcugcaggacguggugaaccagaacgcccaggcccugaacacccuggugaagcagcugagcagcaacuucggcgccaucagcagcgugcugaacgacauccugagccggcuggacaaggucgaggccgaggugcagaucgaccggcugaucacuggccggcugcagagccugcagaccuacgugacccagcagcugauccgggccgccgagauucgggccagcgccaaccuggccgccaccaagaugagcgagugcgugcugggccagagcaagcggguggacuucugcggcaagggcuaccaccugaugagcuuuccccagagcgcaccccacggagugguguuccugcacgugaccuacgugcccgcccaggagaagaacuucaccaccgccccagccaucugccacgacggcaaggcccacuuuccccgggagggcguguucgugagcaacggcacccacugguucgugacccagcggaacuucuacgagccccagaucaucaccaccgacaacaccuucgugagcggcaacugcgacguggugaucggcaucgugaacaacaccguguacgauccccugcagcccgagcuggacagcuucaaggaggagcuggacaaguacuucaagaaucacaccagccccgacguggaccugggcgacaucagcggcaucaacgccagcguggugaacauccagaaggagaucgaucggcugaacgagguggccaagaaccugaacgagagccugaucgaccugcaggagcugggcaaguacgagcaguacaucaaguggcccugguacaucuggcugggcuucaucgccggccugaucgccaucgugauggugaccaucaugcugugcugcaugaccagcugcugcagcugccugaagggcuguugcagcugcggcagcugcugcaaguucgacgaggacgacagcgagcccgugcugaagggcgugaagcugcacuacaccugauaauaggcuggagccucgguggccuagcuucuugccccuugggccuccccccagccccuccuccccuuccugcacccguacccccguggucuuugaauaaagucugagugggcggcaaaaaaaaaaaaaaaaaaaaaaaaaaaaaaaaaaaaaaaaaaaaaaaaaaaaaaaaaaaaaaaaaaaaaaaaaaaaaaaaaaaaaaaaaaaaaaaaaaaa

SEQ ID NO: 26086 - RNA, 4095 nt, Artificial Sequence
  SARS-CoV-2/Wuhan/WIV05/2019__EPI_ISL_402128 spike protein mRNA gc (1-1273)(D614G)
gggaaauaagagagaaaagaagaguaagaagaaauauaagaccccggcgccgccaccauguucguguuccuggugcugcugccccuggugagcagccagugcgugaaccugaccacccggacccagcugccaccagccuacaccaacagcuucacccggggcgucuacuaccccgacaagguguuccggagcagcguccugcacagcacccaggaccuguuccugcccuucuucagcaacgugaccugguuccacgccauccacgugagcggcaccaacggcaccaagcgguucgacaaccccgugcugcccuucaacgacggcguguacuucgccagcaccgagaagagcaacaucauccggggcuggaucuucggcaccacccuggacagcaagacccagagccugcugaucgugaauaacgccaccaacguggugaucaaggugugcgaguuccaguucugcaacgaccccuuccugggcguguacuaccacaagaacaacaagagcuggauggagagcgaguuccggguguacagcagcgccaacaacugcaccuucgaguacgugagccagcccuuccugauggaccuggagggcaagcagggcaacuucaagaaccugcgggaguucguguucaagaacaucgacggcuacuucaagaucuacagcaagcacaccccaaucaaccuggugcgggaucugccccagggcuucucagcccuggagccccugguggaccugcccaucggcaucaacaucacccgguuccagacccugcuggcccugcaccggagcuaccugaccccaggcgacagcagcagcggguggacagcaggcgcggcugcuuacuacgugggcuaccugcagccccggaccuuccugcugaaguacaacgagaacggcaccaucaccgacgccguggacugcgcccuggacccucugagcgagaccaagugcacccugaagagcuucaccguggagaagggcaucuaccagaccagcaacuuccgggugcagcccaccgagagcaucgugcgguuccccaacaucaccaaccugugccccuucggcgagguguucaacgccacccgguucgccagcguguacgccuggaaccggaagcggaucagcaacugcguggccgacuacagcgugcuguacaacagcgccagcuucagcaccuucaagugcuacggcgugagccccaccaagcugaacgaccugugcuucaccaacguguacgccgacagcuucgugauccguggcgacgaggugcggcagaucgcacccggccagacaggcaagaucgccgacuacaacuacaagcugcccgacgacuucaccggcugcgugaucgccuggaacagcaacaaccucgacagcaaggugggcggcaacuacaacuaccuguaccggcuguuccggaagagcaaccugaagcccuucgagcgggacaucagcaccgagaucuaccaagccggcuccaccccuugcaacggcguggagggcuucaacugcuacuucccucugcagagcuacggcuuccagcccaccaacggcgugggcuaccagcccuaccgggugguggugcugagcuucgagcugcugcacgccccagccaccguguguggccccaagaagagcaccaaccuggugaagaacaagugcgugaacuucaacuucaacggccuuaccggcaccggcgugcugaccgagagcaacaagaaauuccugcccuuucagcaguucggccgggacaucgccgacaccaccgacgcugugcgggauccccagacccuggagauccuggacaucaccccuugcagcuucggcggcgugagcgugaucaccccaggcaccaacaccagcaaccagguggccgugcuguaccagggcgugaacugcaccgaggugcccguggccauccacgccgaccagcugacacccaccuggcgggucuacagcaccggcagcaacguguuccagacccgggccgguugccugaucggcgccgagcacgugaacaacagcuacgagugcgacauccccaucggcgccggcaucugugccagcuaccagacccagaccaauucaccccggagggcaaggagcguggccagccagagcaucaucgccuacaccaugagccugggcgccgagaacagcguggccuacagcaacaacagcaucgccauccccaccaacuucaccaucagcgugaccaccgagauucugcccgugagcaugaccaagaccagcguggacugcaccauguacaucugcggcgacagcaccgagugcagcaaccugcugcugcaguacggcagcuucugcacccagcugaaccgggcccugaccggcaucgccguggagcaggacaagaacacccaggagguguucgcccaggugaagcagaucuacaagaccccucccaucaaggacuucggcggcuucaacuucagccagauccugcccgaccccagcaagcccagcaagcggagcuucaucgaggaccugcuguucaacaaggugacccuagccgacgccggcuucaucaagcaguacggcgacugccucggcgacauagccgcccgggaccugaucugcgcccagaaguucaacggccugaccgugcugccuccccugcugaccgacgagaugaucgcccaguacaccagcgcccuguuagccggaaccaucaccagcggcuggacuuucggcgcuggagccgcucugcagauccccuucgccaugcagauggccuaccgguucaacggcaucggcgugacccagaacgugcuguacgagaaccagaagcugaucgccaaccaguucaacagcgccaucggcaagauccaggacagccugagcagcaccgcuagcgcccugggcaagcugcaggacguggugaaccagaacgcccaggcccugaacacccuggugaagcagcugagcagcaacuucggcgccaucagcagcgugcugaacgacauccugagccggcuggacaaggucgaggccgaggugcagaucgaccggcugaucacuggccggcugcagagccugcagaccuacgugacccagcagcugauccgggccgccgagauucgggccagcgccaaccuggccgccaccaagaugagcgagugcgugcugggccagagcaagcggguggacuucugcggcaagggcuaccaccugaugagcuuuccccagagcgcaccccacggagugguguuccugcacgugaccuacgugcccgcccaggagaagaacuucaccaccgccccagccaucugccacgacggcaaggcccacuuuccccgggagggcguguucgugagcaacggcacccacugguucgugacccagcggaacuucuacgagccccagaucaucaccaccgacaacaccuucgugagcggcaacugcgacguggugaucggcaucgugaacaacaccguguacgauccccugcagcccgagcuggacagcuucaaggaggagcuggacaaguacuucaagaaucacaccagccccgacguggaccugggcgacaucagcggcaucaacgccagcguggugaacauccagaaggagaucgaucggcugaacgagguggccaagaaccugaacgagagccugaucgaccugcaggagcugggcaaguacgagcaguacaucaaguggcccugguacaucuggcugggcuucaucgccggccugaucgccaucgugauggugaccaucaugcugugcugcaugaccagcugcugcagcugccugaagggcuguugcagcugcggcagcugcugcaaguucgacgaggacgacagcgagcccgugcugaagggcgugaagcugcacuacaccugauaauaggcuggagccucgguggccuagcuucuugccccuugggccuccccccagccccuccuccccuuccugcacccguacccccguggucuuugaauaaagucugagugggcggcaaaaaaaaaaaaaaaaaaaaaaaaaaaaaaaaaaaaaaaaaaaaaaaaaaaaaaaaaaaaaaaaaaaaaaaaaaaaaaaaaaaaaaaaaaaaaaaaaaaa

SEQ ID NO: 26087 - RNA, 4095 nt, Artificial Sequence
  SARS-CoV-2/Wuhan/WIV05/2019__EPI_ISL_402128 spike protein mRNA gc (1-1273)(A222V_D614G)
gggaaauaagagagaaaagaagaguaagaagaaauauaagaccccggcgccgccaccauguucguguuccuggugcugcugccccuggugagcagccagugcgugaaccugaccacccggacccagcugccaccagccuacaccaacagcuucacccggggcgucuacuaccccgacaagguguuccggagcagcguccugcacagcacccaggaccuguuccugcccuucuucagcaacgugaccugguuccacgccauccacgugagcggcaccaacggcaccaagcgguucgacaaccccgugcugcccuucaacgacggcguguacuucgccagcaccgagaagagcaacaucauccggggcuggaucuucggcaccacccuggacagcaagacccagagccugcugaucgugaauaacgccaccaacguggugaucaaggugugcgaguuccaguucugcaacgaccccuuccugggcguguacuaccacaagaacaacaagagcuggauggagagcgaguuccggguguacagcagcgccaacaacugcaccuucgaguacgugagccagcccuuccugauggaccuggagggcaagcagggcaacuucaagaaccugcgggaguucguguucaagaacaucgacggcuacuucaagaucuacagcaagcacaccccaaucaaccuggugcgggaucugccccagggcuucucagugcuggagccccugguggaccugcccaucggcaucaacaucacccgguuccagacccugcuggcccugcaccggagcuaccugaccccaggcgacagcagcagcggguggacagcaggcgcggcugcuuacuacgugggcuaccugcagccccggaccuuccugcugaaguacaacgagaacggcaccaucaccgacgccguggacugcgcccuggacccucugagcgagaccaagugcacccugaagagcuucaccguggagaagggcaucuaccagaccagcaacuuccgggugcagcccaccgagagcaucgugcgguuccccaacaucaccaaccugugccccuucggcgagguguucaacgccacccgguucgccagcguguacgccuggaaccggaagcggaucagcaacugcguggccgacuacagcgugcuguacaacagcgccagcuucagcaccuucaagugcuacggcgugagccccaccaagcugaacgaccugugcuucaccaacguguacgccgacagcuucgugauccguggcgacgaggugcggcagaucgcacccggccagacaggcaagaucgccgacuacaacuacaagcugcccgacgacuucaccggcugcgugaucgccuggaacagcaacaaccucgacagcaaggugggcggcaacuacaacuaccuguaccggcuguuccggaagagcaaccugaagcccuucgagcgggacaucagcaccgagaucuaccaagccggcuccaccccuugcaacggcguggagggcuucaacugcuacuucccucugcagagcuacggcuuccagcccaccaacggcgugggcuaccagcccuaccgggugguggugcugagcuucgagcugcugcacgccccagccaccguguguggccccaagaagagcaccaaccuggugaagaacaagugcgugaacuucaacuucaacggccuuaccggcaccggcgugcugaccgagagcaacaagaaauuccugcccuuucagcaguucggccgggacaucgccgacaccaccgacgcugugcgggauccccagacccuggagauccuggacaucaccccuugcagcuucggcggcgugagcgugaucaccccaggcaccaacaccagcaaccagguggccgugcuguaccagggcgugaacugcaccgaggugcccguggccauccacgccgaccagcugacacccaccuggcgggucuacagcaccggcagcaacguguuccagacccgggccgguugccugaucggcgccgagcacgugaacaacagcuacgagugcgacauccccaucggcgccggcaucugugccagcuaccagacccagaccaauucaccccggagggcaaggagcguggccagccagagcaucaucgccuacaccaugagccugggcgccgagaacagcguggccuacagcaacaacagcaucgccauccccaccaacuucaccaucagcgugaccaccgagauucugcccgugagcaugaccaagaccagcguggacugcaccauguacaucugcggcgacagcaccgagugcagcaaccugcugcugcaguacggcagcuucugcacccagcugaaccgggcccugaccggcaucgccguggagcaggacaagaacacccaggagguguucgcccaggugaagcagaucuacaagaccccucccaucaaggacuucggcggcuucaacuucagccagauccugcccgaccccagcaagcccagcaagcggagcuucaucgaggaccugcuguucaacaaggugacccuagccgacgccggcuucaucaagcaguacggcgacugccucggcgacauagccgcccgggaccugaucugcgcccagaaguucaacggccugaccgugcugccuccccugcugaccgacgagaugaucgcccaguacaccagcgcccuguuagccggaaccaucaccagcggcuggacuuucggcgcuggagccgcucugcagauccccuucgccaugcagauggccuaccgguucaacggcaucggcgugacccagaacgugcuguacgagaaccagaagcugaucgccaaccaguucaacagcgccaucggcaagauccaggacagccugagcagcaccgcuagcgcccugggcaagcugcaggacguggugaaccagaacgcccaggcccugaacacccuggugaagcagcugagcagcaacuucggcgccaucagcagcgugcugaacgacauccugagccggcuggacaaggucgaggccgaggugcagaucgaccggcugaucacuggccggcugcagagccugcagaccuacgugacccagcagcugauccgggccgccgagauucgggccagcgccaaccuggccgccaccaagaugagcgagugcgugcugggccagagcaagcggguggacuucugcggcaagggcuaccaccugaugagcuuuccccagagcgcaccccacggagugguguuccugcacgugaccuacgugcccgcccaggagaagaacuucaccaccgccccagccaucugccacgacggcaaggcccacuuuccccgggagggcguguucgugagcaacggcacccacugguucgugacccagcggaacuucuacgagccccagaucaucaccaccgacaacaccuucgugagcggcaacugcgacguggugaucggcaucgugaacaacaccguguacgauccccugcagcccgagcuggacagcuucaaggaggagcuggacaaguacuucaagaaucacaccagccccgacguggaccugggcgacaucagcggcaucaacgccagcguggugaacauccagaaggagaucgaucggcugaacgagguggccaagaaccugaacgagagccugaucgaccugcaggagcugggcaaguacgagcaguacaucaaguggcccugguacaucuggcugggcuucaucgccggccugaucgccaucgugauggugaccaucaugcugugcugcaugaccagcugcugcagcugccugaagggcuguugcagcugcggcagcugcugcaaguucgacgaggacgacagcgagcccgugcugaagggcgugaagcugcacuacaccugauaauaggcuggagccucgguggccuagcuucuugccccuugggccuccccccagccccuccuccccuuccugcacccguacccccguggucuuugaauaaagucugagugggcggcaaaaaaaaaaaaaaaaaaaaaaaaaaaaaaaaaaaaaaaaaaaaaaaaaaaaaaaaaaaaaaaaaaaaaaaaaaaaaaaaaaaaaaaaaaaaaaaaaaaa

SEQ ID NO: 26088 - RNA, 4095 nt, Artificial Sequence
  SARS-CoV-2/Wuhan/WIV05/2019__EPI_ISL_402128 spike protein mRNA gc (1-1273)(N439K_D614G)
gggaaauaagagagaaaagaagaguaagaagaaauauaagaccccggcgccgccaccauguucguguuccuggugcugcugccccuggugagcagccagugcgugaaccugaccacccggacccagcugccaccagccuacaccaacagcuucacccggggcgucuacuaccccgacaagguguuccggagcagcguccugcacagcacccaggaccuguuccugcccuucuucagcaacgugaccugguuccacgccauccacgugagcggcaccaacggcaccaagcgguucgacaaccccgugcugcccuucaacgacggcguguacuucgccagcaccgagaagagcaacaucauccggggcuggaucuucggcaccacccuggacagcaagacccagagccugcugaucgugaauaacgccaccaacguggugaucaaggugugcgaguuccaguucugcaacgaccccuuccugggcguguacuaccacaagaacaacaagagcuggauggagagcgaguuccggguguacagcagcgccaacaacugcaccuucgaguacgugagccagcccuuccugauggaccuggagggcaagcagggcaacuucaagaaccugcgggaguucguguucaagaacaucgacggcuacuucaagaucuacagcaagcacaccccaaucaaccuggugcgggaucugccccagggcuucucagcccuggagccccugguggaccugcccaucggcaucaacaucacccgguuccagacccugcuggcccugcaccggagcuaccugaccccaggcgacagcagcagcggguggacagcaggcgcggcugcuuacuacgugggcuaccugcagccccggaccuuccugcugaaguacaacgagaacggcaccaucaccgacgccguggacugcgcccuggacccucugagcgagaccaagugcacccugaagagcuucaccguggagaagggcaucuaccagaccagcaacuuccgggugcagcccaccgagagcaucgugcgguuccccaacaucaccaaccugugccccuucggcgagguguucaacgccacccgguucgccagcguguacgccuggaaccggaagcggaucagcaacugcguggccgacuacagcgugcuguacaacagcgccagcuucagcaccuucaagugcuacggcgugagccccaccaagcugaacgaccugugcuucaccaacguguacgccgacagcuucgugauccguggcgacgaggugcggcagaucgcacccggccagacaggcaagaucgccgacuacaacuacaagcugcccgacgacuucaccggcugcgugaucgccuggaacagcaagaaccucgacagcaaggugggcggcaacuacaacuaccuguaccggcuguuccggaagagcaaccugaagcccuucgagcgggacaucagcaccgagaucuaccaagccggcuccaccccuugcaacggcguggagggcuucaacugcuacuucccucugcagagcuacggcuuccagcccaccaacggcgugggcuaccagcccuaccgggugguggugcugagcuucgagcugcugcacgccccagccaccguguguggccccaagaagagcaccaaccuggugaagaacaagugcgugaacuucaacuucaacggccuuaccggcaccggcgugcugaccgagagcaacaagaaauuccugcccuuucagcaguucggccgggacaucgccgacaccaccgacgcugugcgggauccccagacccuggagauccuggacaucaccccuugcagcuucggcggcgugagcgugaucaccccaggcaccaacaccagcaaccagguggccgugcuguaccagggcgugaacugcaccgaggugcccguggccauccacgccgaccagcugacacccaccuggcgggucuacagcaccggcagcaacguguuccagacccgggccgguugccugaucggcgccgagcacgugaacaacagcuacgagugcgacauccccaucggcgccggcaucugugccagcuaccagacccagaccaauucaccccggagggcaaggagcguggccagccagagcaucaucgccuacaccaugagccugggcgccgagaacagcguggccuacagcaacaacagcaucgccauccccaccaacuucaccaucagcgugaccaccgagauucugcccgugagcaugaccaagaccagcguggacugcaccauguacaucugcggcgacagcaccgagugcagcaaccugcugcugcaguacggcagcuucugcacccagcugaaccgggcccugaccggcaucgccguggagcaggacaagaacacccaggagguguucgcccaggugaagcagaucuacaagaccccucccaucaaggacuucggcggcuucaacuucagccagauccugcccgaccccagcaagcccagcaagcggagcuucaucgaggaccugcuguucaacaaggugacccuagccgacgccggcuucaucaagcaguacggcgacugccucggcgacauagccgcccgggaccugaucugcgcccagaaguucaacggccugaccgugcugccuccccugcugaccgacgagaugaucgcccaguacaccagcgcccuguuagccggaaccaucaccagcggcuggacuuucggcgcuggagccgcucugcagauccccuucgccaugcagauggccuaccgguucaacggcaucggcgugacccagaacgugcuguacgagaaccagaagcugaucgccaaccaguucaacagcgccaucggcaagauccaggacagccugagcagcaccgcuagcgcccugggcaagcugcaggacguggugaaccagaacgcccaggcccugaacacccuggugaagcagcugagcagcaacuucggcgccaucagcagcgugcugaacgacauccugagccggcuggacaaggucgaggccgaggugcagaucgaccggcugaucacuggccggcugcagagccugcagaccuacgugacccagcagcugauccgggccgccgagauucgggccagcgccaaccuggccgccaccaagaugagcgagugcgugcugggccagagcaagcggguggacuucugcggcaagggcuaccaccugaugagcuuuccccagagcgcaccccacggagugguguuccugcacgugaccuacgugcccgcccaggagaagaacuucaccaccgccccagccaucugccacgacggcaaggcccacuuuccccgggagggcguguucgugagcaacggcacccacugguucgugacccagcggaacuucuacgagccccagaucaucaccaccgacaacaccuucgugagcggcaacugcgacguggugaucggcaucgugaacaacaccguguacgauccccugcagcccgagcuggacagcuucaaggaggagcuggacaaguacuucaagaaucacaccagccccgacguggaccugggcgacaucagcggcaucaacgccagcguggugaacauccagaaggagaucgaucggcugaacgagguggccaagaaccugaacgagagccugaucgaccugcaggagcugggcaaguacgagcaguacaucaaguggcccugguacaucuggcugggcuucaucgccggccugaucgccaucgugauggugaccaucaugcugugcugcaugaccagcugcugcagcugccugaagggcuguugcagcugcggcagcugcugcaaguucgacgaggacgacagcgagcccgugcugaagggcgugaagcugcacuacaccugauaauaggcuggagccucgguggccuagcuucuugccccuugggccuccccccagccccuccuccccuuccugcacccguacccccguggucuuugaauaaagucugagugggcggcaaaaaaaaaaaaaaaaaaaaaaaaaaaaaaaaaaaaaaaaaaaaaaaaaaaaaaaaaaaaaaaaaaaaaaaaaaaaaaaaaaaaaaaaaaaaaaaaaaaa

SEQ ID NO: 26089 - RNA, 4095 nt, Artificial Sequence
  SARS-CoV-2/Wuhan/WIV05/2019__EPI_ISL_402128 spike protein mRNA gc (1-1273)(S477N_D614G)
gggaaauaagagagaaaagaagaguaagaagaaauauaagaccccggcgccgccaccauguucguguuccuggugcugcugccccuggugagcagccagugcgugaaccugaccacccggacccagcugccaccagccuacaccaacagcuucacccggggcgucuacuaccccgacaagguguuccggagcagcguccugcacagcacccaggaccuguuccugcccuucuucagcaacgugaccugguuccacgccauccacgugagcggcaccaacggcaccaagcgguucgacaaccccgugcugcccuucaacgacggcguguacuucgccagcaccgagaagagcaacaucauccggggcuggaucuucggcaccacccuggacagcaagacccagagccugcugaucgugaauaacgccaccaacguggugaucaaggugugcgaguuccaguucugcaacgaccccuuccugggcguguacuaccacaagaacaacaagagcuggauggagagcgaguuccggguguacagcagcgccaacaacugcaccuucgaguacgugagccagcccuuccugauggaccuggagggcaagcagggcaacuucaagaaccugcgggaguucguguucaagaacaucgacggcuacuucaagaucuacagcaagcacaccccaaucaaccuggugcgggaucugccccagggcuucucagcccuggagccccugguggaccugcccaucggcaucaacaucacccgguuccagacccugcuggcccugcaccggagcuaccugaccccaggcgacagcagcagcggguggacagcaggcgcggcugcuuacuacgugggcuaccugcagccccggaccuuccugcugaaguacaacgagaacggcaccaucaccgacgccguggacugcgcccuggacccucugagcgagaccaagugcacccugaagagcuucaccguggagaagggcaucuaccagaccagcaacuuccgggugcagcccaccgagagcaucgugcgguuccccaacaucaccaaccugugccccuucggcgagguguucaacgccacccgguucgccagcguguacgccuggaaccggaagcggaucagcaacugcguggccgacuacagcgugcuguacaacagcgccagcuucagcaccuucaagugcuacggcgugagccccaccaagcugaacgaccugugcuucaccaacguguacgccgacagcuucgugauccguggcgacgaggugcggcagaucgcacccggccagacaggcaagaucgccgacuacaacuacaagcugcccgacgacuucaccggcugcgugaucgccuggaacagcaacaaccucgacagcaaggugggcggcaacuacaacuaccuguaccggcuguuccggaagagcaaccugaagcccuucgagcgggacaucagcaccgagaucuaccaagccggcaacaccccuugcaacggcguggagggcuucaacugcuacuucccucugcagagcuacggcuuccagcccaccaacggcgugggcuaccagcccuaccgggugguggugcugagcuucgagcugcugcacgccccagccaccguguguggccccaagaagagcaccaaccuggugaagaacaagugcgugaacuucaacuucaacggccuuaccggcaccggcgugcugaccgagagcaacaagaaauuccugcccuuucagcaguucggccgggacaucgccgacaccaccgacgcugugcgggauccccagacccuggagauccuggacaucaccccuugcagcuucggcggcgugagcgugaucaccccaggcaccaacaccagcaaccagguggccgugcuguaccagggcgugaacugcaccgaggugcccguggccauccacgccgaccagcugacacccaccuggcgggucuacagcaccggcagcaacguguuccagacccgggccgguugccugaucggcgccgagcacgugaacaacagcuacgagugcgacauccccaucggcgccggcaucugugccagcuaccagacccagaccaauucaccccggagggcaaggagcguggccagccagagcaucaucgccuacaccaugagccugggcgccgagaacagcguggccuacagcaacaacagcaucgccauccccaccaacuucaccaucagcgugaccaccgagauucugcccgugagcaugaccaagaccagcguggacugcaccauguacaucugcggcgacagcaccgagugcagcaaccugcugcugcaguacggcagcuucugcacccagcugaaccgggcccugaccggcaucgccguggagcaggacaagaacacccaggagguguucgcccaggugaagcagaucuacaagaccccucccaucaaggacuucggcggcuucaacuucagccagauccugcccgaccccagcaagcccagcaagcggagcuucaucgaggaccugcuguucaacaaggugacccuagccgacgccggcuucaucaagcaguacggcgacugccucggcgacauagccgcccgggaccugaucugcgcccagaaguucaacggccugaccgugcugccuccccugcugaccgacgagaugaucgcccaguacaccagcgcccuguuagccggaaccaucaccagcggcuggacuuucggcgcuggagccgcucugcagauccccuucgccaugcagauggccuaccgguucaacggcaucggcgugacccagaacgugcuguacgagaaccagaagcugaucgccaaccaguucaacagcgccaucggcaagauccaggacagccugagcagcaccgcuagcgcccugggcaagcugcaggacguggugaaccagaacgcccaggcccugaacacccuggugaagcagcugagcagcaacuucggcgccaucagcagcgugcugaacgacauccugagccggcuggacaaggucgaggccgaggugcagaucgaccggcugaucacuggccggcugcagagccugcagaccuacgugacccagcagcugauccgggccgccgagauucgggccagcgccaaccuggccgccaccaagaugagcgagugcgugcugggccagagcaagcggguggacuucugcggcaagggcuaccaccugaugagcuuuccccagagcgcaccccacggagugguguuccugcacgugaccuacgugcccgcccaggagaagaacuucaccaccgccccagccaucugccacgacggcaaggcccacuuuccccgggagggcguguucgugagcaacggcacccacugguucgugacccagcggaacuucuacgagccccagaucaucaccaccgacaacaccuucgugagcggcaacugcgacguggugaucggcaucgugaacaacaccguguacgauccccugcagcccgagcuggacagcuucaaggaggagcuggacaaguacuucaagaaucacaccagccccgacguggaccugggcgacaucagcggcaucaacgccagcguggugaacauccagaaggagaucgaucggcugaacgagguggccaagaaccugaacgagagccugaucgaccugcaggagcugggcaaguacgagcaguacaucaaguggcccugguacaucuggcugggcuucaucgccggccugaucgccaucgugauggugaccaucaugcugugcugcaugaccagcugcugcagcugccugaagggcuguugcagcugcggcagcugcugcaaguucgacgaggacgacagcgagcccgugcugaagggcgugaagcugcacuacaccugauaauaggcuggagccucgguggccuagcuucuugccccuugggccuccccccagccccuccuccccuuccugcacccguacccccguggucuuugaauaaagucugagugggcggcaaaaaaaaaaaaaaaaaaaaaaaaaaaaaaaaaaaaaaaaaaaaaaaaaaaaaaaaaaaaaaaaaaaaaaaaaaaaaaaaaaaaaaaaaaaaaaaaaaaa

SEQ ID NO: 26090 - RNA, 4095 nt, Artificial Sequence
  SARS-CoV-2/Wuhan/WIV05/2019__EPI_ISL_402128 spike protein mRNA gc (1-1273)(N501Y_D614G)
gggaaauaagagagaaaagaagaguaagaagaaauauaagaccccggcgccgccaccauguucguguuccuggugcugcugccccuggugagcagccagugcgugaaccugaccacccggacccagcugccaccagccuacaccaacagcuucacccggggcgucuacuaccccgacaagguguuccggagcagcguccugcacagcacccaggaccuguuccugcccuucuucagcaacgugaccugguuccacgccauccacgugagcggcaccaacggcaccaagcgguucgacaaccccgugcugcccuucaacgacggcguguacuucgccagcaccgagaagagcaacaucauccggggcuggaucuucggcaccacccuggacagcaagacccagagccugcugaucgugaauaacgccaccaacguggugaucaaggugugcgaguuccaguucugcaacgaccccuuccugggcguguacuaccacaagaacaacaagagcuggauggagagcgaguuccggguguacagcagcgccaacaacugcaccuucgaguacgugagccagcccuuccugauggaccuggagggcaagcagggcaacuucaagaaccugcgggaguucguguucaagaacaucgacggcuacuucaagaucuacagcaagcacaccccaaucaaccuggugcgggaucugccccagggcuucucagcccuggagccccugguggaccugcccaucggcaucaacaucacccgguuccagacccugcuggcccugcaccggagcuaccugaccccaggcgacagcagcagcggguggacagcaggcgcggcugcuuacuacgugggcuaccugcagccccggaccuuccugcugaaguacaacgagaacggcaccaucaccgacgccguggacugcgcccuggacccucugagcgagaccaagugcacccugaagagcuucaccguggagaagggcaucuaccagaccagcaacuuccgggugcagcccaccgagagcaucgugcgguuccccaacaucaccaaccugugccccuucggcgagguguucaacgccacccgguucgccagcguguacgccuggaaccggaagcggaucagcaacugcguggccgacuacagcgugcuguacaacagcgccagcuucagcaccuucaagugcuacggcgugagccccaccaagcugaacgaccugugcuucaccaacguguacgccgacagcuucgugauccguggcgacgaggugcggcagaucgcacccggccagacaggcaagaucgccgacuacaacuacaagcugcccgacgacuucaccggcugcgugaucgccuggaacagcaacaaccucgacagcaaggugggcggcaacuacaacuaccuguaccggcuguuccggaagagcaaccugaagcccuucgagcgggacaucagcaccgagaucuaccaagccggcuccaccccuugcaacggcguggagggcuucaacugcuacuucccucugcagagcuacggcuuccagcccaccuacggcgugggcuaccagcccuaccgggugguggugcugagcuucgagcugcugcacgccccagccaccguguguggccccaagaagagcaccaaccuggugaagaacaagugcgugaacuucaacuucaacggccuuaccggcaccggcgugcugaccgagagcaacaagaaauuccugcccuuucagcaguucggccgggacaucgccgacaccaccgacgcugugcgggauccccagacccuggagauccuggacaucaccccuugcagcuucggcggcgugagcgugaucaccccaggcaccaacaccagcaaccagguggccgugcuguaccagggcgugaacugcaccgaggugcccguggccauccacgccgaccagcugacacccaccuggcgggucuacagcaccggcagcaacguguuccagacccgggccgguugccugaucggcgccgagcacgugaacaacagcuacgagugcgacauccccaucggcgccggcaucugugccagcuaccagacccagaccaauucaccccggagggcaaggagcguggccagccagagcaucaucgccuacaccaugagccugggcgccgagaacagcguggccuacagcaacaacagcaucgccauccccaccaacuucaccaucagcgugaccaccgagauucugcccgugagcaugaccaagaccagcguggacugcaccauguacaucugcggcgacagcaccgagugcagcaaccugcugcugcaguacggcagcuucugcacccagcugaaccgggcccugaccggcaucgccguggagcaggacaagaacacccaggagguguucgcccaggugaagcagaucuacaagaccccucccaucaaggacuucggcggcuucaacuucagccagauccugcccgaccccagcaagcccagcaagcggagcuucaucgaggaccugcuguucaacaaggugacccuagccgacgccggcuucaucaagcaguacggcgacugccucggcgacauagccgcccgggaccugaucugcgcccagaaguucaacggccugaccgugcugccuccccugcugaccgacgagaugaucgcccaguacaccagcgcccuguuagccggaaccaucaccagcggcuggacuuucggcgcuggagccgcucugcagauccccuucgccaugcagauggccuaccgguucaacggcaucggcgugacccagaacgugcuguacgagaaccagaagcugaucgccaaccaguucaacagcgccaucggcaagauccaggacagccugagcagcaccgcuagcgcccugggcaagcugcaggacguggugaaccagaacgcccaggcccugaacacccuggugaagcagcugagcagcaacuucggcgccaucagcagcgugcugaacgacauccugagccggcuggacaaggucgaggccgaggugcagaucgaccggcugaucacuggccggcugcagagccugcagaccuacgugacccagcagcugauccgggccgccgagauucgggccagcgccaaccuggccgccaccaagaugagcgagugcgugcugggccagagcaagcggguggacuucugcggcaagggcuaccaccugaugagcuuuccccagagcgcaccccacggagugguguuccugcacgugaccuacgugcccgcccaggagaagaacuucaccaccgccccagccaucugccacgacggcaaggcccacuuuccccgggagggcguguucgugagcaacggcacccacugguucgugacccagcggaacuucuacgagccccagaucaucaccaccgacaacaccuucgugagcggcaacugcgacguggugaucggcaucgugaacaacaccguguacgauccccugcagcccgagcuggacagcuucaaggaggagcuggacaaguacuucaagaaucacaccagccccgacguggaccugggcgacaucagcggcaucaacgccagcguggugaacauccagaaggagaucgaucggcugaacgagguggccaagaaccugaacgagagccugaucgaccugcaggagcugggcaaguacgagcaguacaucaaguggcccugguacaucuggcugggcuucaucgccggccugaucgccaucgugauggugaccaucaugcugugcugcaugaccagcugcugcagcugccugaagggcuguugcagcugcggcagcugcugcaaguucgacgaggacgacagcgagcccgugcugaagggcgugaagcugcacuacaccugauaauaggcuggagccucgguggccuagcuucuugccccuugggccuccccccagccccuccuccccuuccugcacccguacccccguggucuuugaauaaagucugagugggcggcaaaaaaaaaaaaaaaaaaaaaaaaaaaaaaaaaaaaaaaaaaaaaaaaaaaaaaaaaaaaaaaaaaaaaaaaaaaaaaaaaaaaaaaaaaaaaaaaaaaa

SEQ ID NO: 26091 - RNA, 4089 nt, Artificial Sequence
  SARS-CoV-2/Wuhan/WIV05/2019__EPI_ISL_402128 spike protein mRNA gc (1-1273)(H69del_V70del_D614G)
gggaaauaagagagaaaagaagaguaagaagaaauauaagaccccggcgccgccaccauguucguguuccuggugcugcugccccuggugagcagccagugcgugaaccugaccacccggacccagcugccaccagccuacaccaacagcuucacccggggcgucuacuaccccgacaagguguuccggagcagcguccugcacagcacccaggaccuguuccugcccuucuucagcaacgugaccugguuccacgccaucagcggcaccaacggcaccaagcgguucgacaaccccgugcugcccuucaacgacggcguguacuucgccagcaccgagaagagcaacaucauccggggcuggaucuucggcaccacccuggacagcaagacccagagccugcugaucgugaauaacgccaccaacguggugaucaaggugugcgaguuccaguucugcaacgaccccuuccugggcguguacuaccacaagaacaacaagagcuggauggagagcgaguuccggguguacagcagcgccaacaacugcaccuucgaguacgugagccagcccuuccugauggaccuggagggcaagcagggcaacuucaagaaccugcgggaguucguguucaagaacaucgacggcuacuucaagaucuacagcaagcacaccccaaucaaccuggugcgggaucugccccagggcuucucagcccuggagccccugguggaccugcccaucggcaucaacaucacccgguuccagacccugcuggcccugcaccggagcuaccugaccccaggcgacagcagcagcggguggacagcaggcgcggcugcuuacuacgugggcuaccugcagccccggaccuuccugcugaaguacaacgagaacggcaccaucaccgacgccguggacugcgcccuggacccucugagcgagaccaagugcacccugaagagcuucaccguggagaagggcaucuaccagaccagcaacuuccgggugcagcccaccgagagcaucgugcgguuccccaacaucaccaaccugugccccuucggcgagguguucaacgccacccgguucgccagcguguacgccuggaaccggaagcggaucagcaacugcguggccgacuacagcgugcuguacaacagcgccagcuucagcaccuucaagugcuacggcgugagccccaccaagcugaacgaccugugcuucaccaacguguacgccgacagcuucgugauccguggcgacgaggugcggcagaucgcacccggccagacaggcaagaucgccgacuacaacuacaagcugcccgacgacuucaccggcugcgugaucgccuggaacagcaacaaccucgacagcaaggugggcggcaacuacaacuaccuguaccggcuguuccggaagagcaaccugaagcccuucgagcgggacaucagcaccgagaucuaccaagccggcuccaccccuugcaacggcguggagggcuucaacugcuacuucccucugcagagcuacggcuuccagcccaccaacggcgugggcuaccagcccuaccgggugguggugcugagcuucgagcugcugcacgccccagccaccguguguggccccaagaagagcaccaaccuggugaagaacaagugcgugaacuucaacuucaacggccuuaccggcaccggcgugcugaccgagagcaacaagaaauuccugcccuuucagcaguucggccgggacaucgccgacaccaccgacgcugugcgggauccccagacccuggagauccuggacaucaccccuugcagcuucggcggcgugagcgugaucaccccaggcaccaacaccagcaaccagguggccgugcuguaccagggcgugaacugcaccgaggugcccguggccauccacgccgaccagcugacacccaccuggcgggucuacagcaccggcagcaacguguuccagacccgggccgguugccugaucggcgccgagcacgugaacaacagcuacgagugcgacauccccaucggcgccggcaucugugccagcuaccagacccagaccaauucaccccggagggcaaggagcguggccagccagagcaucaucgccuacaccaugagccugggcgccgagaacagcguggccuacagcaacaacagcaucgccauccccaccaacuucaccaucagcgugaccaccgagauucugcccgugagcaugaccaagaccagcguggacugcaccauguacaucugcggcgacagcaccgagugcagcaaccugcugcugcaguacggcagcuucugcacccagcugaaccgggcccugaccggcaucgccguggagcaggacaagaacacccaggagguguucgcccaggugaagcagaucuacaagaccccucccaucaaggacuucggcggcuucaacuucagccagauccugcccgaccccagcaagcccagcaagcggagcuucaucgaggaccugcuguucaacaaggugacccuagccgacgccggcuucaucaagcaguacggcgacugccucggcgacauagccgcccgggaccugaucugcgcccagaaguucaacggccugaccgugcugccuccccugcugaccgacgagaugaucgcccaguacaccagcgcccuguuagccggaaccaucaccagcggcuggacuuucggcgcuggagccgcucugcagauccccuucgccaugcagauggccuaccgguucaacggcaucggcgugacccagaacgugcuguacgagaaccagaagcugaucgccaaccaguucaacagcgccaucggcaagauccaggacagccugagcagcaccgcuagcgcccugggcaagcugcaggacguggugaaccagaacgcccaggcccugaacacccuggugaagcagcugagcagcaacuucggcgccaucagcagcgugcugaacgacauccugagccggcuggacaaggucgaggccgaggugcagaucgaccggcugaucacuggccggcugcagagccugcagaccuacgugacccagcagcugauccgggccgccgagauucgggccagcgccaaccuggccgccaccaagaugagcgagugcgugcugggccagagcaagcggguggacuucugcggcaagggcuaccaccugaugagcuuuccccagagcgcaccccacggagugguguuccugcacgugaccuacgugcccgcccaggagaagaacuucaccaccgccccagccaucugccacgacggcaaggcccacuuuccccgggagggcguguucgugagcaacggcacccacugguucgugacccagcggaacuucuacgagccccagaucaucaccaccgacaacaccuucgugagcggcaacugcgacguggugaucggcaucgugaacaacaccguguacgauccccugcagcccgagcuggacagcuucaaggaggagcuggacaaguacuucaagaaucacaccagccccgacguggaccugggcgacaucagcggcaucaacgccagcguggugaacauccagaaggagaucgaucggcugaacgagguggccaagaaccugaacgagagccugaucgaccugcaggagcugggcaaguacgagcaguacaucaaguggcccugguacaucuggcugggcuucaucgccggccugaucgccaucgugauggugaccaucaugcugugcugcaugaccagcugcugcagcugccugaagggcuguugcagcugcggcagcugcugcaaguucgacgaggacgacagcgagcccgugcugaagggcgugaagcugcacuacaccugauaauaggcuggagccucgguggccuagcuucuugccccuugggccuccccccagccccuccuccccuuccugcacccguacccccguggucuuugaauaaagucugagugggcggcaaaaaaaaaaaaaaaaaaaaaaaaaaaaaaaaaaaaaaaaaaaaaaaaaaaaaaaaaaaaaaaaaaaaaaaaaaaaaaaaaaaaaaaaaaaaaaaaaaaa

SEQ ID NO: 26092 - RNA, 4095 nt, Artificial Sequence
  SARS-CoV-2/Wuhan/WIV05/2019__EPI_ISL_402128 spike protein mRNA gc (1-1273)(Y453F_D614G)
gggaaauaagagagaaaagaagaguaagaagaaauauaagaccccggcgccgccaccauguucguguuccuggugcugcugccccuggugagcagccagugcgugaaccugaccacccggacccagcugccaccagccuacaccaacagcuucacccggggcgucuacuaccccgacaagguguuccggagcagcguccugcacagcacccaggaccuguuccugcccuucuucagcaacgugaccugguuccacgccauccacgugagcggcaccaacggcaccaagcgguucgacaaccccgugcugcccuucaacgacggcguguacuucgccagcaccgagaagagcaacaucauccggggcuggaucuucggcaccacccuggacagcaagacccagagccugcugaucgugaauaacgccaccaacguggugaucaaggugugcgaguuccaguucugcaacgaccccuuccugggcguguacuaccacaagaacaacaagagcuggauggagagcgaguuccggguguacagcagcgccaacaacugcaccuucgaguacgugagccagcccuuccugauggaccuggagggcaagcagggcaacuucaagaaccugcgggaguucguguucaagaacaucgacggcuacuucaagaucuacagcaagcacaccccaaucaaccuggugcgggaucugccccagggcuucucagcccuggagccccugguggaccugcccaucggcaucaacaucacccgguuccagacccugcuggcccugcaccggagcuaccugaccccaggcgacagcagcagcggguggacagcaggcgcggcugcuuacuacgugggcuaccugcagccccggaccuuccugcugaaguacaacgagaacggcaccaucaccgacgccguggacugcgcccuggacccucugagcgagaccaagugcacccugaagagcuucaccguggagaagggcaucuaccagaccagcaacuuccgggugcagcccaccgagagcaucgugcgguuccccaacaucaccaaccugugccccuucggcgagguguucaacgccacccgguucgccagcguguacgccuggaaccggaagcggaucagcaacugcguggccgacuacagcgugcuguacaacagcgccagcuucagcaccuucaagugcuacggcgugagccccaccaagcugaacgaccugugcuucaccaacguguacgccgacagcuucgugauccguggcgacgaggugcggcagaucgcacccggccagacaggcaagaucgccgacuacaacuacaagcugcccgacgacuucaccggcugcgugaucgccuggaacagcaacaaccucgacagcaaggugggcggcaacuacaacuaccuguuccggcuguuccggaagagcaaccugaagcccuucgagcgggacaucagcaccgagaucuaccaagccggcuccaccccuugcaacggcguggagggcuucaacugcuacuucccucugcagagcuacggcuuccagcccaccaacggcgugggcuaccagcccuaccgggugguggugcugagcuucgagcugcugcacgccccagccaccguguguggccccaagaagagcaccaaccuggugaagaacaagugcgugaacuucaacuucaacggccuuaccggcaccggcgugcugaccgagagcaacaagaaauuccugcccuuucagcaguucggccgggacaucgccgacaccaccgacgcugugcgggauccccagacccuggagauccuggacaucaccccuugcagcuucggcggcgugagcgugaucaccccaggcaccaacaccagcaaccagguggccgugcuguaccagggcgugaacugcaccgaggugcccguggccauccacgccgaccagcugacacccaccuggcgggucuacagcaccggcagcaacguguuccagacccgggccgguugccugaucggcgccgagcacgugaacaacagcuacgagugcgacauccccaucggcgccggcaucugugccagcuaccagacccagaccaauucaccccggagggcaaggagcguggccagccagagcaucaucgccuacaccaugagccugggcgccgagaacagcguggccuacagcaacaacagcaucgccauccccaccaacuucaccaucagcgugaccaccgagauucugcccgugagcaugaccaagaccagcguggacugcaccauguacaucugcggcgacagcaccgagugcagcaaccugcugcugcaguacggcagcuucugcacccagcugaaccgggcccugaccggcaucgccguggagcaggacaagaacacccaggagguguucgcccaggugaagcagaucuacaagaccccucccaucaaggacuucggcggcuucaacuucagccagauccugcccgaccccagcaagcccagcaagcggagcuucaucgaggaccugcuguucaacaaggugacccuagccgacgccggcuucaucaagcaguacggcgacugccucggcgacauagccgcccgggaccugaucugcgcccagaaguucaacggccugaccgugcugccuccccugcugaccgacgagaugaucgcccaguacaccagcgcccuguuagccggaaccaucaccagcggcuggacuuucggcgcuggagccgcucugcagauccccuucgccaugcagauggccuaccgguucaacggcaucggcgugacccagaacgugcuguacgagaaccagaagcugaucgccaaccaguucaacagcgccaucggcaagauccaggacagccugagcagcaccgcuagcgcccugggcaagcugcaggacguggugaaccagaacgcccaggcccugaacacccuggugaagcagcugagcagcaacuucggcgccaucagcagcgugcugaacgacauccugagccggcuggacaaggucgaggccgaggugcagaucgaccggcugaucacuggccggcugcagagccugcagaccuacgugacccagcagcugauccgggccgccgagauucgggccagcgccaaccuggccgccaccaagaugagcgagugcgugcugggccagagcaagcggguggacuucugcggcaagggcuaccaccugaugagcuuuccccagagcgcaccccacggagugguguuccugcacgugaccuacgugcccgcccaggagaagaacuucaccaccgccccagccaucugccacgacggcaaggcccacuuuccccgggagggcguguucgugagcaacggcacccacugguucgugacccagcggaacuucuacgagccccagaucaucaccaccgacaacaccuucgugagcggcaacugcgacguggugaucggcaucgugaacaacaccguguacgauccccugcagcccgagcuggacagcuucaaggaggagcuggacaaguacuucaagaaucacaccagccccgacguggaccugggcgacaucagcggcaucaacgccagcguggugaacauccagaaggagaucgaucggcugaacgagguggccaagaaccugaacgagagccugaucgaccugcaggagcugggcaaguacgagcaguacaucaaguggcccugguacaucuggcugggcuucaucgccggccugaucgccaucgugauggugaccaucaugcugugcugcaugaccagcugcugcagcugccugaagggcuguugcagcugcggcagcugcugcaaguucgacgaggacgacagcgagcccgugcugaagggcgugaagcugcacuacaccugauaauaggcuggagccucgguggccuagcuucuugccccuugggccuccccccagccccuccuccccuuccugcacccguacccccguggucuuugaauaaagucugagugggcggcaaaaaaaaaaaaaaaaaaaaaaaaaaaaaaaaaaaaaaaaaaaaaaaaaaaaaaaaaaaaaaaaaaaaaaaaaaaaaaaaaaaaaaaaaaaaaaaaaaaa

SEQ ID NO: 26093 - RNA, 4095 nt, Artificial Sequence
  SARS-CoV-2/Wuhan/WIV05/2019__EPI_ISL_402128 spike protein mRNA gc (1-1273)(D614G_I692V)
gggaaauaagagagaaaagaagaguaagaagaaauauaagaccccggcgccgccaccauguucguguuccuggugcugcugccccuggugagcagccagugcgugaaccugaccacccggacccagcugccaccagccuacaccaacagcuucacccggggcgucuacuaccccgacaagguguuccggagcagcguccugcacagcacccaggaccuguuccugcccuucuucagcaacgugaccugguuccacgccauccacgugagcggcaccaacggcaccaagcgguucgacaaccccgugcugcccuucaacgacggcguguacuucgccagcaccgagaagagcaacaucauccggggcuggaucuucggcaccacccuggacagcaagacccagagccugcugaucgugaauaacgccaccaacguggugaucaaggugugcgaguuccaguucugcaacgaccccuuccugggcguguacuaccacaagaacaacaagagcuggauggagagcgaguuccggguguacagcagcgccaacaacugcaccuucgaguacgugagccagcccuuccugauggaccuggagggcaagcagggcaacuucaagaaccugcgggaguucguguucaagaacaucgacggcuacuucaagaucuacagcaagcacaccccaaucaaccuggugcgggaucugccccagggcuucucagcccuggagccccugguggaccugcccaucggcaucaacaucacccgguuccagacccugcuggcccugcaccggagcuaccugaccccaggcgacagcagcagcggguggacagcaggcgcggcugcuuacuacgugggcuaccugcagccccggaccuuccugcugaaguacaacgagaacggcaccaucaccgacgccguggacugcgcccuggacccucugagcgagaccaagugcacccugaagagcuucaccguggagaagggcaucuaccagaccagcaacuuccgggugcagcccaccgagagcaucgugcgguuccccaacaucaccaaccugugccccuucggcgagguguucaacgccacccgguucgccagcguguacgccuggaaccggaagcggaucagcaacugcguggccgacuacagcgugcuguacaacagcgccagcuucagcaccuucaagugcuacggcgugagccccaccaagcugaacgaccugugcuucaccaacguguacgccgacagcuucgugauccguggcgacgaggugcggcagaucgcacccggccagacaggcaagaucgccgacuacaacuacaagcugcccgacgacuucaccggcugcgugaucgccuggaacagcaacaaccucgacagcaaggugggcggcaacuacaacuaccuguaccggcuguuccggaagagcaaccugaagcccuucgagcgggacaucagcaccgagaucuaccaagccggcuccaccccuugcaacggcguggagggcuucaacugcuacuucccucugcagagcuacggcuuccagcccaccaacggcgugggcuaccagcccuaccgggugguggugcugagcuucgagcugcugcacgccccagccaccguguguggccccaagaagagcaccaaccuggugaagaacaagugcgugaacuucaacuucaacggccuuaccggcaccggcgugcugaccgagagcaacaagaaauuccugcccuuucagcaguucggccgggacaucgccgacaccaccgacgcugugcgggauccccagacccuggagauccuggacaucaccccuugcagcuucggcggcgugagcgugaucaccccaggcaccaacaccagcaaccagguggccgugcuguaccagggcgugaacugcaccgaggugcccguggccauccacgccgaccagcugacacccaccuggcgggucuacagcaccggcagcaacguguuccagacccgggccgguugccugaucggcgccgagcacgugaacaacagcuacgagugcgacauccccaucggcgccggcaucugugccagcuaccagacccagaccaauucaccccggagggcaaggagcguggccagccagagcgugaucgccuacaccaugagccugggcgccgagaacagcguggccuacagcaacaacagcaucgccauccccaccaacuucaccaucagcgugaccaccgagauucugcccgugagcaugaccaagaccagcguggacugcaccauguacaucugcggcgacagcaccgagugcagcaaccugcugcugcaguacggcagcuucugcacccagcugaaccgggcccugaccggcaucgccguggagcaggacaagaacacccaggagguguucgcccaggugaagcagaucuacaagaccccucccaucaaggacuucggcggcuucaacuucagccagauccugcccgaccccagcaagcccagcaagcggagcuucaucgaggaccugcuguucaacaaggugacccuagccgacgccggcuucaucaagcaguacggcgacugccucggcgacauagccgcccgggaccugaucugcgcccagaaguucaacggccugaccgugcugccuccccugcugaccgacgagaugaucgcccaguacaccagcgcccuguuagccggaaccaucaccagcggcuggacuuucggcgcuggagccgcucugcagauccccuucgccaugcagauggccuaccgguucaacggcaucggcgugacccagaacgugcuguacgagaaccagaagcugaucgccaaccaguucaacagcgccaucggcaagauccaggacagccugagcagcaccgcuagcgcccugggcaagcugcaggacguggugaaccagaacgcccaggcccugaacacccuggugaagcagcugagcagcaacuucggcgccaucagcagcgugcugaacgacauccugagccggcuggacaaggucgaggccgaggugcagaucgaccggcugaucacuggccggcugcagagccugcagaccuacgugacccagcagcugauccgggccgccgagauucgggccagcgccaaccuggccgccaccaagaugagcgagugcgugcugggccagagcaagcggguggacuucugcggcaagggcuaccaccugaugagcuuuccccagagcgcaccccacggagugguguuccugcacgugaccuacgugcccgcccaggagaagaacuucaccaccgccccagccaucugccacgacggcaaggcccacuuuccccgggagggcguguucgugagcaacggcacccacugguucgugacccagcggaacuucuacgagccccagaucaucaccaccgacaacaccuucgugagcggcaacugcgacguggugaucggcaucgugaacaacaccguguacgauccccugcagcccgagcuggacagcuucaaggaggagcuggacaaguacuucaagaaucacaccagccccgacguggaccugggcgacaucagcggcaucaacgccagcguggugaacauccagaaggagaucgaucggcugaacgagguggccaagaaccugaacgagagccugaucgaccugcaggagcugggcaaguacgagcaguacaucaaguggcccugguacaucuggcugggcuucaucgccggccugaucgccaucgugauggugaccaucaugcugugcugcaugaccagcugcugcagcugccugaagggcuguugcagcugcggcagcugcugcaaguucgacgaggacgacagcgagcccgugcugaagggcgugaagcugcacuacaccugauaauaggcuggagccucgguggccuagcuucuugccccuugggccuccccccagccccuccuccccuuccugcacccguacccccguggucuuugaauaaagucugagugggcggcaaaaaaaaaaaaaaaaaaaaaaaaaaaaaaaaaaaaaaaaaaaaaaaaaaaaaaaaaaaaaaaaaaaaaaaaaaaaaaaaaaaaaaaaaaaaaaaaaaaa

SEQ ID NO: 26094 - RNA, 4095 nt, Artificial Sequence
  SARS-CoV-2/Wuhan/WIV05/2019__EPI_ISL_402128 spike protein mRNA gc (1-1273)(D614G_M1229I)
gggaaauaagagagaaaagaagaguaagaagaaauauaagaccccggcgccgccaccauguucguguuccuggugcugcugccccuggugagcagccagugcgugaaccugaccacccggacccagcugccaccagccuacaccaacagcuucacccggggcgucuacuaccccgacaagguguuccggagcagcguccugcacagcacccaggaccuguuccugcccuucuucagcaacgugaccugguuccacgccauccacgugagcggcaccaacggcaccaagcgguucgacaaccccgugcugcccuucaacgacggcguguacuucgccagcaccgagaagagcaacaucauccggggcuggaucuucggcaccacccuggacagcaagacccagagccugcugaucgugaauaacgccaccaacguggugaucaaggugugcgaguuccaguucugcaacgaccccuuccugggcguguacuaccacaagaacaacaagagcuggauggagagcgaguuccggguguacagcagcgccaacaacugcaccuucgaguacgugagccagcccuuccugauggaccuggagggcaagcagggcaacuucaagaaccugcgggaguucguguucaagaacaucgacggcuacuucaagaucuacagcaagcacaccccaaucaaccuggugcgggaucugccccagggcuucucagcccuggagccccugguggaccugcccaucggcaucaacaucacccgguuccagacccugcuggcccugcaccggagcuaccugaccccaggcgacagcagcagcggguggacagcaggcgcggcugcuuacuacgugggcuaccugcagccccggaccuuccugcugaaguacaacgagaacggcaccaucaccgacgccguggacugcgcccuggacccucugagcgagaccaagugcacccugaagagcuucaccguggagaagggcaucuaccagaccagcaacuuccgggugcagcccaccgagagcaucgugcgguuccccaacaucaccaaccugugccccuucggcgagguguucaacgccacccgguucgccagcguguacgccuggaaccggaagcggaucagcaacugcguggccgacuacagcgugcuguacaacagcgccagcuucagcaccuucaagugcuacggcgugagccccaccaagcugaacgaccugugcuucaccaacguguacgccgacagcuucgugauccguggcgacgaggugcggcagaucgcacccggccagacaggcaagaucgccgacuacaacuacaagcugcccgacgacuucaccggcugcgugaucgccuggaacagcaacaaccucgacagcaaggugggcggcaacuacaacuaccuguaccggcuguuccggaagagcaaccugaagcccuucgagcgggacaucagcaccgagaucuaccaagccggcuccaccccuugcaacggcguggagggcuucaacugcuacuucccucugcagagcuacggcuuccagcccaccaacggcgugggcuaccagcccuaccgggugguggugcugagcuucgagcugcugcacgccccagccaccguguguggccccaagaagagcaccaaccuggugaagaacaagugcgugaacuucaacuucaacggccuuaccggcaccggcgugcugaccgagagcaacaagaaauuccugcccuuucagcaguucggccgggacaucgccgacaccaccgacgcugugcgggauccccagacccuggagauccuggacaucaccccuugcagcuucggcggcgugagcgugaucaccccaggcaccaacaccagcaaccagguggccgugcuguaccagggcgugaacugcaccgaggugcccguggccauccacgccgaccagcugacacccaccuggcgggucuacagcaccggcagcaacguguuccagacccgggccgguugccugaucggcgccgagcacgugaacaacagcuacgagugcgacauccccaucggcgccggcaucugugccagcuaccagacccagaccaauucaccccggagggcaaggagcguggccagccagagcaucaucgccuacaccaugagccugggcgccgagaacagcguggccuacagcaacaacagcaucgccauccccaccaacuucaccaucagcgugaccaccgagauucugcccgugagcaugaccaagaccagcguggacugcaccauguacaucugcggcgacagcaccgagugcagcaaccugcugcugcaguacggcagcuucugcacccagcugaaccgggcccugaccggcaucgccguggagcaggacaagaacacccaggagguguucgcccaggugaagcagaucuacaagaccccucccaucaaggacuucggcggcuucaacuucagccagauccugcccgaccccagcaagcccagcaagcggagcuucaucgaggaccugcuguucaacaaggugacccuagccgacgccggcuucaucaagcaguacggcgacugccucggcgacauagccgcccgggaccugaucugcgcccagaaguucaacggccugaccgugcugccuccccugcugaccgacgagaugaucgcccaguacaccagcgcccuguuagccggaaccaucaccagcggcuggacuuucggcgcuggagccgcucugcagauccccuucgccaugcagauggccuaccgguucaacggcaucggcgugacccagaacgugcuguacgagaaccagaagcugaucgccaaccaguucaacagcgccaucggcaagauccaggacagccugagcagcaccgcuagcgcccugggcaagcugcaggacguggugaaccagaacgcccaggcccugaacacccuggugaagcagcugagcagcaacuucggcgccaucagcagcgugcugaacgacauccugagccggcuggacaaggucgaggccgaggugcagaucgaccggcugaucacuggccggcugcagagccugcagaccuacgugacccagcagcugauccgggccgccgagauucgggccagcgccaaccuggccgccaccaagaugagcgagugcgugcugggccagagcaagcggguggacuucugcggcaagggcuaccaccugaugagcuuuccccagagcgcaccccacggagugguguuccugcacgugaccuacgugcccgcccaggagaagaacuucaccaccgccccagccaucugccacgacggcaaggcccacuuuccccgggagggcguguucgugagcaacggcacccacugguucgugacccagcggaacuucuacgagccccagaucaucaccaccgacaacaccuucgugagcggcaacugcgacguggugaucggcaucgugaacaacaccguguacgauccccugcagcccgagcuggacagcuucaaggaggagcuggacaaguacuucaagaaucacaccagccccgacguggaccugggcgacaucagcggcaucaacgccagcguggugaacauccagaaggagaucgaucggcugaacgagguggccaagaaccugaacgagagccugaucgaccugcaggagcugggcaaguacgagcaguacaucaaguggcccugguacaucuggcugggcuucaucgccggccugaucgccaucgugaucgugaccaucaugcugugcugcaugaccagcugcugcagcugccugaagggcuguugcagcugcggcagcugcugcaaguucgacgaggacgacagcgagcccgugcugaagggcgugaagcugcacuacaccugauaauaggcuggagccucgguggccuagcuucuugccccuugggccuccccccagccccuccuccccuuccugcacccguacccccguggucuuugaauaaagucugagugggcggcaaaaaaaaaaaaaaaaaaaaaaaaaaaaaaaaaaaaaaaaaaaaaaaaaaaaaaaaaaaaaaaaaaaaaaaaaaaaaaaaaaaaaaaaaaaaaaaaaaaa

SEQ ID NO: 26095 - RNA, 4089 nt, Artificial Sequence
  SARS-CoV-2/Wuhan/WIV05/2019__EPI_ISL_402128 spike protein mRNA gc (1-1273)(H69del_V70del_A222V_Y453F_S477N_D614G_I692V)
gggaaauaagagagaaaagaagaguaagaagaaauauaagaccccggcgccgccaccauguucguguuccuggugcugcugccccuggugagcagccagugcgugaaccugaccacccggacccagcugccaccagccuacaccaacagcuucacccggggcgucuacuaccccgacaagguguuccggagcagcguccugcacagcacccaggaccuguuccugcccuucuucagcaacgugaccugguuccacgccaucagcggcaccaacggcaccaagcgguucgacaaccccgugcugcccuucaacgacggcguguacuucgccagcaccgagaagagcaacaucauccggggcuggaucuucggcaccacccuggacagcaagacccagagccugcugaucgugaauaacgccaccaacguggugaucaaggugugcgaguuccaguucugcaacgaccccuuccugggcguguacuaccacaagaacaacaagagcuggauggagagcgaguuccggguguacagcagcgccaacaacugcaccuucgaguacgugagccagcccuuccugauggaccuggagggcaagcagggcaacuucaagaaccugcgggaguucguguucaagaacaucgacggcuacuucaagaucuacagcaagcacaccccaaucaaccuggugcgggaucugccccagggcuucucagugcuggagccccugguggaccugcccaucggcaucaacaucacccgguuccagacccugcuggcccugcaccggagcuaccugaccccaggcgacagcagcagcggguggacagcaggcgcggcugcuuacuacgugggcuaccugcagccccggaccuuccugcugaaguacaacgagaacggcaccaucaccgacgccguggacugcgcccuggacccucugagcgagaccaagugcacccugaagagcuucaccguggagaagggcaucuaccagaccagcaacuuccgggugcagcccaccgagagcaucgugcgguuccccaacaucaccaaccugugccccuucggcgagguguucaacgccacccgguucgccagcguguacgccuggaaccggaagcggaucagcaacugcguggccgacuacagcgugcuguacaacagcgccagcuucagcaccuucaagugcuacggcgugagccccaccaagcugaacgaccugugcuucaccaacguguacgccgacagcuucgugauccguggcgacgaggugcggcagaucgcacccggccagacaggcaagaucgccgacuacaacuacaagcugcccgacgacuucaccggcugcgugaucgccuggaacagcaacaaccucgacagcaaggugggcggcaacuacaacuaccuguuccggcuguuccggaagagcaaccugaagcccuucgagcgggacaucagcaccgagaucuaccaagccggcaacaccccuugcaacggcguggagggcuucaacugcuacuucccucugcagagcuacggcuuccagcccaccaacggcgugggcuaccagcccuaccgggugguggugcugagcuucgagcugcugcacgccccagccaccguguguggccccaagaagagcaccaaccuggugaagaacaagugcgugaacuucaacuucaacggccuuaccggcaccggcgugcugaccgagagcaacaagaaauuccugcccuuucagcaguucggccgggacaucgccgacaccaccgacgcugugcgggauccccagacccuggagauccuggacaucaccccuugcagcuucggcggcgugagcgugaucaccccaggcaccaacaccagcaaccagguggccgugcuguaccagggcgugaacugcaccgaggugcccguggccauccacgccgaccagcugacacccaccuggcgggucuacagcaccggcagcaacguguuccagacccgggccgguugccugaucggcgccgagcacgugaacaacagcuacgagugcgacauccccaucggcgccggcaucugugccagcuaccagacccagaccaauucaccccggagggcaaggagcguggccagccagagcgugaucgccuacaccaugagccugggcgccgagaacagcguggccuacagcaacaacagcaucgccauccccaccaacuucaccaucagcgugaccaccgagauucugcccgugagcaugaccaagaccagcguggacugcaccauguacaucugcggcgacagcaccgagugcagcaaccugcugcugcaguacggcagcuucugcacccagcugaaccgggcccugaccggcaucgccguggagcaggacaagaacacccaggagguguucgcccaggugaagcagaucuacaagaccccucccaucaaggacuucggcggcuucaacuucagccagauccugcccgaccccagcaagcccagcaagcggagcuucaucgaggaccugcuguucaacaaggugacccuagccgacgccggcuucaucaagcaguacggcgacugccucggcgacauagccgcccgggaccugaucugcgcccagaaguucaacggccugaccgugcugccuccccugcugaccgacgagaugaucgcccaguacaccagcgcccuguuagccggaaccaucaccagcggcuggacuuucggcgcuggagccgcucugcagauccccuucgccaugcagauggccuaccgguucaacggcaucggcgugacccagaacgugcuguacgagaaccagaagcugaucgccaaccaguucaacagcgccaucggcaagauccaggacagccugagcagcaccgcuagcgcccugggcaagcugcaggacguggugaaccagaacgcccaggcccugaacacccuggugaagcagcugagcagcaacuucggcgccaucagcagcgugcugaacgacauccugagccggcuggacaaggucgaggccgaggugcagaucgaccggcugaucacuggccggcugcagagccugcagaccuacgugacccagcagcugauccgggccgccgagauucgggccagcgccaaccuggccgccaccaagaugagcgagugcgugcugggccagagcaagcggguggacuucugcggcaagggcuaccaccugaugagcuuuccccagagcgcaccccacggagugguguuccugcacgugaccuacgugcccgcccaggagaagaacuucaccaccgccccagccaucugccacgacggcaaggcccacuuuccccgggagggcguguucgugagcaacggcacccacugguucgugacccagcggaacuucuacgagccccagaucaucaccaccgacaacaccuucgugagcggcaacugcgacguggugaucggcaucgugaacaacaccguguacgauccccugcagcccgagcuggacagcuucaaggaggagcuggacaaguacuucaagaaucacaccagccccgacguggaccugggcgacaucagcggcaucaacgccagcguggugaacauccagaaggagaucgaucggcugaacgagguggccaagaaccugaacgagagccugaucgaccugcaggagcugggcaaguacgagcaguacaucaaguggcccugguacaucuggcugggcuucaucgccggccugaucgccaucgugauggugaccaucaugcugugcugcaugaccagcugcugcagcugccugaagggcuguugcagcugcggcagcugcugcaaguucgacgaggacgacagcgagcccgugcugaagggcgugaagcugcacuacaccugauaauaggcuggagccucgguggccuagcuucuugccccuugggccuccccccagccccuccuccccuuccugcacccguacccccguggucuuugaauaaagucugagugggcggcaaaaaaaaaaaaaaaaaaaaaaaaaaaaaaaaaaaaaaaaaaaaaaaaaaaaaaaaaaaaaaaaaaaaaaaaaaaaaaaaaaaaaaaaaaaaaaaaaaaa

SEQ ID NO: 26096 - RNA, 4089 nt, Artificial Sequence
  SARS-CoV-2/Wuhan/WIV05/2019__EPI_ISL_402128 spike protein mRNA gc (1-1273)(H69del_V70del_Y453F_D614G_I692V_M1229I)
gggaaauaagagagaaaagaagaguaagaagaaauauaagaccccggcgccgccaccauguucguguuccuggugcugcugccccuggugagcagccagugcgugaaccugaccacccggacccagcugccaccagccuacaccaacagcuucacccggggcgucuacuaccccgacaagguguuccggagcagcguccugcacagcacccaggaccuguuccugcccuucuucagcaacgugaccugguuccacgccaucagcggcaccaacggcaccaagcgguucgacaaccccgugcugcccuucaacgacggcguguacuucgccagcaccgagaagagcaacaucauccggggcuggaucuucggcaccacccuggacagcaagacccagagccugcugaucgugaauaacgccaccaacguggugaucaaggugugcgaguuccaguucugcaacgaccccuuccugggcguguacuaccacaagaacaacaagagcuggauggagagcgaguuccggguguacagcagcgccaacaacugcaccuucgaguacgugagccagcccuuccugauggaccuggagggcaagcagggcaacuucaagaaccugcgggaguucguguucaagaacaucgacggcuacuucaagaucuacagcaagcacaccccaaucaaccuggugcgggaucugccccagggcuucucagcccuggagccccugguggaccugcccaucggcaucaacaucacccgguuccagacccugcuggcccugcaccggagcuaccugaccccaggcgacagcagcagcggguggacagcaggcgcggcugcuuacuacgugggcuaccugcagccccggaccuuccugcugaaguacaacgagaacggcaccaucaccgacgccguggacugcgcccuggacccucugagcgagaccaagugcacccugaagagcuucaccguggagaagggcaucuaccagaccagcaacuuccgggugcagcccaccgagagcaucgugcgguuccccaacaucaccaaccugugccccuucggcgagguguucaacgccacccgguucgccagcguguacgccuggaaccggaagcggaucagcaacugcguggccgacuacagcgugcuguacaacagcgccagcuucagcaccuucaagugcuacggcgugagccccaccaagcugaacgaccugugcuucaccaacguguacgccgacagcuucgugauccguggcgacgaggugcggcagaucgcacccggccagacaggcaagaucgccgacuacaacuacaagcugcccgacgacuucaccggcugcgugaucgccuggaacagcaacaaccucgacagcaaggugggcggcaacuacaacuaccuguuccggcuguuccggaagagcaaccugaagcccuucgagcgggacaucagcaccgagaucuaccaagccggcuccaccccuugcaacggcguggagggcuucaacugcuacuucccucugcagagcuacggcuuccagcccaccaacggcgugggcuaccagcccuaccgggugguggugcugagcuucgagcugcugcacgccccagccaccguguguggccccaagaagagcaccaaccuggugaagaacaagugcgugaacuucaacuucaacggccuuaccggcaccggcgugcugaccgagagcaacaagaaauuccugcccuuucagcaguucggccgggacaucgccgacaccaccgacgcugugcgggauccccagacccuggagauccuggacaucaccccuugcagcuucggcggcgugagcgugaucaccccaggcaccaacaccagcaaccagguggccgugcuguaccagggcgugaacugcaccgaggugcccguggccauccacgccgaccagcugacacccaccuggcgggucuacagcaccggcagcaacguguuccagacccgggccgguugccugaucggcgccgagcacgugaacaacagcuacgagugcgacauccccaucggcgccggcaucugugccagcuaccagacccagaccaauucaccccggagggcaaggagcguggccagccagagcgugaucgccuacaccaugagccugggcgccgagaacagcguggccuacagcaacaacagcaucgccauccccaccaacuucaccaucagcgugaccaccgagauucugcccgugagcaugaccaagaccagcguggacugcaccauguacaucugcggcgacagcaccgagugcagcaaccugcugcugcaguacggcagcuucugcacccagcugaaccgggcccugaccggcaucgccguggagcaggacaagaacacccaggagguguucgcccaggugaagcagaucuacaagaccccucccaucaaggacuucggcggcuucaacuucagccagauccugcccgaccccagcaagcccagcaagcggagcuucaucgaggaccugcuguucaacaaggugacccuagccgacgccggcuucaucaagcaguacggcgacugccucggcgacauagccgcccgggaccugaucugcgcccagaaguucaacggccugaccgugcugccuccccugcugaccgacgagaugaucgcccaguacaccagcgcccuguuagccggaaccaucaccagcggcuggacuuucggcgcuggagccgcucugcagauccccuucgccaugcagauggccuaccgguucaacggcaucggcgugacccagaacgugcuguacgagaaccagaagcugaucgccaaccaguucaacagcgccaucggcaagauccaggacagccugagcagcaccgcuagcgcccugggcaagcugcaggacguggugaaccagaacgcccaggcccugaacacccuggugaagcagcugagcagcaacuucggcgccaucagcagcgugcugaacgacauccugagccggcuggacaaggucgaggccgaggugcagaucgaccggcugaucacuggccggcugcagagccugcagaccuacgugacccagcagcugauccgggccgccgagauucgggccagcgccaaccuggccgccaccaagaugagcgagugcgugcugggccagagcaagcggguggacuucugcggcaagggcuaccaccugaugagcuuuccccagagcgcaccccacggagugguguuccugcacgugaccuacgugcccgcccaggagaagaacuucaccaccgccccagccaucugccacgacggcaaggcccacuuuccccgggagggcguguucgugagcaacggcacccacugguucgugacccagcggaacuucuacgagccccagaucaucaccaccgacaacaccuucgugagcggcaacugcgacguggugaucggcaucgugaacaacaccguguacgauccccugcagcccgagcuggacagcuucaaggaggagcuggacaaguacuucaagaaucacaccagccccgacguggaccugggcgacaucagcggcaucaacgccagcguggugaacauccagaaggagaucgaucggcugaacgagguggccaagaaccugaacgagagccugaucgaccugcaggagcugggcaaguacgagcaguacaucaaguggcccugguacaucuggcugggcuucaucgccggccugaucgccaucgugaucgugaccaucaugcugugcugcaugaccagcugcugcagcugccugaagggcuguugcagcugcggcagcugcugcaaguucgacgaggacgacagcgagcccgugcugaagggcgugaagcugcacuacaccugauaauaggcuggagccucgguggccuagcuucuugccccuugggccuccccccagccccuccuccccuuccugcacccguacccccguggucuuugaauaaagucugagugggcggcaaaaaaaaaaaaaaaaaaaaaaaaaaaaaaaaaaaaaaaaaaaaaaaaaaaaaaaaaaaaaaaaaaaaaaaaaaaaaaaaaaaaaaaaaaaaaaaaaaaa

SEQ ID NO: 26097 - RNA, 4086 nt, Artificial Sequence
  SARS-CoV-2/Wuhan/WIV05/2019__EPI_ISL_402128 spike protein mRNA gc (1-1273)(H69del_V70del_Y144del_N501Y_A570D_D614G_P681H_T716I_S982 A_D1118H)
gggaaauaagagagaaaagaagaguaagaagaaauauaagaccccggcgccgccaccauguucguguuccuggugcugcugccccuggugagcagccagugcgugaaccugaccacccggacccagcugccaccagccuacaccaacagcuucacccggggcgucuacuaccccgacaagguguuccggagcagcguccugcacagcacccaggaccuguuccugcccuucuucagcaacgugaccugguuccacgccaucagcggcaccaacggcaccaagcgguucgacaaccccgugcugcccuucaacgacggcguguacuucgccagcaccgagaagagcaacaucauccggggcuggaucuucggcaccacccuggacagcaagacccagagccugcugaucgugaauaacgccaccaacguggugaucaaggugugcgaguuccaguucugcaacgaccccuuccugggcguguaccacaagaacaacaagagcuggauggagagcgaguuccggguguacagcagcgccaacaacugcaccuucgaguacgugagccagcccuuccugauggaccuggagggcaagcagggcaacuucaagaaccugcgggaguucguguucaagaacaucgacggcuacuucaagaucuacagcaagcacaccccaaucaaccuggugcgggaucugccccagggcuucucagcccuggagccccugguggaccugcccaucggcaucaacaucacccgguuccagacccugcuggcccugcaccggagcuaccugaccccaggcgacagcagcagcggguggacagcaggcgcggcugcuuacuacgugggcuaccugcagccccggaccuuccugcugaaguacaacgagaacggcaccaucaccgacgccguggacugcgcccuggacccucugagcgagaccaagugcacccugaagagcuucaccguggagaagggcaucuaccagaccagcaacuuccgggugcagcccaccgagagcaucgugcgguuccccaacaucaccaaccugugccccuucggcgagguguucaacgccacccgguucgccagcguguacgccuggaaccggaagcggaucagcaacugcguggccgacuacagcgugcuguacaacagcgccagcuucagcaccuucaagugcuacggcgugagccccaccaagcugaacgaccugugcuucaccaacguguacgccgacagcuucgugauccguggcgacgaggugcggcagaucgcacccggccagacaggcaagaucgccgacuacaacuacaagcugcccgacgacuucaccggcugcgugaucgccuggaacagcaacaaccucgacagcaaggugggcggcaacuacaacuaccuguaccggcuguuccggaagagcaaccugaagcccuucgagcgggacaucagcaccgagaucuaccaagccggcuccaccccuugcaacggcguggagggcuucaacugcuacuucccucugcagagcuacggcuuccagcccaccuacggcgugggcuaccagcccuaccgggugguggugcugagcuucgagcugcugcacgccccagccaccguguguggccccaagaagagcaccaaccuggugaagaacaagugcgugaacuucaacuucaacggccuuaccggcaccggcgugcugaccgagagcaacaagaaauuccugcccuuucagcaguucggccgggacaucgacgacaccaccgacgcugugcgggauccccagacccuggagauccuggacaucaccccuugcagcuucggcggcgugagcgugaucaccccaggcaccaacaccagcaaccagguggccgugcuguaccagggcgugaacugcaccgaggugcccguggccauccacgccgaccagcugacacccaccuggcgggucuacagcaccggcagcaacguguuccagacccgggccgguugccugaucggcgccgagcacgugaacaacagcuacgagugcgacauccccaucggcgccggcaucugugccagcuaccagacccagaccaauucacaccggagggcaaggagcguggccagccagagcaucaucgccuacaccaugagccugggcgccgagaacagcguggccuacagcaacaacagcaucgccauccccaucaacuucaccaucagcgugaccaccgagauucugcccgugagcaugaccaagaccagcguggacugcaccauguacaucugcggcgacagcaccgagugcagcaaccugcugcugcaguacggcagcuucugcacccagcugaaccgggcccugaccggcaucgccguggagcaggacaagaacacccaggagguguucgcccaggugaagcagaucuacaagaccccucccaucaaggacuucggcggcuucaacuucagccagauccugcccgaccccagcaagcccagcaagcggagcuucaucgaggaccugcuguucaacaaggugacccuagccgacgccggcuucaucaagcaguacggcgacugccucggcgacauagccgcccgggaccugaucugcgcccagaaguucaacggccugaccgugcugccuccccugcugaccgacgagaugaucgcccaguacaccagcgcccuguuagccggaaccaucaccagcggcuggacuuucggcgcuggagccgcucugcagauccccuucgccaugcagauggccuaccgguucaacggcaucggcgugacccagaacgugcuguacgagaaccagaagcugaucgccaaccaguucaacagcgccaucggcaagauccaggacagccugagcagcaccgcuagcgcccugggcaagcugcaggacguggugaaccagaacgcccaggcccugaacacccuggugaagcagcugagcagcaacuucggcgccaucagcagcgugcugaacgacauccuggcccggcuggacaaggucgaggccgaggugcagaucgaccggcugaucacuggccggcugcagagccugcagaccuacgugacccagcagcugauccgggccgccgagauucgggccagcgccaaccuggccgccaccaagaugagcgagugcgugcugggccagagcaagcggguggacuucugcggcaagggcuaccaccugaugagcuuuccccagagcgcaccccacggagugguguuccugcacgugaccuacgugcccgcccaggagaagaacuucaccaccgccccagccaucugccacgacggcaaggcccacuuuccccgggagggcguguucgugagcaacggcacccacugguucgugacccagcggaacuucuacgagccccagaucaucaccacccacaacaccuucgugagcggcaacugcgacguggugaucggcaucgugaacaacaccguguacgauccccugcagcccgagcuggacagcuucaaggaggagcuggacaaguacuucaagaaucacaccagccccgacguggaccugggcgacaucagcggcaucaacgccagcguggugaacauccagaaggagaucgaucggcugaacgagguggccaagaaccugaacgagagccugaucgaccugcaggagcugggcaaguacgagcaguacaucaaguggcccugguacaucuggcugggcuucaucgccggccugaucgccaucgugauggugaccaucaugcugugcugcaugaccagcugcugcagcugccugaagggcuguugcagcugcggcagcugcugcaaguucgacgaggacgacagcgagcccgugcugaagggcgugaagcugcacuacaccugauaauaggcuggagccucgguggccuagcuucuugccccuugggccuccccccagccccuccuccccuuccugcacccguacccccguggucuuugaauaaagucugagugggcggcaaaaaaaaaaaaaaaaaaaaaaaaaaaaaaaaaaaaaaaaaaaaaaaaaaaaaaaaaaaaaaaaaaaaaaaaaaaaaaaaaaaaaaaaaaaaaaaaaaaa

SEQ ID NO: 26098 - RNA, 4095 nt, Artificial Sequence
  SARS-CoV-2/Wuhan/WIV05/2019__EPI_ISL_402128 spike protein mRNA gc (1-1273)(K417N_E484K_N501Y_D614G)
gggaaauaagagagaaaagaagaguaagaagaaauauaagaccccggcgccgccaccauguucguguuccuggugcugcugccccuggugagcagccagugcgugaaccugaccacccggacccagcugccaccagccuacaccaacagcuucacccggggcgucuacuaccccgacaagguguuccggagcagcguccugcacagcacccaggaccuguuccugcccuucuucagcaacgugaccugguuccacgccauccacgugagcggcaccaacggcaccaagcgguucgacaaccccgugcugcccuucaacgacggcguguacuucgccagcaccgagaagagcaacaucauccggggcuggaucuucggcaccacccuggacagcaagacccagagccugcugaucgugaauaacgccaccaacguggugaucaaggugugcgaguuccaguucugcaacgaccccuuccugggcguguacuaccacaagaacaacaagagcuggauggagagcgaguuccggguguacagcagcgccaacaacugcaccuucgaguacgugagccagcccuuccugauggaccuggagggcaagcagggcaacuucaagaaccugcgggaguucguguucaagaacaucgacggcuacuucaagaucuacagcaagcacaccccaaucaaccuggugcgggaucugccccagggcuucucagcccuggagccccugguggaccugcccaucggcaucaacaucacccgguuccagacccugcuggcccugcaccggagcuaccugaccccaggcgacagcagcagcggguggacagcaggcgcggcugcuuacuacgugggcuaccugcagccccggaccuuccugcugaaguacaacgagaacggcaccaucaccgacgccguggacugcgcccuggacccucugagcgagaccaagugcacccugaagagcuucaccguggagaagggcaucuaccagaccagcaacuuccgggugcagcccaccgagagcaucgugcgguuccccaacaucaccaaccugugccccuucggcgagguguucaacgccacccgguucgccagcguguacgccuggaaccggaagcggaucagcaacugcguggccgacuacagcgugcuguacaacagcgccagcuucagcaccuucaagugcuacggcgugagccccaccaagcugaacgaccugugcuucaccaacguguacgccgacagcuucgugauccguggcgacgaggugcggcagaucgcacccggccagacaggcaacaucgccgacuacaacuacaagcugcccgacgacuucaccggcugcgugaucgccuggaacagcaacaaccucgacagcaaggugggcggcaacuacaacuaccuguaccggcuguuccggaagagcaaccugaagcccuucgagcgggacaucagcaccgagaucuaccaagccggcuccaccccuugcaacggcgugaagggcuucaacugcuacuucccucugcagagcuacggcuuccagcccaccuacggcgugggcuaccagcccuaccgggugguggugcugagcuucgagcugcugcacgccccagccaccguguguggccccaagaagagcaccaaccuggugaagaacaagugcgugaacuucaacuucaacggccuuaccggcaccggcgugcugaccgagagcaacaagaaauuccugcccuuucagcaguucggccgggacaucgccgacaccaccgacgcugugcgggauccccagacccuggagauccuggacaucaccccuugcagcuucggcggcgugagcgugaucaccccaggcaccaacaccagcaaccagguggccgugcuguaccagggcgugaacugcaccgaggugcccguggccauccacgccgaccagcugacacccaccuggcgggucuacagcaccggcagcaacguguuccagacccgggccgguugccugaucggcgccgagcacgugaacaacagcuacgagugcgacauccccaucggcgccggcaucugugccagcuaccagacccagaccaauucaccccggagggcaaggagcguggccagccagagcaucaucgccuacaccaugagccugggcgccgagaacagcguggccuacagcaacaacagcaucgccauccccaccaacuucaccaucagcgugaccaccgagauucugcccgugagcaugaccaagaccagcguggacugcaccauguacaucugcggcgacagcaccgagugcagcaaccugcugcugcaguacggcagcuucugcacccagcugaaccgggcccugaccggcaucgccguggagcaggacaagaacacccaggagguguucgcccaggugaagcagaucuacaagaccccucccaucaaggacuucggcggcuucaacuucagccagauccugcccgaccccagcaagcccagcaagcggagcuucaucgaggaccugcuguucaacaaggugacccuagccgacgccggcuucaucaagcaguacggcgacugccucggcgacauagccgcccgggaccugaucugcgcccagaaguucaacggccugaccgugcugccuccccugcugaccgacgagaugaucgcccaguacaccagcgcccuguuagccggaaccaucaccagcggcuggacuuucggcgcuggagccgcucugcagauccccuucgccaugcagauggccuaccgguucaacggcaucggcgugacccagaacgugcuguacgagaaccagaagcugaucgccaaccaguucaacagcgccaucggcaagauccaggacagccugagcagcaccgcuagcgcccugggcaagcugcaggacguggugaaccagaacgcccaggcccugaacacccuggugaagcagcugagcagcaacuucggcgccaucagcagcgugcugaacgacauccugagccggcuggacaaggucgaggccgaggugcagaucgaccggcugaucacuggccggcugcagagccugcagaccuacgugacccagcagcugauccgggccgccgagauucgggccagcgccaaccuggccgccaccaagaugagcgagugcgugcugggccagagcaagcggguggacuucugcggcaagggcuaccaccugaugagcuuuccccagagcgcaccccacggagugguguuccugcacgugaccuacgugcccgcccaggagaagaacuucaccaccgccccagccaucugccacgacggcaaggcccacuuuccccgggagggcguguucgugagcaacggcacccacugguucgugacccagcggaacuucuacgagccccagaucaucaccaccgacaacaccuucgugagcggcaacugcgacguggugaucggcaucgugaacaacaccguguacgauccccugcagcccgagcuggacagcuucaaggaggagcuggacaaguacuucaagaaucacaccagccccgacguggaccugggcgacaucagcggcaucaacgccagcguggugaacauccagaaggagaucgaucggcugaacgagguggccaagaaccugaacgagagccugaucgaccugcaggagcugggcaaguacgagcaguacaucaaguggcccugguacaucuggcugggcuucaucgccggccugaucgccaucgugauggugaccaucaugcugugcugcaugaccagcugcugcagcugccugaagggcuguugcagcugcggcagcugcugcaaguucgacgaggacgacagcgagcccgugcugaagggcgugaagcugcacuacaccugauaauaggcuggagccucgguggccuagcuucuugccccuugggccuccccccagccccuccuccccuuccugcacccguacccccguggucuuugaauaaagucugagugggcggcaaaaaaaaaaaaaaaaaaaaaaaaaaaaaaaaaaaaaaaaaaaaaaaaaaaaaaaaaaaaaaaaaaaaaaaaaaaaaaaaaaaaaaaaaaaaaaaaaaaa

SEQ ID NO: 26099 - RNA, 4086 nt, Artificial Sequence
  SARS-CoV-2/Wuhan/WIV05/2019__EPI_ISL_402128 spike protein mRNA gc (1-1273)(L18F_D80A_D215G_L242del_A243del_L244del_R246I_K417N_E484 K_N501Y_D614G_A701V)
gggaaauaagagagaaaagaagaguaagaagaaauauaagaccccggcgccgccaccauguucguguuccuggugcugcugccccuggugagcagccagugcgugaacuucaccacccggacccagcugccaccagccuacaccaacagcuucacccggggcgucuacuaccccgacaagguguuccggagcagcguccugcacagcacccaggaccuguuccugcccuucuucagcaacgugaccugguuccacgccauccacgugagcggcaccaacggcaccaagcgguucgccaaccccgugcugcccuucaacgacggcguguacuucgccagcaccgagaagagcaacaucauccggggcuggaucuucggcaccacccuggacagcaagacccagagccugcugaucgugaauaacgccaccaacguggugaucaaggugugcgaguuccaguucugcaacgaccccuuccugggcguguacuaccacaagaacaacaagagcuggauggagagcgaguuccggguguacagcagcgccaacaacugcaccuucgaguacgugagccagcccuuccugauggaccuggagggcaagcagggcaacuucaagaaccugcgggaguucguguucaagaacaucgacggcuacuucaagaucuacagcaagcacaccccaaucaaccuggugcggggccugccccagggcuucucagcccuggagccccugguggaccugcccaucggcaucaacaucacccgguuccagacccugcacaucagcuaccugaccccaggcgacagcagcagcggguggacagcaggcgcggcugcuuacuacgugggcuaccugcagccccggaccuuccugcugaaguacaacgagaacggcaccaucaccgacgccguggacugcgcccuggacccucugagcgagaccaagugcacccugaagagcuucaccguggagaagggcaucuaccagaccagcaacuuccgggugcagcccaccgagagcaucgugcgguuccccaacaucaccaaccugugccccuucggcgagguguucaacgccacccgguucgccagcguguacgccuggaaccggaagcggaucagcaacugcguggccgacuacagcgugcuguacaacagcgccagcuucagcaccuucaagugcuacggcgugagccccaccaagcugaacgaccugugcuucaccaacguguacgccgacagcuucgugauccguggcgacgaggugcggcagaucgcacccggccagacaggcaacaucgccgacuacaacuacaagcugcccgacgacuucaccggcugcgugaucgccuggaacagcaacaaccucgacagcaaggugggcggcaacuacaacuaccuguaccggcuguuccggaagagcaaccugaagcccuucgagcgggacaucagcaccgagaucuaccaagccggcuccaccccuugcaacggcgugaagggcuucaacugcuacuucccucugcagagcuacggcuuccagcccaccuacggcgugggcuaccagcccuaccgggugguggugcugagcuucgagcugcugcacgccccagccaccguguguggccccaagaagagcaccaaccuggugaagaacaagugcgugaacuucaacuucaacggccuuaccggcaccggcgugcugaccgagagcaacaagaaauuccugcccuuucagcaguucggccgggacaucgccgacaccaccgacgcugugcgggauccccagacccuggagauccuggacaucaccccuugcagcuucggcggcgugagcgugaucaccccaggcaccaacaccagcaaccagguggccgugcuguaccagggcgugaacugcaccgaggugcccguggccauccacgccgaccagcugacacccaccuggcgggucuacagcaccggcagcaacguguuccagacccgggccgguugccugaucggcgccgagcacgugaacaacagcuacgagugcgacauccccaucggcgccggcaucugugccagcuaccagacccagaccaauucaccccggagggcaaggagcguggccagccagagcaucaucgccuacaccaugagccugggcguggagaacagcguggccuacagcaacaacagcaucgccauccccaccaacuucaccaucagcgugaccaccgagauucugcccgugagcaugaccaagaccagcguggacugcaccauguacaucugcggcgacagcaccgagugcagcaaccugcugcugcaguacggcagcuucugcacccagcugaaccgggcccugaccggcaucgccguggagcaggacaagaacacccaggagguguucgcccaggugaagcagaucuacaagaccccucccaucaaggacuucggcggcuucaacuucagccagauccugcccgaccccagcaagcccagcaagcggagcuucaucgaggaccugcuguucaacaaggugacccuagccgacgccggcuucaucaagcaguacggcgacugccucggcgacauagccgcccgggaccugaucugcgcccagaaguucaacggccugaccgugcugccuccccugcugaccgacgagaugaucgcccaguacaccagcgcccuguuagccggaaccaucaccagcggcuggacuuucggcgcuggagccgcucugcagauccccuucgccaugcagauggccuaccgguucaacggcaucggcgugacccagaacgugcuguacgagaaccagaagcugaucgccaaccaguucaacagcgccaucggcaagauccaggacagccugagcagcaccgcuagcgcccugggcaagcugcaggacguggugaaccagaacgcccaggcccugaacacccuggugaagcagcugagcagcaacuucggcgccaucagcagcgugcugaacgacauccugagccggcuggacaaggucgaggccgaggugcagaucgaccggcugaucacuggccggcugcagagccugcagaccuacgugacccagcagcugauccgggccgccgagauucgggccagcgccaaccuggccgccaccaagaugagcgagugcgugcugggccagagcaagcggguggacuucugcggcaagggcuaccaccugaugagcuuuccccagagcgcaccccacggagugguguuccugcacgugaccuacgugcccgcccaggagaagaacuucaccaccgccccagccaucugccacgacggcaaggcccacuuuccccgggagggcguguucgugagcaacggcacccacugguucgugacccagcggaacuucuacgagccccagaucaucaccaccgacaacaccuucgugagcggcaacugcgacguggugaucggcaucgugaacaacaccguguacgauccccugcagcccgagcuggacagcuucaaggaggagcuggacaaguacuucaagaaucacaccagccccgacguggaccugggcgacaucagcggcaucaacgccagcguggugaacauccagaaggagaucgaucggcugaacgagguggccaagaaccugaacgagagccugaucgaccugcaggagcugggcaaguacgagcaguacaucaaguggcccugguacaucuggcugggcuucaucgccggccugaucgccaucgugauggugaccaucaugcugugcugcaugaccagcugcugcagcugccugaagggcuguugcagcugcggcagcugcugcaaguucgacgaggacgacagcgagcccgugcugaagggcgugaagcugcacuacaccugauaauaggcuggagccucgguggccuagcuucuugccccuugggccuccccccagccccuccuccccuuccugcacccguacccccguggucuuugaauaaagucugagugggcggcaaaaaaaaaaaaaaaaaaaaaaaaaaaaaaaaaaaaaaaaaaaaaaaaaaaaaaaaaaaaaaaaaaaaaaaaaaaaaaaaaaaaaaaaaaaaaaaaaaaa

SEQ ID NO: 26100 - RNA, 4095 nt, Artificial Sequence
  SARS-CoV-2/Wuhan/WIV05/2019__EPI_ISL_402128 spike protein mRNA gc (1-1273)(E484K_D614G)
gggaaauaagagagaaaagaagaguaagaagaaauauaagaccccggcgccgccaccauguucguguuccuggugcugcugccccuggugagcagccagugcgugaaccugaccacccggacccagcugccaccagccuacaccaacagcuucacccggggcgucuacuaccccgacaagguguuccggagcagcguccugcacagcacccaggaccuguuccugcccuucuucagcaacgugaccugguuccacgccauccacgugagcggcaccaacggcaccaagcgguucgacaaccccgugcugcccuucaacgacggcguguacuucgccagcaccgagaagagcaacaucauccggggcuggaucuucggcaccacccuggacagcaagacccagagccugcugaucgugaauaacgccaccaacguggugaucaaggugugcgaguuccaguucugcaacgaccccuuccugggcguguacuaccacaagaacaacaagagcuggauggagagcgaguuccggguguacagcagcgccaacaacugcaccuucgaguacgugagccagcccuuccugauggaccuggagggcaagcagggcaacuucaagaaccugcgggaguucguguucaagaacaucgacggcuacuucaagaucuacagcaagcacaccccaaucaaccuggugcgggaucugccccagggcuucucagcccuggagccccugguggaccugcccaucggcaucaacaucacccgguuccagacccugcuggcccugcaccggagcuaccugaccccaggcgacagcagcagcggguggacagcaggcgcggcugcuuacuacgugggcuaccugcagccccggaccuuccugcugaaguacaacgagaacggcaccaucaccgacgccguggacugcgcccuggacccucugagcgagaccaagugcacccugaagagcuucaccguggagaagggcaucuaccagaccagcaacuuccgggugcagcccaccgagagcaucgugcgguuccccaacaucaccaaccugugccccuucggcgagguguucaacgccacccgguucgccagcguguacgccuggaaccggaagcggaucagcaacugcguggccgacuacagcgugcuguacaacagcgccagcuucagcaccuucaagugcuacggcgugagccccaccaagcugaacgaccugugcuucaccaacguguacgccgacagcuucgugauccguggcgacgaggugcggcagaucgcacccggccagacaggcaagaucgccgacuacaacuacaagcugcccgacgacuucaccggcugcgugaucgccuggaacagcaacaaccucgacagcaaggugggcggcaacuacaacuaccuguaccggcuguuccggaagagcaaccugaagcccuucgagcgggacaucagcaccgagaucuaccaagccggcuccaccccuugcaacggcgugaagggcuucaacugcuacuucccucugcagagcuacggcuuccagcccaccaacggcgugggcuaccagcccuaccgggugguggugcugagcuucgagcugcugcacgccccagccaccguguguggccccaagaagagcaccaaccuggugaagaacaagugcgugaacuucaacuucaacggccuuaccggcaccggcgugcugaccgagagcaacaagaaauuccugcccuuucagcaguucggccgggacaucgccgacaccaccgacgcugugcgggauccccagacccuggagauccuggacaucaccccuugcagcuucggcggcgugagcgugaucaccccaggcaccaacaccagcaaccagguggccgugcuguaccagggcgugaacugcaccgaggugcccguggccauccacgccgaccagcugacacccaccuggcgggucuacagcaccggcagcaacguguuccagacccgggccgguugccugaucggcgccgagcacgugaacaacagcuacgagugcgacauccccaucggcgccggcaucugugccagcuaccagacccagaccaauucaccccggagggcaaggagcguggccagccagagcaucaucgccuacaccaugagccugggcgccgagaacagcguggccuacagcaacaacagcaucgccauccccaccaacuucaccaucagcgugaccaccgagauucugcccgugagcaugaccaagaccagcguggacugcaccauguacaucugcggcgacagcaccgagugcagcaaccugcugcugcaguacggcagcuucugcacccagcugaaccgggcccugaccggcaucgccguggagcaggacaagaacacccaggagguguucgcccaggugaagcagaucuacaagaccccucccaucaaggacuucggcggcuucaacuucagccagauccugcccgaccccagcaagcccagcaagcggagcuucaucgaggaccugcuguucaacaaggugacccuagccgacgccggcuucaucaagcaguacggcgacugccucggcgacauagccgcccgggaccugaucugcgcccagaaguucaacggccugaccgugcugccuccccugcugaccgacgagaugaucgcccaguacaccagcgcccuguuagccggaaccaucaccagcggcuggacuuucggcgcuggagccgcucugcagauccccuucgccaugcagauggccuaccgguucaacggcaucggcgugacccagaacgugcuguacgagaaccagaagcugaucgccaaccaguucaacagcgccaucggcaagauccaggacagccugagcagcaccgcuagcgcccugggcaagcugcaggacguggugaaccagaacgcccaggcccugaacacccuggugaagcagcugagcagcaacuucggcgccaucagcagcgugcugaacgacauccugagccggcuggacaaggucgaggccgaggugcagaucgaccggcugaucacuggccggcugcagagccugcagaccuacgugacccagcagcugauccgggccgccgagauucgggccagcgccaaccuggccgccaccaagaugagcgagugcgugcugggccagagcaagcggguggacuucugcggcaagggcuaccaccugaugagcuuuccccagagcgcaccccacggagugguguuccugcacgugaccuacgugcccgcccaggagaagaacuucaccaccgccccagccaucugccacgacggcaaggcccacuuuccccgggagggcguguucgugagcaacggcacccacugguucgugacccagcggaacuucuacgagccccagaucaucaccaccgacaacaccuucgugagcggcaacugcgacguggugaucggcaucgugaacaacaccguguacgauccccugcagcccgagcuggacagcuucaaggaggagcuggacaaguacuucaagaaucacaccagccccgacguggaccugggcgacaucagcggcaucaacgccagcguggugaacauccagaaggagaucgaucggcugaacgagguggccaagaaccugaacgagagccugaucgaccugcaggagcugggcaaguacgagcaguacaucaaguggcccugguacaucuggcugggcuucaucgccggccugaucgccaucgugauggugaccaucaugcugugcugcaugaccagcugcugcagcugccugaagggcuguugcagcugcggcagcugcugcaaguucgacgaggacgacagcgagcccgugcugaagggcgugaagcugcacuacaccugauaauaggcuggagccucgguggccuagcuucuugccccuugggccuccccccagccccuccuccccuuccugcacccguacccccguggucuuugaauaaagucugagugggcggcaaaaaaaaaaaaaaaaaaaaaaaaaaaaaaaaaaaaaaaaaaaaaaaaaaaaaaaaaaaaaaaaaaaaaaaaaaaaaaaaaaaaaaaaaaaaaaaaaaaa

SEQ ID NO: 26101 - RNA, 4095 nt, Artificial Sequence
  SARS-CoV-2/Wuhan/WIV05/2019__EPI_ISL_402128 spike protein mRNA gc (1-1273)(L18F_T20N_P26S_D138Y_R190S_K417T_E484K_N501Y_D614G_H655Y _T1027I)
gggaaauaagagagaaaagaagaguaagaagaaauauaagaccccggcgccgccaccauguucguguuccuggugcugcugccccuggugagcagccagugcgugaacuucaccaaccggacccagcugccaagcgccuacaccaacagcuucacccggggcgucuacuaccccgacaagguguuccggagcagcguccugcacagcacccaggaccuguuccugcccuucuucagcaacgugaccugguuccacgccauccacgugagcggcaccaacggcaccaagcgguucgacaaccccgugcugcccuucaacgacggcguguacuucgccagcaccgagaagagcaacaucauccggggcuggaucuucggcaccacccuggacagcaagacccagagccugcugaucgugaauaacgccaccaacguggugaucaaggugugcgaguuccaguucugcaacuaccccuuccugggcguguacuaccacaagaacaacaagagcuggauggagagcgaguuccggguguacagcagcgccaacaacugcaccuucgaguacgugagccagcccuuccugauggaccuggagggcaagcagggcaacuucaagaaccugagcgaguucguguucaagaacaucgacggcuacuucaagaucuacagcaagcacaccccaaucaaccuggugcgggaucugccccagggcuucucagcccuggagccccugguggaccugcccaucggcaucaacaucacccgguuccagacccugcuggcccugcaccggagcuaccugaccccaggcgacagcagcagcggguggacagcaggcgcggcugcuuacuacgugggcuaccugcagccccggaccuuccugcugaaguacaacgagaacggcaccaucaccgacgccguggacugcgcccuggacccucugagcgagaccaagugcacccugaagagcuucaccguggagaagggcaucuaccagaccagcaacuuccgggugcagcccaccgagagcaucgugcgguuccccaacaucaccaaccugugccccuucggcgagguguucaacgccacccgguucgccagcguguacgccuggaaccggaagcggaucagcaacugcguggccgacuacagcgugcuguacaacagcgccagcuucagcaccuucaagugcuacggcgugagccccaccaagcugaacgaccugugcuucaccaacguguacgccgacagcuucgugauccguggcgacgaggugcggcagaucgcacccggccagacaggcaccaucgccgacuacaacuacaagcugcccgacgacuucaccggcugcgugaucgccuggaacagcaacaaccucgacagcaaggugggcggcaacuacaacuaccuguaccggcuguuccggaagagcaaccugaagcccuucgagcgggacaucagcaccgagaucuaccaagccggcuccaccccuugcaacggcgugaagggcuucaacugcuacuucccucugcagagcuacggcuuccagcccaccuacggcgugggcuaccagcccuaccgggugguggugcugagcuucgagcugcugcacgccccagccaccguguguggccccaagaagagcaccaaccuggugaagaacaagugcgugaacuucaacuucaacggccuuaccggcaccggcgugcugaccgagagcaacaagaaauuccugcccuuucagcaguucggccgggacaucgccgacaccaccgacgcugugcgggauccccagacccuggagauccuggacaucaccccuugcagcuucggcggcgugagcgugaucaccccaggcaccaacaccagcaaccagguggccgugcuguaccagggcgugaacugcaccgaggugcccguggccauccacgccgaccagcugacacccaccuggcgggucuacagcaccggcagcaacguguuccagacccgggccgguugccugaucggcgccgaguacgugaacaacagcuacgagugcgacauccccaucggcgccggcaucugugccagcuaccagacccagaccaauucaccccggagggcaaggagcguggccagccagagcaucaucgccuacaccaugagccugggcgccgagaacagcguggccuacagcaacaacagcaucgccauccccaccaacuucaccaucagcgugaccaccgagauucugcccgugagcaugaccaagaccagcguggacugcaccauguacaucugcggcgacagcaccgagugcagcaaccugcugcugcaguacggcagcuucugcacccagcugaaccgggcccugaccggcaucgccguggagcaggacaagaacacccaggagguguucgcccaggugaagcagaucuacaagaccccucccaucaaggacuucggcggcuucaacuucagccagauccugcccgaccccagcaagcccagcaagcggagcuucaucgaggaccugcuguucaacaaggugacccuagccgacgccggcuucaucaagcaguacggcgacugccucggcgacauagccgcccgggaccugaucugcgcccagaaguucaacggccugaccgugcugccuccccugcugaccgacgagaugaucgcccaguacaccagcgcccuguuagccggaaccaucaccagcggcuggacuuucggcgcuggagccgcucugcagauccccuucgccaugcagauggccuaccgguucaacggcaucggcgugacccagaacgugcuguacgagaaccagaagcugaucgccaaccaguucaacagcgccaucggcaagauccaggacagccugagcagcaccgcuagcgcccugggcaagcugcaggacguggugaaccagaacgcccaggcccugaacacccuggugaagcagcugagcagcaacuucggcgccaucagcagcgugcugaacgacauccugagccggcuggacaaggucgaggccgaggugcagaucgaccggcugaucacuggccggcugcagagccugcagaccuacgugacccagcagcugauccgggccgccgagauucgggccagcgccaaccuggccgccaucaagaugagcgagugcgugcugggccagagcaagcggguggacuucugcggcaagggcuaccaccugaugagcuuuccccagagcgcaccccacggagugguguuccugcacgugaccuacgugcccgcccaggagaagaacuucaccaccgccccagccaucugccacgacggcaaggcccacuuuccccgggagggcguguucgugagcaacggcacccacugguucgugacccagcggaacuucuacgagccccagaucaucaccaccgacaacaccuucgugagcggcaacugcgacguggugaucggcaucgugaacaacaccguguacgauccccugcagcccgagcuggacagcuucaaggaggagcuggacaaguacuucaagaaucacaccagccccgacguggaccugggcgacaucagcggcaucaacgccagcguggugaacauccagaaggagaucgaucggcugaacgagguggccaagaaccugaacgagagccugaucgaccugcaggagcugggcaaguacgagcaguacaucaaguggcccugguacaucuggcugggcuucaucgccggccugaucgccaucgugauggugaccaucaugcugugcugcaugaccagcugcugcagcugccugaagggcuguugcagcugcggcagcugcugcaaguucgacgaggacgacagcgagcccgugcugaagggcgugaagcugcacuacaccugauaauaggcuggagccucgguggccuagcuucuugccccuugggccuccccccagccccuccuccccuuccugcacccguacccccguggucuuugaauaaagucugagugggcggcaaaaaaaaaaaaaaaaaaaaaaaaaaaaaaaaaaaaaaaaaaaaaaaaaaaaaaaaaaaaaaaaaaaaaaaaaaaaaaaaaaaaaaaaaaaaaaaaaaaa

SEQ ID NO: 26102 - RNA, 4095 nt, Artificial Sequence
  SARS-CoV-2/Wuhan/WIV05/2019__EPI_ISL_402128 spike protein mRNA gc (1-1273)(S13I_W152C_L452R_D614G)
gggaaauaagagagaaaagaagaguaagaagaaauauaagaccccggcgccgccaccauguucguguuccuggugcugcugccccuggugagcauccagugcgugaaccugaccacccggacccagcugccaccagccuacaccaacagcuucacccggggcgucuacuaccccgacaagguguuccggagcagcguccugcacagcacccaggaccuguuccugcccuucuucagcaacgugaccugguuccacgccauccacgugagcggcaccaacggcaccaagcgguucgacaaccccgugcugcccuucaacgacggcguguacuucgccagcaccgagaagagcaacaucauccggggcuggaucuucggcaccacccuggacagcaagacccagagccugcugaucgugaauaacgccaccaacguggugaucaaggugugcgaguuccaguucugcaacgaccccuuccugggcguguacuaccacaagaacaacaagagcugcauggagagcgaguuccggguguacagcagcgccaacaacugcaccuucgaguacgugagccagcccuuccugauggaccuggagggcaagcagggcaacuucaagaaccugcgggaguucguguucaagaacaucgacggcuacuucaagaucuacagcaagcacaccccaaucaaccuggugcgggaucugccccagggcuucucagcccuggagccccugguggaccugcccaucggcaucaacaucacccgguuccagacccugcuggcccugcaccggagcuaccugaccccaggcgacagcagcagcggguggacagcaggcgcggcugcuuacuacgugggcuaccugcagccccggaccuuccugcugaaguacaacgagaacggcaccaucaccgacgccguggacugcgcccuggacccucugagcgagaccaagugcacccugaagagcuucaccguggagaagggcaucuaccagaccagcaacuuccgggugcagcccaccgagagcaucgugcgguuccccaacaucaccaaccugugccccuucggcgagguguucaacgccacccgguucgccagcguguacgccuggaaccggaagcggaucagcaacugcguggccgacuacagcgugcuguacaacagcgccagcuucagcaccuucaagugcuacggcgugagccccaccaagcugaacgaccugugcuucaccaacguguacgccgacagcuucgugauccguggcgacgaggugcggcagaucgcacccggccagacaggcaagaucgccgacuacaacuacaagcugcccgacgacuucaccggcugcgugaucgccuggaacagcaacaaccucgacagcaaggugggcggcaacuacaacuaccgcuaccggcuguuccggaagagcaaccugaagcccuucgagcgggacaucagcaccgagaucuaccaagccggcuccaccccuugcaacggcguggagggcuucaacugcuacuucccucugcagagcuacggcuuccagcccaccaacggcgugggcuaccagcccuaccgggugguggugcugagcuucgagcugcugcacgccccagccaccguguguggccccaagaagagcaccaaccuggugaagaacaagugcgugaacuucaacuucaacggccuuaccggcaccggcgugcugaccgagagcaacaagaaauuccugcccuuucagcaguucggccgggacaucgccgacaccaccgacgcugugcgggauccccagacccuggagauccuggacaucaccccuugcagcuucggcggcgugagcgugaucaccccaggcaccaacaccagcaaccagguggccgugcuguaccagggcgugaacugcaccgaggugcccguggccauccacgccgaccagcugacacccaccuggcgggucuacagcaccggcagcaacguguuccagacccgggccgguugccugaucggcgccgagcacgugaacaacagcuacgagugcgacauccccaucggcgccggcaucugugccagcuaccagacccagaccaauucaccccggagggcaaggagcguggccagccagagcaucaucgccuacaccaugagccugggcgccgagaacagcguggccuacagcaacaacagcaucgccauccccaccaacuucaccaucagcgugaccaccgagauucugcccgugagcaugaccaagaccagcguggacugcaccauguacaucugcggcgacagcaccgagugcagcaaccugcugcugcaguacggcagcuucugcacccagcugaaccgggcccugaccggcaucgccguggagcaggacaagaacacccaggagguguucgcccaggugaagcagaucuacaagaccccucccaucaaggacuucggcggcuucaacuucagccagauccugcccgaccccagcaagcccagcaagcggagcuucaucgaggaccugcuguucaacaaggugacccuagccgacgccggcuucaucaagcaguacggcgacugccucggcgacauagccgcccgggaccugaucugcgcccagaaguucaacggccugaccgugcugccuccccugcugaccgacgagaugaucgcccaguacaccagcgcccuguuagccggaaccaucaccagcggcuggacuuucggcgcuggagccgcucugcagauccccuucgccaugcagauggccuaccgguucaacggcaucggcgugacccagaacgugcuguacgagaaccagaagcugaucgccaaccaguucaacagcgccaucggcaagauccaggacagccugagcagcaccgcuagcgcccugggcaagcugcaggacguggugaaccagaacgcccaggcccugaacacccuggugaagcagcugagcagcaacuucggcgccaucagcagcgugcugaacgacauccugagccggcuggacaaggucgaggccgaggugcagaucgaccggcugaucacuggccggcugcagagccugcagaccuacgugacccagcagcugauccgggccgccgagauucgggccagcgccaaccuggccgccaccaagaugagcgagugcgugcugggccagagcaagcggguggacuucugcggcaagggcuaccaccugaugagcuuuccccagagcgcaccccacggagugguguuccugcacgugaccuacgugcccgcccaggagaagaacuucaccaccgccccagccaucugccacgacggcaaggcccacuuuccccgggagggcguguucgugagcaacggcacccacugguucgugacccagcggaacuucuacgagccccagaucaucaccaccgacaacaccuucgugagcggcaacugcgacguggugaucggcaucgugaacaacaccguguacgauccccugcagcccgagcuggacagcuucaaggaggagcuggacaaguacuucaagaaucacaccagccccgacguggaccugggcgacaucagcggcaucaacgccagcguggugaacauccagaaggagaucgaucggcugaacgagguggccaagaaccugaacgagagccugaucgaccugcaggagcugggcaaguacgagcaguacaucaaguggcccugguacaucuggcugggcuucaucgccggccugaucgccaucgugauggugaccaucaugcugugcugcaugaccagcugcugcagcugccugaagggcuguugcagcugcggcagcugcugcaaguucgacgaggacgacagcgagcccgugcugaagggcgugaagcugcacuacaccugauaauaggcuggagccucgguggccuagcuucuugccccuugggccuccccccagccccuccuccccuuccugcacccguacccccguggucuuugaauaaagucugagugggcggcaaaaaaaaaaaaaaaaaaaaaaaaaaaaaaaaaaaaaaaaaaaaaaaaaaaaaaaaaaaaaaaaaaaaaaaaaaaaaaaaaaaaaaaaaaaaaaaaaaaa

SEQ ID NO: 26103 - RNA, 4095 nt, Artificial Sequence
  SARS-CoV-2/Wuhan/WIV05/2019__EPI_ISL_402128 spike protein mRNA gc (1-1273)
gggaaauaagagagaaaagaagaguaagaagaaauauaagaccccggcgccgccaccauguucguguuccuggugcugcugccccuggugagcagccagugcgugaaccugaccacccggacccagcugcccccugccuacaccaacagcuucacccggggcguguacuaccccgacaagguguuccggagcagcgugcugcacagcacccaggaccuguuccugcccuucuucagcaacgugaccugguuccacgccauccacgugagcggcaccaacggcaccaagcgguucgacaacccagugcugcccuucaacgacggcguguacuucgccagcaccgagaagucaaacaucauccggggcuggaucuucggcaccacccuggacagcaagacacagagccugcugaucgugaacaacgccaccaacguggugaucaaggugugcgaguuucaguucugcaacgaccccuuccugggcguguacuaccacaagaacaacaagagcuggauggagagcgaguuccgggucuacagcagcgcuaacaauugcaccuucgaguacgugagccagcccuuccugauggaccucgagggcaagcagggcaacuucaagaaccugcgggaguucguguucaagaacaucgauggcuacuucaagaucuacagcaagcacacccccaucaaccuggugcgggaccugccccagggauucagcgcccuggagccucugguggaccugcccaucggcaucaacaucaccagguuccagacccugcuggcccugcaccggagcuaccugacccccggcgacagcagcagcggcuggaccgccggcgccgccgcauacuacgugggcuaccugcagccacggaccuuccugcugaaguacaacgagaacggcaccaucaccgacgccguggacugcgcccuggacccccugagcgagaccaagugcacccuaaagagcuucaccguggagaagggcaucuaccagaccagcaacuuccgggugcagcccacugagagcaucgugcgguuccccaacauuaccaaccugugucccuucggcgagguguucaacgccacccgguucgccagcguguacgccuggaaccggaagcggaucagcaacugcguggccgacuacagcgugcuguacaacagcgccagcuucagcaccuucaagugcuacggcgugagcccuaccaagcugaacgaccugugcuucaccaacguguacgcugacagcuucgugauccggggcgacgaggugcggcagaucgcccccggccagaccggcaagaucgccgacuacaacuacaagcugcccgacgacuucaccggcugcgugaucgccuggaacagcaacaaccuggacagcaaggugggcggcaacuacaacuaccuguaccggcuguuccguaagagcaaccugaagccauucgagcgggacaucagcaccgagaucuaccaggccggcagcacccccugcaacgguguggagggcuuuaacugcuacuucccccugcagagcuacggcuuccagcccaccaacggcgugggcuaccagcccuaccgggugguggugcugagcuucgagcugcugcacgcccccgccaccgugugcggcccuaaaaagagcaccaaccuggugaagaacaagugcgugaacuucaauuucaacggccugaccggcaccggcgugcugaccgagagcaacaagaaguuccugcccuuccagcaguucggccgggauaucgccgacaccaccgacgcagugcgggacccccagacccuggagauccuggacaucaccccaugcagcuucggcggcgugagcgucaucacccccggcacaaacaccagcaaccagguggccgugcuguaccaggacgugaacugcaccgaggugcccguggccauccacgccgaccagcugacccccaccuggcggguguacagcaccggaagcaacguguuccagacccgggccggcugccugaucggcgccgagcacgugaacaacuccuacgagugcgacauccccaucggcgcuggcaucugcgccagcuaccagacccagaccaacagcccccggcgggcccggagcguggccagccagagcaucaucgccuacaccaugagcuuaggcgccgagaacagcguggccuacagcaacaacagcaucgcgaucccuaccaacuucaccaucagcgugaccaccgagauacugcccgugagcaugaccaagaccagcguggacuguaccauguacaucugcggcgacagcaccgagugcagcaaccugcugcugcaguacggcagcuucugcacccagcugaaccgggcccugaccggcaucgccguggagcaggacaagaacacccaagagguguucgcccaggugaagcagaucuacaagacucccccaaucaaggacuucggcggcuucaacuucagccagauccugcccgaccccagcaagcccagcaagcggagcuucaucgaggaccugcuguucaacaaggugacccuggccgacgccggcuucaucaagcaguacggcgauugccugggcgacaucgccgcucgggaccugaucugcgcccagaaguucaacgggcugaccgugcugcccccucugcugaccgacgagaugaucgcccaguacaccagcgcccugcuugccggcaccaucaccagcggcuggaccuucggcgccggcgcagcccugcagauccccuucgccaugcagauggccuaccgguucaacggcaucggcgugacccagaacgugcuguacgagaaccagaagcugaucgccaaccaguucaacagcgccaucggcaagauccaggacagccugagcagcaccgccagcgcccugggcaagcugcaggacguggugaaccagaacgcucaggcccugaacacccuggugaagcagcugagcagcaacuucggcgccaucagcucagugcugaaugacauccugagcaggcuggacaagguggaggccgaggugcagaucgaccggcugaucaccggccggcugcagagccugcagaccuacgugacccagcagcugauccgggccgccgagauccgggccagcgccaaccuggcagccaccaagaugagcgagugcgugcugggccagagcaagcggguggacuuuugcggcaagggcuaccaccugaugagcuucccccagagcgccccacacggcgugguguuccuccacgucacauacgugcccgcccaggagaagaacuucaccaccgcccccgccauuugccacgacggcaaggcucacuucccccgggagggcguguucgugagcaacggaacccacugguucgugacccagcggaacuucuacgagccccagaucaucaccaccgacaacaccuucgugagcggcaacugcgacguggugaucggcaucgugaacaacaccguguacgacccccugcagccugagcuggacagcuucaaggaggagcuggacaaguacuucaagaaccacaccagccccgauguggaccugggcgacaucagcggcaucaacgccagcguggugaacauccagaaggagaucgaccggcugaacgagguggccaagaaccugaacgagagccugaucgaccugcaggagcugggcaaguacgagcaguacaucaaguggcccugguacaucuggcugggcuucaucgccggccugaucgccaucgugauggugaccaucaugcugugcugcaugaccagcugcuguagcugccugaagggcugcugcagcugcggcagcugcugcaaguucgacgaggacgacagcgagccagugcugaagggcgugaagcugcacuacaccugauaauaggcuggagccucgguggccuagcuucuugccccuugggccuccccccagccccuccuccccuuccugcacccguacccccguggucuuugaauaaagucugagugggcggcaaaaaaaaaaaaaaaaaaaaaaaaaaaaaaaaaaaaaaaaaaaaaaaaaaaaaaaaaaaaaaaaaaaaaaaaaaaaaaaaaaaaaaaaaaaaaaaaaaaa

SEQ ID NO: 26104 - RNA, 4095 nt, Artificial Sequence
  SARS-CoV-2/Wuhan/WIV05/2019__EPI_ISL_402128 spike protein mRNA gc (1-1273)(D614G)
gggaaauaagagagaaaagaagaguaagaagaaauauaagaccccggcgccgccaccauguucguguuccuggugcugcugccccuggugagcagccagugcgugaaccugaccacccggacccagcugcccccugccuacaccaacagcuucacccggggcguguacuaccccgacaagguguuccggagcagcgugcugcacagcacccaggaccuguuccugcccuucuucagcaacgugaccugguuccacgccauccacgugagcggcaccaacggcaccaagcgguucgacaacccagugcugcccuucaacgacggcguguacuucgccagcaccgagaagucaaacaucauccggggcuggaucuucggcaccacccuggacagcaagacacagagccugcugaucgugaacaacgccaccaacguggugaucaaggugugcgaguuucaguucugcaacgaccccuuccugggcguguacuaccacaagaacaacaagagcuggauggagagcgaguuccgggucuacagcagcgcuaacaauugcaccuucgaguacgugagccagcccuuccugauggaccucgagggcaagcagggcaacuucaagaaccugcgggaguucguguucaagaacaucgauggcuacuucaagaucuacagcaagcacacccccaucaaccuggugcgggaccugccccagggauucagcgcccuggagccucugguggaccugcccaucggcaucaacaucaccagguuccagacccugcuggcccugcaccggagcuaccugacccccggcgacagcagcagcggcuggaccgccggcgccgccgcauacuacgugggcuaccugcagccacggaccuuccugcugaaguacaacgagaacggcaccaucaccgacgccguggacugcgcccuggacccccugagcgagaccaagugcacccuaaagagcuucaccguggagaagggcaucuaccagaccagcaacuuccgggugcagcccacugagagcaucgugcgguuccccaacauuaccaaccugugucccuucggcgagguguucaacgccacccgguucgccagcguguacgccuggaaccggaagcggaucagcaacugcguggccgacuacagcgugcuguacaacagcgccagcuucagcaccuucaagugcuacggcgugagcccuaccaagcugaacgaccugugcuucaccaacguguacgcugacagcuucgugauccggggcgacgaggugcggcagaucgcccccggccagaccggcaagaucgccgacuacaacuacaagcugcccgacgacuucaccggcugcgugaucgccuggaacagcaacaaccuggacagcaaggugggcggcaacuacaacuaccuguaccggcuguuccguaagagcaaccugaagccauucgagcgggacaucagcaccgagaucuaccaggccggcagcacccccugcaacgguguggagggcuuuaacugcuacuucccccugcagagcuacggcuuccagcccaccaacggcgugggcuaccagcccuaccgggugguggugcugagcuucgagcugcugcacgcccccgccaccgugugcggcccuaaaaagagcaccaaccuggugaagaacaagugcgugaacuucaauuucaacggccugaccggcaccggcgugcugaccgagagcaacaagaaguuccugcccuuccagcaguucggccgggauaucgccgacaccaccgacgcagugcgggacccccagacccuggagauccuggacaucaccccaugcagcuucggcggcgugagcgucaucacccccggcacaaacaccagcaaccagguggccgugcuguaccagggagugaacugcaccgaggugcccguggccauccacgccgaccagcugacccccaccuggcggguguacagcaccggcagcaacguguuccagacccgggccggcugccugaucggcgccgagcacgugaacaacuccuacgagugcgacauccccaucggcgcuggcaucugcgccagcuaccagacccagaccaacagcccccggcgggcccggagcguggccagccagagcaucaucgccuacaccaugagcuuaggcgccgagaacagcguggccuacagcaacaacagcaucgcgaucccuaccaacuucaccaucagcgugaccaccgagauacugcccgugagcaugaccaagaccagcguggacuguaccauguacaucugcggcgacagcaccgagugcagcaaccugcugcugcaguacggcagcuucugcacccagcugaaccgggcccugaccggcaucgccguggagcaggacaagaacacccaagagguguucgcccaggugaagcagaucuacaagacucccccaaucaaggacuucggcggcuucaacuucagccagauccugcccgaccccagcaagcccagcaagcggagcuucaucgaggaccugcuguucaacaaggugacccuggccgacgccggcuucaucaagcaguacggcgacugccugggggauaucgccgcucgggaccugaucugcgcccagaaguucaacggccugaccgugcugcccccucugcugaccgacgagaugaucgcccaguacaccagcgcccugcuugccggcaccaucaccagcggcuggaccuucggcgccggcgcagcccugcagauccccuucgccaugcagauggccuaccgguucaacggcaucggcgugacccagaacgugcuguacgagaaccagaagcugaucgccaaccaguucaacagcgccaucggcaagauccaggacagccugagcagcaccgccagcgcccugggcaagcugcaggacguggugaaccagaacgcucaggcccugaacacccuggugaagcagcugagcagcaacuucggcgccaucagcucagugcugaaugacauccugagcaggcuggacaagguggaggccgaggugcagaucgaccggcugaucaccggccggcugcagagccugcagaccuacgugacccagcagcugauccgggccgccgagauccgggccagcgccaaccuggcagccaccaagaugagcgagugcgugcugggccagagcaagcggguggacuuuugcggcaagggcuaccaccugaugagcuucccccagagcgccccacacggcgugguguuccuccacgucacauacgugcccgcccaggagaagaacuucaccaccgcccccgccauuugccacgacggcaaggcucacuucccccgggagggaguguucgugagcaacggcacccacugguucgugacccagcggaacuucuacgagccccagaucaucaccaccgacaacaccuucgugagcggcaacugcgacguggugaucggcaucgugaacaacaccguguacgacccccugcagccugagcuggacagcuucaaggaggagcuggacaaguacuucaagaaccacaccagccccgacguggaucugggcgacaucagcggcaucaacgccagcguggugaacauccagaaggagaucgaccggcugaacgagguggccaagaaccugaacgagagccugaucgaccugcaggagcugggcaaguacgagcaguacaucaaguggcccugguacaucuggcugggcuucaucgccggccugaucgccaucgugauggugaccaucaugcugugcugcaugaccagcugcuguagcugccugaagggcugcugcagcugcggcagcugcugcaaguucgacgaggacgacagcgagccagugcugaagggcgugaagcugcacuacaccugauaauaggcuggagccucgguggccuagcuucuugccccuugggccuccccccagccccuccuccccuuccugcacccguacccccguggucuuugaauaaagucugagugggcggcaaaaaaaaaaaaaaaaaaaaaaaaaaaaaaaaaaaaaaaaaaaaaaaaaaaaaaaaaaaaaaaaaaaaaaaaaaaaaaaaaaaaaaaaaaaaaaaaaaaa

SEQ ID NO: 26105 - RNA, 4095 nt, Artificial Sequence
  SARS-CoV-2/Wuhan/WIV05/2019__EPI_ISL_402128 spike protein mRNA gc (1-1273)(A222V_D614G)
gggaaauaagagagaaaagaagaguaagaagaaauauaagaccccggcgccgccaccauguucguguuccuggugcugcugccccuggugagcagccagugcgugaaccugaccacccggacccagcugcccccugccuacaccaacagcuucacccggggcguguacuaccccgacaagguguuccggagcagcgugcugcacagcacccaggaccuguuccugcccuucuucagcaacgugaccugguuccacgccauccacgugagcggcaccaacggcaccaagcgguucgacaacccagugcugcccuucaacgacggcguguacuucgccagcaccgagaagucaaacaucauccggggcuggaucuucggcaccacccuggacagcaagacacagagccugcugaucgugaacaacgccaccaacguggugaucaaggugugcgaguuucaguucugcaacgaccccuuccugggcguguacuaccacaagaacaacaagagcuggauggagagcgaguuccgggucuacagcagcgcuaacaauugcaccuucgaguacgugagccagcccuuccugauggaccucgagggcaagcagggcaacuucaagaaccugcgggaguucguguucaagaacaucgauggcuacuucaagaucuacagcaagcacacccccaucaaccuggugcgggaccugccccagggauucagcgugcuggagccucugguggaccugcccaucggcaucaacaucaccagguuccagacccugcuggcccugcaccggagcuaccugacccccggcgacagcagcagcggcuggaccgccggcgccgccgccuacuacgugggcuaccugcagccacggaccuuccugcugaaguacaacgagaacggcaccaucaccgacgcaguggacugcgcccuggacccccugagcgagaccaagugcacccuaaagagcuucaccguggagaagggcaucuaccagaccagcaacuuccgggugcagcccacugagagcaucgugcgguuccccaacauuaccaaccugugucccuucggcgagguguucaacgccacccgguucgccagcguguacgccuggaaccggaagcggaucagcaacugcguggccgacuacagcgugcuguacaacagcgccagcuucagcaccuucaagugcuacggcgugagcccuaccaagcugaacgaccugugcuucaccaacguguacgccgacagcuucgugauccggggcgacgaggugcggcagaucgcucccggccagaccggcaagaucgccgacuacaacuacaagcugcccgacgacuucaccggcugcgugaucgccuggaacagcaacaaccuggacagcaaggugggcggcaacuacaacuaccuguaccggcuguuccguaagagcaaccugaagccauucgagcgggacaucagcaccgagaucuaccaggccggcagcacccccugcaacgguguggagggcuuuaacugcuacuucccccugcagagcuacggcuuccagcccaccaacggcgugggcuaccagcccuaccgggugguggugcugagcuucgagcugcugcacgcccccgccaccgugugcggcccuaaaaagagcaccaaccuggugaagaacaagugcgugaacuucaauuucaacggccugaccggcaccggcgugcugaccgagagcaacaagaaguuccugcccuuccagcaguucggccgggauaucgccgacaccaccgacgccgugcgggacccccagacccuggagauccuggacaucaccccaugcagcuucggcggcgucagcgugaucacccccggcacaaacaccagcaaccagguggcagugcuguaccagggagugaacugcaccgaggugcccguggccauccacgccgaccagcugacccccaccuggcggguguacagcaccggcagcaacguguuccagacccgggccggcugccugaucggcgccgagcacgugaacaacuccuacgagugcgacauccccaucggcgccggcaucugcgcuagcuaccagacccagaccaacagcccccggcgggcccggagcguggccagccagagcaucaucgccuacaccaugagcuuaggcgccgagaacagcguggccuacagcaacaacagcaucgccaucccuaccaacuucaccaucagcgugaccaccgagauacugcccgugagcaugaccaagaccagcguggacuguaccauguacaucugcggcgacagcaccgagugcagcaaccugcugcugcaguacggcagcuucugcacccagcugaaccgggcgcugaccggcaucgccguggagcaggacaagaacacccaagagguguucgcccaggugaagcagaucuacaagacucccccaaucaaggacuucggcggcuucaacuucagccagauccugcccgaccccagcaagcccagcaagcggagcuucaucgaggaccugcuguucaacaaggugacccuggccgacgccggcuucaucaagcaguacggcgacugccugggggauaucgccgcccgggaccugaucugcgcucagaaguucaacggccugaccgugcugcccccucugcugaccgacgagaugaucgcccaguacaccagcgcccugcuugccggcaccaucaccagcggcuggaccuucggcgccggcgccgcacugcagauccccuucgccaugcagauggccuaccgguucaacggcaucggcgugacccagaacgugcuguacgagaaccagaagcugaucgccaaccaguucaacagcgccaucggcaagauccaggacagccugagcagcaccgccagcgcccugggcaagcugcaggacguggugaaccagaacgcccaggcucugaacacccuggugaagcagcugagcagcaacuucggcgccaucagcucagugcugaaugacauccugagcaggcuggacaagguggaggccgaggugcagaucgaccggcugaucaccggccggcugcagagccugcagaccuacgugacccagcagcugauccgggccgccgagauccgggccagcgccaaccuggccgcaaccaagaugagcgagugcgugcugggccagagcaagcggguggacuuuugcggcaagggcuaccaccugaugagcuucccccagagcgccccacacggcguggucuuccuccacgugacauacgugcccgcccaggagaagaacuucaccaccgcccccgccauuugccacgacggcaaggcccacuucccccgggagggaguguucgugagcaacggcacccacugguucgugacccagcggaacuucuacgagccccagaucaucaccaccgacaacaccuucgugagcggcaacugcgacguggugaucggcaucgugaacaacaccguguacgacccccugcagccugagcuggacagcuucaaggaggagcuggacaaguacuucaagaaccacaccagccccgacguggaucugggcgacaucagcggcaucaacgcuagcguggugaacauccagaaggagaucgaccggcugaacgagguggccaagaaccugaacgagagccugaucgaccugcaggagcugggcaaguacgagcaguacaucaaguggcccugguacaucuggcugggcuucaucgccggccugaucgccaucgugauggugaccaucaugcugugcugcaugaccagcugcuguagcugccugaagggcugcugcagcugcggcagcugcugcaaguucgacgaggacgacagcgagccagugcugaagggcgugaagcugcacuacaccugauaauaggcuggagccucgguggccuagcuucuugccccuugggccuccccccagccccuccuccccuuccugcacccguacccccguggucuuugaauaaagucugagugggcggcaaaaaaaaaaaaaaaaaaaaaaaaaaaaaaaaaaaaaaaaaaaaaaaaaaaaaaaaaaaaaaaaaaaaaaaaaaaaaaaaaaaaaaaaaaaaaaaaaaaa

SEQ ID NO: 26106 - RNA, 4095 nt, Artificial Sequence
  SARS-CoV-2/Wuhan/WIV05/2019__EPI_ISL_402128 spike protein mRNA gc (1-1273)(N439K_D614G)
gggaaauaagagagaaaagaagaguaagaagaaauauaagaccccggcgccgccaccauguucguguuccuggugcugcugccccuggugagcagccagugcgugaaccugaccacccggacccagcugcccccugccuacaccaacagcuucacccggggcguguacuaccccgacaagguguuccggagcagcgugcugcacagcacccaggaccuguuccugcccuucuucagcaacgugaccugguuccacgccauccacgugagcggcaccaacggcaccaagcgguucgacaacccagugcugcccuucaacgacggcguguacuucgccagcaccgagaagucaaacaucauccggggcuggaucuucggcaccacccuggacagcaagacacagagccugcugaucgugaacaacgccaccaacguggugaucaaggugugcgaguuucaguucugcaacgaccccuuccugggcguguacuaccacaagaacaacaagagcuggauggagagcgaguuccgggucuacagcagcgcuaacaauugcaccuucgaguacgugagccagcccuuccugauggaccucgagggcaagcagggcaacuucaagaaccugcgggaguucguguucaagaacaucgauggcuacuucaagaucuacagcaagcacacccccaucaaccuggugcgggaccugccccagggauucagcgcccuggagccucugguggaccugcccaucggcaucaacaucaccagguuccagacccugcuggcccugcaccggagcuaccugacccccggcgacagcagcagcggcuggaccgccggcgccgccgcauacuacgugggcuaccugcagccacggaccuuccugcugaaguacaacgagaacggcaccaucaccgacgccguggacugcgcccuggacccccugagcgagaccaagugcacccuaaagagcuucaccguggagaagggcaucuaccagaccagcaacuuccgggugcagcccacugagagcaucgugcgguuccccaacauuaccaaccugugucccuucggcgagguguucaacgccacccgguucgccagcguguacgccuggaaccggaagcggaucagcaacugcguggccgacuacagcgugcuguacaacagcgccagcuucagcaccuucaagugcuacggcgugagcccuaccaagcugaacgaccugugcuucaccaacguguacgcugacagcuucgugauccggggcgacgaggugcggcagaucgcccccggccagaccggcaagaucgccgacuacaacuacaagcugcccgacgacuucaccggcugcgugaucgccuggaacagcaagaaccuggacagcaaggugggcggcaacuacaacuaccuguaccggcuguuccguaagagcaaccugaagccauucgagcgggacaucagcaccgagaucuaccaggccggcagcacccccugcaacgguguggagggcuuuaacugcuacuucccccugcagagcuacggcuuccagcccaccaacggcgugggcuaccagcccuaccgggugguggugcugagcuucgagcugcugcacgcccccgccaccgugugcggcccuaaaaagagcaccaaccuggugaagaacaagugcgugaacuucaacuucaauggccugaccggcaccggcgugcugaccgagagcaacaagaaguuccugcccuuccagcaguucggccgggauaucgccgacaccaccgacgcagugcgggacccccagacccuggagauccuggacaucaccccaugcagcuucggcggcgugagcgucaucacccccggcacaaacaccagcaaccagguggccgugcuguaccagggagugaacugcaccgaggugcccguggccauccacgccgaccagcugacccccaccuggcggguguacagcaccggcagcaacguguuccagacccgggccggcugccugaucggcgccgagcacgugaacaacuccuacgagugcgacauccccaucggcgcuggcaucugcgccagcuaccagacccagaccaacagcccccggcgggcccggagcguggccagccagagcaucaucgccuacaccaugagcuuaggcgccgagaacagcguggccuacagcaacaacagcaucgcgaucccuaccaacuucaccaucagcgugaccaccgagauacugcccgugagcaugaccaagaccagcguggacuguaccauguacaucugcggcgacagcaccgagugcagcaaccugcugcugcaguacggcagcuucugcacccagcugaaccgggcccugaccggcaucgccguggagcaggacaagaacacccaagagguguucgcccaggugaagcagaucuacaagacucccccaaucaaggacuucggcggcuucaacuucagccagauccugcccgaccccagcaagcccagcaagcggagcuucaucgaggaccugcuguucaacaaggugacccuggccgacgccggcuucaucaagcaguacggcgacugccugggggauaucgccgcucgggaccugaucugcgcccagaaguucaacggccugaccgugcugcccccucugcugaccgacgagaugaucgcccaguacaccagcgcccugcuugccggcaccaucaccagcggcuggaccuucggcgccggcgcagcccugcagauccccuucgccaugcagauggccuaccgguucaacggcaucggcgugacccagaacgugcuguacgagaaccagaagcugaucgccaaccaguucaacagcgccaucggcaagauccaggacagccugagcagcaccgccagcgcccugggcaagcugcaggacguggugaaccagaacgcucaggcccugaacacccuggugaagcagcugagcagcaacuucggcgccaucagcucagugcugaacgacauccugagcaggcuggacaagguggaggccgaggugcagaucgaccggcugaucaccggccggcugcagagccugcagaccuacgugacccagcagcugauccgggccgccgagauccgggccagcgccaaucuggcagccaccaagaugagcgagugcgugcugggccagagcaagcggguggacuuuugcggcaagggcuaccaccugaugagcuucccccagagcgccccacacggcgugguguuccuccacgucacauacgugcccgcccaggagaagaacuucaccaccgcccccgccauuugccacgacggcaaggcucacuucccccgggagggaguguucgugagcaacggcacccacugguucgugacccagcggaacuucuacgagccccagaucaucaccaccgacaacaccuucgugagcggcaacugcgacguggugaucggcaucgugaacaacaccguguacgacccccugcagccugagcuggacagcuucaaggaggagcuggacaaguacuucaagaaccacaccagccccgacguggaucugggcgacaucagcggcaucaacgccagcguggugaacauccagaaggagaucgaccggcugaacgagguggccaagaaccugaacgagagccugaucgaccugcaggagcugggcaaguacgagcaguacaucaaguggcccugguacaucuggcugggcuucaucgccggccugaucgccaucgugauggugaccaucaugcugugcugcaugaccagcugcuguagcugccugaagggcugcugcagcugcggcagcugcugcaaguucgacgaggacgacagcgagccagugcugaagggcgugaagcugcacuacaccugauaauaggcuggagccucgguggccuagcuucuugccccuugggccuccccccagccccuccuccccuuccugcacccguacccccguggucuuugaauaaagucugagugggcggcaaaaaaaaaaaaaaaaaaaaaaaaaaaaaaaaaaaaaaaaaaaaaaaaaaaaaaaaaaaaaaaaaaaaaaaaaaaaaaaaaaaaaaaaaaaaaaaaaaaa

SEQ ID NO: 26107 - RNA, 4095 nt, Artificial Sequence
  SARS-CoV-2/Wuhan/WIV05/2019__EPI_ISL_402128 spike protein mRNA gc (1-1273)(S477N_D614G)
gggaaauaagagagaaaagaagaguaagaagaaauauaagaccccggcgccgccaccauguucguguuccuggugcugcugccccuggugagcagccagugcgugaaccugaccacccggacccagcugcccccugccuacaccaacagcuucacccggggcguguacuaccccgacaagguguuccggagcagcgugcugcacagcacccaggaccuguuccugcccuucuucagcaacgugaccugguuccacgccauccacgugagcggcaccaacggcaccaagcgguucgacaacccagugcugcccuucaacgacggcguguacuucgccagcaccgagaagucaaacaucauccggggcuggaucuucggcaccacccuggacagcaagacacagagccugcugaucgugaacaacgccaccaacguggugaucaaggugugcgaguuucaguucugcaacgaccccuuccugggcguguacuaccacaagaacaacaagagcuggauggagagcgaguuccgggucuacagcagcgcuaacaauugcaccuucgaguacgugagccagcccuuccugauggaccucgagggcaagcagggcaacuucaagaaccugcgggaguucguguucaagaacaucgauggcuacuucaagaucuacagcaagcacacccccaucaaccuggugcgggaccugccccagggauucagcgcccuggagccucugguggaccugcccaucggcaucaacaucaccagguuccagacccugcuggcccugcaccggagcuaccugacccccggcgacagcagcagcggcuggaccgccggcgccgccgcauacuacgugggcuaccugcagccacggaccuuccugcugaaguacaacgagaacggcaccaucaccgacgccguggacugcgcccuggacccccugagcgagaccaagugcacccuaaagagcuucaccguggagaagggcaucuaccagaccagcaacuuccgggugcagcccacugagagcaucgugcgguuccccaacauuaccaaccugugucccuucggcgagguguucaacgccacccgguucgccagcguguacgccuggaaccggaagcggaucagcaacugcguggccgacuacagcgugcuguacaacagcgccagcuucagcaccuucaagugcuacggcgugagcccuaccaagcugaacgaccugugcuucaccaacguguacgcugacagcuucgugauccggggcgacgaggugcggcagaucgcccccggccagaccggcaagaucgccgacuacaacuacaagcugcccgacgacuucaccggcugcgugaucgccuggaacagcaacaaccuggacagcaaggugggcggcaacuacaacuaccuguaccggcuguuccguaagagcaaccugaagccauucgagcgggacaucagcaccgagaucuaccaggccggcaacacccccugcaacgguguggagggcuuuaacugcuacuucccccugcagagcuacggcuuccagcccaccaacggcgugggcuaccagcccuaccgggugguggugcugagcuucgagcugcugcacgcccccgccaccgugugcggcccuaaaaagagcaccaaccuggugaagaacaagugcgugaauuucaacuucaacggccugaccggcaccggcgugcugaccgagagcaacaagaaguuccugcccuuccagcaguucggccgggauaucgccgacaccaccgacgcagugcgggacccccagacccuggagauccuggacaucaccccaugcagcuucggcggcgugagcgucaucacccccggcacaaacaccagcaaccagguggccgugcuguaccagggagugaacugcaccgaggugcccguggccauccacgccgaccagcugacccccaccuggcggguguacagcaccggcagcaacguguuccagacccgggccggcugccugaucggcgccgagcacgugaacaacagcuacgagugcgacauccccaucggcgcuggcaucugcgccuccuaccagacccagaccaacagcccccggcgggcccggagcguggccagccagagcaucaucgccuacaccaugagcuuaggcgccgagaacagcguggccuacagcaacaacagcaucgcgaucccuaccaacuucaccaucagcgugaccaccgagauacugcccgugagcaugaccaagaccagcguggacuguaccauguacaucugcggcgacagcaccgagugcagcaaccugcugcugcaguacggcagcuucugcacccagcugaaccgggcccugaccggcaucgccguggagcaggacaagaacacccaagagguguucgcccaggugaagcagaucuacaagacucccccaaucaaggacuucggcggcuucaacuucagccagauccugcccgaccccagcaagcccagcaagcggagcuucaucgaggaccugcuguucaacaaggugacccuggccgacgccggcuucaucaagcaguacggcgacugccugggggauaucgccgcucgggaccugaucugcgcccagaaguucaacggccugaccgugcugcccccucugcugaccgacgagaugaucgcccaguacaccagcgcccugcuugccggcaccaucaccagcggcuggaccuucggcgccggcgcagcccugcagauccccuucgccaugcagauggccuaccgguucaacggcaucggcgugacccagaacgugcuguacgagaaccagaagcugaucgccaaccaguucaacagcgccaucggcaagauccaggacagccugagcagcaccgccagcgcccugggcaagcugcaggacguggugaaccagaacgcucaggcccugaacacccuggugaagcagcugagcagcaauuucggcgccaucagcagcgugcugaacgacauccugucaaggcuggacaagguggaggccgaggugcagaucgaccggcugaucaccggccggcugcagagccugcagaccuacgugacccagcagcugauccgggccgccgagauccgggccagcgccaaccuggcagccaccaagaugagcgagugcgugcugggccagagcaagcggguggacuuuugcggcaagggcuaccaccugaugagcuucccccagagcgccccacacggcgugguguuccuccacgucacauacgugcccgcccaggagaagaacuucaccaccgcccccgccauuugccacgacggcaaggcucacuucccccgggagggaguguucgugagcaacggcacccacugguucgugacccagcggaacuucuacgagccccagaucaucaccaccgacaacaccuucgugagcggcaacugcgacguggugaucggcaucgugaacaacaccguguacgacccccugcagccugagcuggacagcuucaaggaggagcuggacaaguacuucaagaaccacaccagccccgacguggaucugggcgacaucagcggcaucaacgccagcguggugaacauccagaaggagaucgaccggcugaacgagguggccaagaaccugaacgagagccugaucgaccugcaggagcugggcaaguacgagcaguacaucaaguggcccugguacaucuggcugggcuucaucgccggccugaucgccaucgugauggugaccaucaugcugugcugcaugaccagcugcuguagcugccugaagggcugcugcagcugcggcagcugcugcaaguucgacgaggacgacagcgagccagugcugaagggcgugaagcugcacuacaccugauaauaggcuggagccucgguggccuagcuucuugccccuugggccuccccccagccccuccuccccuuccugcacccguacccccguggucuuugaauaaagucugagugggcggcaaaaaaaaaaaaaaaaaaaaaaaaaaaaaaaaaaaaaaaaaaaaaaaaaaaaaaaaaaaaaaaaaaaaaaaaaaaaaaaaaaaaaaaaaaaaaaaaaaaa

SEQ ID NO: 26108 - RNA, 4095 nt, Artificial Sequence
  SARS-CoV-2/Wuhan/WIV05/2019__EPI_ISL_402128 spike protein mRNA gc (1-1273)(N501Y_D614G)
gggaaauaagagagaaaagaagaguaagaagaaauauaagaccccggcgccgccaccauguucguguuccuggugcugcugccccuggugagcagccagugcgugaaccugaccacccggacccagcugcccccugccuacaccaacagcuucacccggggcguguacuaccccgacaagguguuccggagcagcgugcugcacagcacccaggaccuguuccugcccuucuucagcaacgugaccugguuccacgccauccacgugagcggcaccaacggcaccaagcgguucgacaacccagugcugcccuucaacgacggcguguacuucgccagcaccgagaagucaaacaucauccggggcuggaucuucggcaccacccuggacagcaagacacagagccugcugaucgugaacaacgccaccaacguggugaucaaggugugcgaguuucaguucugcaacgaccccuuccugggcguguacuaccacaagaacaacaagagcuggauggagagcgaguuccgggucuacagcagcgcuaacaauugcaccuucgaguacgugagccagcccuuccugauggaccucgagggcaagcagggcaacuucaagaaccugcgggaguucguguucaagaacaucgauggcuacuucaagaucuacagcaagcacacccccaucaaccuggugcgggaccugccccagggauucagcgcccuggagccucugguggaccugcccaucggcaucaacaucaccagguuccagacccugcuggcccugcaccggagcuaccugacccccggcgacagcagcagcggcuggaccgccggcgccgccgcauacuacgugggcuaccugcagccacggaccuuccugcugaaguacaacgagaacggcaccaucaccgacgccguggacugcgcccuggacccccugagcgagaccaagugcacccuaaagagcuucaccguggagaagggcaucuaccagaccagcaacuuccgggugcagcccacugagagcaucgugcgguuccccaacauuaccaaccugugucccuucggcgagguguucaacgccacccgguucgccagcguguacgccuggaaccggaagcggaucagcaacugcguggccgacuacagcgugcuguacaacagcgccagcuucagcaccuucaagugcuacggcgugagcccuaccaagcugaacgaccugugcuucaccaacguguacgcugacagcuucgugauccggggcgacgaggugcggcagaucgcccccggccagaccggcaagaucgccgacuacaacuacaagcugcccgacgacuucaccggcugcgugaucgccuggaacagcaacaaccuggacagcaaggugggcggcaacuacaacuaccuguaccggcuguuccguaagagcaaccugaagccauucgagcgggacaucagcaccgagaucuaccaggccggcagcacccccugcaacgguguggagggcuuuaacugcuacuucccccugcagagcuacggcuuccagcccaccuacggcgugggcuaccagcccuaccgggugguggugcugagcuucgagcugcugcacgcccccgccaccgugugcggcccuaaaaagagcaccaaccuggugaagaacaagugcgugaacuucaacuucaauggccugaccggcaccggcgugcugaccgagagcaacaagaaguuccugcccuuccagcaguucggccgggauaucgccgacaccaccgacgcagugcgggacccccagacccuggagauccuggacaucaccccaugcagcuucggcggcgugagcgucaucacccccggcacaaacaccagcaaccagguggccgugcuguaccagggagugaacugcaccgaggugcccguggccauccacgccgaccagcugacccccaccuggcggguguacagcaccggcagcaacguguuccagacccgggccggcugccugaucggcgccgagcacgugaacaacuccuacgagugcgacauccccaucggcgcuggcaucugcgccagcuaccagacccagaccaacagcccccggcgggcccggagcguggccagccagagcaucaucgccuacaccaugagcuuaggcgccgagaacagcguggccuacagcaacaacagcaucgcgaucccuaccaacuucaccaucagcgugaccaccgagauacugcccgugagcaugaccaagaccagcguggacuguaccauguacaucugcggcgacagcaccgagugcagcaaccugcugcugcaguacggcagcuucugcacccagcugaaccgggcccugaccggcaucgccguggagcaggacaagaacacccaagagguguucgcccaggugaagcagaucuacaagacucccccaaucaaggacuucggcggcuucaacuucagccagauccugcccgaccccagcaagcccagcaagcggagcuucaucgaggaccugcuguucaacaaggugacccuggccgacgccggcuucaucaagcaguacggcgacugccugggggauaucgccgcucgggaccugaucugcgcccagaaguucaacggccugaccgugcugcccccucugcugaccgacgagaugaucgcccaguacaccagcgcccugcuugccggcaccaucaccagcggcuggaccuucggcgccggcgcagcccugcagauccccuucgccaugcagauggccuaccgguucaacggcaucggcgugacccagaacgugcuguacgagaaccagaagcugaucgccaaccaguucaacagcgccaucggcaagauccaggacagccugagcagcaccgccagcgcccugggcaagcugcaggacguggugaaccagaacgcucaggcccugaacacccuggugaagcagcugagcagcaacuucggcgccaucagcucagugcugaacgacauccugagcaggcuggacaagguggaggccgaggugcagaucgaccggcugaucaccggccggcugcagagccugcagaccuacgugacccagcagcugauccgggccgccgagauccgggccagcgccaaucuggcagccaccaagaugagcgagugcgugcugggccagagcaagcggguggacuuuugcggcaagggcuaccaccugaugagcuucccccagagcgccccacacggcgugguguuccuccacgucacauacgugcccgcccaggagaagaacuucaccaccgcccccgccauuugccacgacggcaaggcucacuucccccgggagggaguguucgugagcaacggcacccacugguucgugacccagcggaacuucuacgagccccagaucaucaccaccgacaacaccuucgugagcggcaacugcgacguggugaucggcaucgugaacaacaccguguacgacccccugcagccugagcuggacagcuucaaggaggagcuggacaaguacuucaagaaccacaccagccccgacguggaucugggcgacaucagcggcaucaacgccagcguggugaacauccagaaggagaucgaccggcugaacgagguggccaagaaccugaacgagagccugaucgaccugcaggagcugggcaaguacgagcaguacaucaaguggcccugguacaucuggcugggcuucaucgccggccugaucgccaucgugauggugaccaucaugcugugcugcaugaccagcugcuguagcugccugaagggcugcugcagcugcggcagcugcugcaaguucgacgaggacgacagcgagccagugcugaagggcgugaagcugcacuacaccugauaauaggcuggagccucgguggccuagcuucuugccccuugggccuccccccagccccuccuccccuuccugcacccguacccccguggucuuugaauaaagucugagugggcggcaaaaaaaaaaaaaaaaaaaaaaaaaaaaaaaaaaaaaaaaaaaaaaaaaaaaaaaaaaaaaaaaaaaaaaaaaaaaaaaaaaaaaaaaaaaaaaaaaaaa

SEQ ID NO: 26109 - RNA, 4089 nt, Artificial Sequence
  SARS-CoV-2/Wuhan/WIV05/2019__EPI_ISL_402128 spike protein mRNA gc (1-1273)(H69del_V70del_D614G)
gggaaauaagagagaaaagaagaguaagaagaaauauaagaccccggcgccgccaccauguucguguuccuggugcugcugccccuggugagcagccagugcgugaaccugaccacccggacccagcugcccccugccuacaccaacagcuucacccggggcguguacuaccccgacaagguguuccggagcagcgugcugcacagcacccaggaccuguuccugcccuucuucagcaacgugaccugguuccacgccaucagcggcaccaacggcaccaagcgguucgacaacccagugcugcccuucaacgacggcguguacuucgccagcaccgagaagucaaacaucauccggggcuggaucuucggcaccacccuggacagcaagacacagagccugcugaucgugaacaacgccaccaacguggugaucaaggugugcgaguuucaguucugcaacgaccccuuccugggcguguacuaccacaagaacaacaagagcuggauggagagcgaguuccggguguacagcagcgcuaacaauugcaccuucgaguacgucagccagcccuuccugauggaccucgagggcaagcagggcaacuucaagaaccugcgggaguucguguucaagaacaucgauggcuacuucaagaucuacagcaagcacacccccaucaaccuggugcgggaccugccccagggauucagcgcccuggagccucugguggaccugcccaucggcaucaacaucaccagguuccagacccugcuggcccugcaccggagcuaccugacccccggcgacagcagcagcggcuggaccgccggcgccgccgcauacuacgugggcuaccugcagccacggaccuuccugcugaaguacaacgagaacggcaccaucaccgacgccguggacugcgcccuggacccccugagcgagaccaagugcacccuaaagagcuucaccguggagaagggcaucuaccagaccagcaacuuccgggugcagcccacugagagcaucgugcgguuccccaacauuaccaaccugugucccuucggcgagguguucaacgccacccgguucgccagcguguacgccuggaaccggaagcggaucagcaacugcguggccgacuacagcgugcuguacaacagcgccagcuucagcaccuucaagugcuacggcgugagcccuaccaagcugaacgaccugugcuucaccaacguguacgcugacagcuucgugauccggggcgacgaggugcggcagaucgcccccggccagaccggcaagaucgccgacuacaacuacaagcugcccgacgacuucaccggcugcgugaucgccuggaacagcaacaaccuggacagcaaggugggcggcaacuacaacuaccuguaccggcuguuccguaagagcaaccugaagccauucgagcgggacaucagcaccgagaucuaccaggccggcagcacccccugcaacgguguggagggcuuuaacugcuacuucccccugcagagcuacggcuuccagcccaccaacggcgugggcuaccagcccuaccgggugguggugcugagcuucgagcugcugcacgcccccgccaccgugugcggcccuaaaaagagcaccaaccuggugaagaacaagugcgugaacuucaauuucaacggccugaccggcaccggcgugcugaccgagagcaacaagaaguuccugcccuuccagcaguucggccgggauaucgccgacaccaccgacgcagugcgggacccccagacccuggagauccuggacaucaccccaugcagcuucggcggcgugagcgugaucacccccggcacaaacaccagcaaccaggucgccgugcuguaccagggagugaacugcaccgaggugcccguggccauccacgccgaccagcugacccccaccuggcggguguacagcaccggcagcaacguguuccagacccgggccggcugccugaucggcgccgagcacgugaacaacuccuacgagugcgacauccccaucggcgcuggcaucugcgccagcuaccagacccagaccaacagcccccggcgggcccggagcguggccagccagagcaucaucgccuacaccaugagcuuaggcgccgagaacagcguggccuacagcaacaacagcaucgcgaucccuaccaacuucaccaucagcgugaccaccgagauacugcccgugagcaugaccaagaccagcguggacuguaccauguacaucugcggcgacagcaccgagugcagcaaccugcugcugcaguacggcagcuucugcacccagcugaaccgggcccugaccggcaucgccguggagcaggacaagaacacccaagagguguucgcccaggugaagcagaucuacaagacucccccaaucaaggacuucggcggcuucaacuucagccagauccugcccgaccccagcaagcccagcaagcggagcuucaucgaggaccugcuguucaacaaggugacccuggccgacgccggcuucaucaagcaguacggcgacugccugggggauaucgccgcucgggaccugaucugcgcccagaaguucaacggccugaccgugcugcccccucugcugaccgacgagaugaucgcccaguacaccagcgcccugcuugccggcaccaucaccagcggcuggaccuucggcgccggcgcagcccugcagauccccuucgccaugcagauggccuaccgguucaacggcaucggcgugacccagaacgugcuguacgagaaccagaagcugaucgccaaccaguucaacagcgccaucggcaagauccaggacagccugagcagcaccgccagcgcccugggcaagcugcaggacguggugaaccagaacgcucaggcccugaacacccuggugaagcagcugagcagcaacuucggcgccaucagcucagugcugaaugacauccugagcaggcuggacaagguggaggccgaggugcagaucgaccggcugaucaccggccggcugcagagccugcagaccuacgugacccagcagcugauccgggccgccgagauccgggccagcgccaaccuggcagccaccaagaugagcgagugcgugcugggccagagcaagcggguggacuuuugcggcaagggcuaccaccugaugagcuucccccagagcgccccacacggcgugguguuccuccacgugacauacguccccgcccaggagaagaacuucaccaccgcccccgccauuugccacgacggcaaggcucacuucccccgggagggaguguucgugagcaacggcacccacugguucgugacccagcggaacuucuacgagccccagaucaucaccaccgacaacaccuucgugagcggcaacugcgacguggugaucggcaucgugaacaacaccguguacgacccccugcagccugagcuggacagcuucaaggaggagcuggacaaguacuucaagaaccacaccagccccgacguggaucugggcgacaucagcggcaucaacgccagcguggugaacauccagaaggagaucgaccggcugaacgagguggccaagaaccugaacgagagccugaucgaccugcaggagcugggcaaguacgagcaguacaucaaguggcccugguacaucuggcugggcuucaucgccggccugaucgccaucgugauggugaccaucaugcugugcugcaugaccagcugcuguagcugccugaagggcugcugcagcugcggcagcugcugcaaguucgacgaggacgacagcgagccagugcugaagggcgugaagcugcacuacaccugauaauaggcuggagccucgguggccuagcuucuugccccuugggccuccccccagccccuccuccccuuccugcacccguacccccguggucuuugaauaaagucugagugggcggcaaaaaaaaaaaaaaaaaaaaaaaaaaaaaaaaaaaaaaaaaaaaaaaaaaaaaaaaaaaaaaaaaaaaaaaaaaaaaaaaaaaaaaaaaaaaaaaaaaaa

SEQ ID NO: 26110 - RNA, 4095 nt, Artificial Sequence
  SARS-CoV-2/Wuhan/WIV05/2019__EPI_ISL_402128 spike protein mRNA gc (1-1273)(Y453F_D614G)
gggaaauaagagagaaaagaagaguaagaagaaauauaagaccccggcgccgccaccauguucguguuccuggugcugcugccccuggugagcagccagugcgugaaccugaccacccggacccagcugcccccugccuacaccaacagcuucacccggggcguguacuaccccgacaagguguuccggagcagcgugcugcacagcacccaggaccuguuccugcccuucuucagcaacgugaccugguuccacgccauccacgugagcggcaccaacggcaccaagcgguucgacaacccagugcugcccuucaacgacggcguguacuucgccagcaccgagaagucaaacaucauccggggcuggaucuucggcaccacccuggacagcaagacacagagccugcugaucgugaacaacgccaccaacguggugaucaaggugugcgaguuucaguucugcaacgaccccuuccugggcguguacuaccacaagaacaacaagagcuggauggagagcgaguuccgggucuacagcagcgcuaacaauugcaccuucgaguacgugagccagcccuuccugauggaccucgagggcaagcagggcaacuucaagaaccugcgggaguucguguucaagaacaucgauggcuacuucaagaucuacagcaagcacacccccaucaaccuggugcgggaccugccccagggauucagcgcccuggagccucugguggaccugcccaucggcaucaacaucaccagguuccagacccugcuggcccugcaccggagcuaccugacccccggcgacagcagcagcggcuggaccgccggcgccgccgcauacuacgugggcuaccugcagccacggaccuuccugcugaaguacaacgagaacggcaccaucaccgacgccguggacugcgcccuggacccccugagcgagaccaagugcacccuaaagagcuucaccguggagaagggcaucuaccagaccagcaacuuccgggugcagcccacugagagcaucgugcgguuccccaacauuaccaaccugugucccuucggcgagguguucaacgccacccgguucgccagcguguacgccuggaaccggaagcggaucagcaacugcguggccgacuacagcgugcuguacaacagcgccagcuucagcaccuucaagugcuacggcgugagcccuaccaagcugaacgaccugugcuucaccaacguguacgcugacagcuucgugauccggggcgacgaggugcggcagaucgcccccggccagaccggcaagaucgccgacuacaacuacaagcugcccgacgacuucaccggcugcgugaucgccuggaacagcaacaaccuggacagcaaggugggcggcaacuacaacuaccuguuccggcuguuccguaagagcaaccugaagccauuugagcgggacaucagcaccgagaucuaccaggccggcagcacccccugcaacgguguggagggcuucaacugcuacuucccccugcagagcuacggcuuccagcccaccaacggcgugggcuaccagcccuaccgggugguggugcugagcuucgagcugcugcacgcccccgccaccgugugcggcccuaaaaagagcaccaaccuggugaagaacaagugcgugaacuucaauuucaacggccugaccggcaccggcgugcugaccgagagcaacaagaaguuccugcccuuccagcaguucggccgggauaucgccgacaccaccgacgcagugcgggacccccagacccuggagauccuggacaucaccccaugcagcuucggcggcgugagcgucaucacccccggcacaaacaccagcaaccagguggccgugcuguaccagggagugaacugcaccgaggugcccguggccauccacgccgaccagcugacccccaccuggcggguguacagcaccggcagcaacguguuccagacccgggccggcugccugaucggcgccgagcacgugaacaacuccuacgagugcgacauccccaucggcgcuggcaucugcgccagcuaccagacccagaccaacagcccccggcgggcccggagcguggccagccagagcaucaucgccuacaccaugagcuuaggcgccgagaacagcguggccuacagcaacaacagcaucgcgaucccuaccaacuucaccaucagcgugaccaccgagauacugcccgugagcaugaccaagaccagcguggacuguaccauguacaucugcggcgacagcaccgagugcagcaaccugcugcugcaguacggcagcuucugcacccagcugaaccgggcccugaccggcaucgccguggagcaggacaagaacacccaagagguguucgcccaggugaagcagaucuacaagacucccccaaucaaggacuucggcggcuucaacuucagccagauccugcccgaccccagcaagcccagcaagcggagcuucaucgaggaccugcuguucaacaaggugacccuggccgacgccggcuucaucaagcaguacggcgacugccugggggauaucgccgcucgggaccugaucugcgcccagaaguucaacggccugaccgugcugcccccucugcugaccgacgagaugaucgcccaguacaccagcgcccugcuugccggcaccaucaccagcggcuggaccuucggcgccggcgcagcccugcagauccccuucgccaugcagauggccuaccgguucaacggcaucggcgugacccagaacgugcuguacgagaaccagaagcugaucgccaaccaguucaacagcgccaucggcaagauccaggacagccugagcagcaccgccagcgcccugggcaagcugcaggacguggugaaccagaacgcucaggcccugaacacccuggugaagcagcugagcagcaacuuuggcgccaucagcucagugcugaaugacauccugagcaggcuggacaagguggaggccgaggugcagaucgaccggcugaucaccggccggcugcagagccugcagaccuacgugacccagcagcugauccgggccgccgagauccgggccagcgccaaccuggcagccaccaagaugagcgagugcgugcugggccagagcaagcggguggacuucugcggcaagggcuaccaccugaugagcuucccccagagcgccccacacggcgugguguuccuccacgucacauacgugcccgcccaggagaagaacuucaccaccgcccccgccauuugccacgacggcaaggcucacuucccccgggagggaguguucgugagcaacggcacccacugguucgugacccagcggaacuucuacgagccccagaucaucaccaccgacaacaccuucgugagcggcaacugcgacguggugaucggcaucgugaacaacaccguguacgacccccugcagccugagcuggacagcuucaaggaggagcuggacaaguacuucaagaaccacaccagccccgacguggaucugggcgacaucagcggcaucaacgccagcguggugaacauccagaaggagaucgaccggcugaacgagguggccaagaaccugaacgagagccugaucgaccugcaggagcugggcaaguacgagcaguacaucaaguggcccugguacaucuggcugggcuucaucgccggccugaucgccaucgugauggugaccaucaugcugugcugcaugaccagcugcuguagcugccugaagggcugcugcagcugcggcagcugcugcaaguucgacgaggacgacagcgagccagugcugaagggcgugaagcugcacuacaccugauaauaggcuggagccucgguggccuagcuucuugccccuugggccuccccccagccccuccuccccuuccugcacccguacccccguggucuuugaauaaagucugagugggcggcaaaaaaaaaaaaaaaaaaaaaaaaaaaaaaaaaaaaaaaaaaaaaaaaaaaaaaaaaaaaaaaaaaaaaaaaaaaaaaaaaaaaaaaaaaaaaaaaaaaa

SEQ ID NO: 26111 - RNA, 4095 nt, Artificial Sequence
  SARS-CoV-2/Wuhan/WIV05/2019__EPI_ISL_402128 spike protein mRNA gc (1-1273)(D614G_I692V)
gggaaauaagagagaaaagaagaguaagaagaaauauaagaccccggcgccgccaccauguucguguuccuggugcugcugccccuggugagcagccagugcgugaaccugaccacccggacccagcugcccccugccuacaccaacagcuucacccggggcguguacuaccccgacaagguguuccggagcagcgugcugcacagcacccaggaccuguuccugcccuucuucagcaacgugaccugguuccacgccauccacgugagcggcaccaacggcaccaagcgguucgacaacccagugcugcccuucaacgacggcguguacuucgccagcaccgagaagucaaacaucauccggggcuggaucuucggcaccacccuggacagcaagacacagagccugcugaucgugaacaacgccaccaacguggugaucaaggugugcgaguuucaguucugcaacgaccccuuccugggcguguacuaccacaagaacaacaagagcuggauggagagcgaguuccgggucuacagcagcgcuaacaauugcaccuucgaguacgugagccagcccuuccugauggaccucgagggcaagcagggcaacuucaagaaccugcgggaguucguguucaagaacaucgauggcuacuucaagaucuacagcaagcacacccccaucaaccuggugcgggaccugccccagggauucagcgcccuggagccucugguggaccugcccaucggcaucaacaucaccagguuccagacccugcuggcccugcaccggagcuaccugacccccggcgacagcagcagcggcuggaccgccggcgccgccgcauacuacgugggcuaccugcagccacggaccuuccugcugaaguacaacgagaacggcaccaucaccgacgccguggacugcgcccuggacccccugagcgagaccaagugcacccuaaagagcuucaccguggagaagggcaucuaccagaccagcaacuuccgggugcagcccacugagagcaucgugcgguuccccaacauuaccaaccugugucccuucggcgagguguucaacgccacccgguucgccagcguguacgccuggaaccggaagcggaucagcaacugcguggccgacuacagcgugcuguacaacagcgccagcuucagcaccuucaagugcuacggcgugagcccuaccaagcugaacgaccugugcuucaccaacguguacgcugacagcuucgugauccggggcgacgaggugcggcagaucgcccccggccagaccggcaagaucgccgacuacaacuacaagcugcccgacgacuucaccggcugcgugaucgccuggaacagcaacaaccuggacagcaaggugggcggcaacuacaacuaccuguaccggcuguuccguaagagcaaccugaagccauucgagcgggacaucagcaccgagaucuaccaggccggcagcacccccugcaacgguguggagggcuuuaacugcuacuucccccugcagagcuacggcuuccagcccaccaacggcgugggcuaccagcccuaccgggugguggugcugagcuucgagcugcugcacgcccccgccaccgugugcggcccuaaaaagagcaccaaccuggugaagaacaagugcgugaacuucaauuucaacggccugaccggcaccggcgugcugaccgagagcaacaagaaguuccugcccuuccagcaguucggccgggauaucgccgacaccaccgacgcagugcgggacccccagacccuggagauccuggacaucaccccaugcagcuucggcggcgugagcgucaucacccccggcacaaacaccagcaaccagguggccgugcuguaccagggagugaacugcaccgaggugcccguggccauccacgccgaccagcugacccccaccuggcggguguacagcaccggcagcaacguguuccagacccgggccggcugccugaucggcgccgagcacgugaacaacuccuacgagugcgacauccccaucggcgcuggcaucugcgccagcuaccagacccagaccaacagcccccggcgggcccggagcguggccagccagagcgugaucgccuacaccaugagcuuaggcgccgagaacagcguggccuacagcaacaacagcaucgcgaucccuaccaacuucaccaucagcgugaccaccgagauccugcccgugagcaugaccaagaccagcguggacuguaccauguacauaugcggcgacagcaccgagugcagcaaccugcugcugcaguacggcagcuucugcacccagcugaaccgggcccugaccggcaucgccguggagcaggacaagaacacccaagagguguucgcccaggugaagcagaucuacaagacucccccaaucaaggacuucggcggcuucaacuucagccagauccugcccgaccccagcaagcccagcaagcggagcuucaucgaggaccugcuguucaacaaggugacccuggccgacgccggcuucaucaagcaguacggcgacugccugggggauaucgccgcucgggaccugaucugcgcccagaaguucaacggccugaccgugcugcccccucugcugaccgacgagaugaucgcccaguacaccagcgcccugcuugccggcaccaucaccagcggcuggaccuucggcgccggcgcagcccugcagauccccuucgccaugcagauggccuaccgguucaacggcaucggcgugacccagaacgugcuguacgagaaccagaagcugaucgccaaccaguucaacagcgccaucggcaagauccaggacagccugagcagcaccgccagcgcccugggcaagcugcaggacguggugaaccagaacgcucaggcccugaacacccuggugaagcagcugagcagcaacuucggcgccaucagcucagugcugaaugacauccugagcaggcuggacaagguggaggccgaggugcagaucgaccggcugaucaccggccggcugcagagccugcagaccuacgugacccagcagcugauccgggccgccgagauccgggccagcgccaaccuggcagccaccaagaugagcgagugcgugcugggccagagcaagcggguggacuuuugcggcaagggcuaccaccugaugagcuucccccagagcgccccacacggcguggucuuccuccacgugacauacgugcccgcccaggagaagaacuucaccaccgcccccgccaucugccacgacggcaaggcucacuucccccgggagggaguguucgugagcaacggcacccacugguucgugacccagcggaacuucuacgagccccagauuaucaccaccgacaacaccuucgugagcggcaacugcgacguggugaucggcaucgugaacaacaccguguacgacccccugcagccugagcuggacagcuucaaggaggagcuggacaaguacuucaagaaccacaccagccccgacguggaucugggcgacaucagcggcaucaacgccagcguggugaacauccagaaggagaucgaccggcugaacgagguggccaagaaccugaacgagagccugaucgaccugcaggagcugggcaaguacgagcaguacaucaaguggcccugguacaucuggcugggcuucaucgccggccugaucgccaucgugauggugaccaucaugcugugcugcaugaccagcugcuguagcugccugaagggcugcugcagcugcggcagcugcugcaaguucgacgaggacgacagcgagccagugcugaagggcgugaagcugcacuacaccugauaauaggcuggagccucgguggccuagcuucuugccccuugggccuccccccagccccuccuccccuuccugcacccguacccccguggucuuugaauaaagucugagugggcggcaaaaaaaaaaaaaaaaaaaaaaaaaaaaaaaaaaaaaaaaaaaaaaaaaaaaaaaaaaaaaaaaaaaaaaaaaaaaaaaaaaaaaaaaaaaaaaaaaaaa

SEQ ID NO: 26112 - RNA, 4095 nt, Artificial Sequence
  SARS-CoV-2/Wuhan/WIV05/2019__EPI_ISL_402128 spike protein mRNA gc (1-1273)(D614G_M1229I)
gggaaauaagagagaaaagaagaguaagaagaaauauaagaccccggcgccgccaccauguucguguuccuggugcugcugccccuggugagcagccagugcgugaaccugaccacccggacccagcugcccccugccuacaccaacagcuucacccggggcguguacuaccccgacaagguguuccggagcagcgugcugcacagcacccaggaccuguuccugcccuucuucagcaacgugaccugguuccacgccauccacgugagcggcaccaacggcaccaagcgguucgacaacccagugcugcccuucaacgacggcguguacuucgccagcaccgagaagucaaacaucauccggggcuggaucuucggcaccacccuggacagcaagacacagagccugcugaucgugaacaacgccaccaacguggugaucaaggugugcgaguuucaguucugcaacgaccccuuccugggcguguacuaccacaagaacaacaagagcuggauggagagcgaguuccgggucuacagcagcgcuaacaauugcaccuucgaguacgugagccagcccuuccugauggaccucgagggcaagcagggcaacuucaagaaccugcgggaguucguguucaagaacaucgauggcuacuucaagaucuacagcaagcacacccccaucaaccuggugcgggaccugccccagggauucagcgcccuggagccucugguggaccugcccaucggcaucaacaucaccagguuccagacccugcuggcccugcaccggagcuaccugacccccggcgacagcagcagcggcuggaccgccggcgccgccgcauacuacgugggcuaccugcagccacggaccuuccugcugaaguacaacgagaacggcaccaucaccgacgccguggacugcgcccuggacccccugagcgagaccaagugcacccuaaagagcuucaccguggagaagggcaucuaccagaccagcaacuuccgggugcagcccacugagagcaucgugcgguuccccaacauuaccaaccugugucccuucggcgagguguucaacgccacccgguucgccagcguguacgccuggaaccggaagcggaucagcaacugcguggccgacuacagcgugcuguacaacagcgccagcuucagcaccuucaagugcuacggcgugagcccuaccaagcugaacgaccugugcuucaccaacguguacgcugacagcuucgugauccggggcgacgaggugcggcagaucgcccccggccagaccggcaagaucgccgacuacaacuacaagcugcccgacgacuucaccggcugcgugaucgccuggaacagcaacaaccuggacagcaaggugggcggcaacuacaacuaccuguaccggcuguuccguaagagcaaccugaagccauucgagcgggacaucagcaccgagaucuaccaggccggcagcacccccugcaacgguguggagggcuuuaacugcuacuucccccugcagagcuacggcuuccagcccaccaacggcgugggcuaccagcccuaccgggugguggugcugagcuucgagcugcugcacgcccccgccaccgugugcggcccuaaaaagagcaccaaccuggugaagaacaagugcgugaacuucaauuucaacggccugaccggcaccggcgugcugaccgagagcaacaagaaguuccugcccuuccagcaguucggccgggauaucgccgacaccaccgacgcagugcgggacccccagacccuggagauccuggacaucaccccaugcagcuucggcggcgugagcgucaucacccccggcacaaacaccagcaaccagguggccgugcuguaccagggagugaacugcaccgaggugcccguggccauccacgccgaccagcugacccccaccuggcggguguacagcaccggcagcaacguguuccagacccgggccggcugccugaucggcgccgagcacgugaacaacuccuacgagugcgacauccccaucggcgcuggcaucugcgccagcuaccagacccagaccaacagcccccggcgggcccggagcguggccagccagagcaucaucgccuacaccaugagcuuaggcgccgagaacagcguggccuacagcaacaacagcaucgcgaucccuaccaacuucaccaucagcgugaccaccgagauacugcccgugagcaugaccaagaccagcguggacuguaccauguacaucugcggcgacagcaccgagugcagcaaccugcugcugcaguacggcagcuucugcacccagcugaaccgggcccugaccggcaucgccguggagcaggacaagaacacccaagagguguucgcccaggugaagcagaucuacaagacucccccaaucaaggacuucggcggcuucaacuucagccagauccugcccgaccccagcaagcccagcaagcggagcuucaucgaggaccugcuguucaacaaggugacccuggccgacgccggcuucaucaagcaguacggcgacugccugggggauaucgccgcucgggaccugaucugcgcccagaaguucaacggccugaccgugcugcccccucugcugaccgacgagaugaucgcccaguacaccagcgcccugcuugccggcaccaucaccagcggcuggaccuucggcgccggcgcagcccugcagauccccuucgccaugcagauggccuaccgguucaacggcaucggcgugacccagaacgugcuguacgagaaccagaagcugaucgccaaccaguucaacagcgccaucggcaagauccaggacagccugagcagcaccgccagcgcccugggcaagcugcaggacguggugaaccagaacgcucaggcccugaacacccuggugaagcagcugagcagcaacuucggcgccaucagcucagugcugaaugacauccugagcaggcuggacaagguggaggccgaggugcagaucgaccggcugaucaccggccggcugcagagccugcagaccuacgugacccagcagcugauccgggccgccgagauccgggccagcgccaaccuggcagccaccaagaugagcgagugcgugcugggccagagcaagcggguggacuuuugcggcaagggcuaccaccugaugagcuucccccagagcgccccacacggcgugguguuccuccacgucacauacgugcccgcccaggagaagaacuucaccaccgcccccgccauuugccacgacggcaaggcucacuucccccgggagggaguguucgugagcaacggcacccacugguucgugacccagcggaacuucuacgagccccagaucaucaccaccgacaacaccuucgugagcggcaacugcgacguggugaucggcaucgugaacaacaccguguacgacccccugcagccugagcuggacagcuucaaggaggagcuggacaaguacuucaagaaccacaccagccccgacguggaucugggcgacaucagcggcaucaacgccagcguggugaacauccagaaggagaucgaccggcugaacgagguggccaagaaccugaacgagagccugaucgaccugcaggagcugggcaaguacgagcaguacaucaaguggcccugguacaucuggcugggcuucaucgccggccugaucgccaucgugaucgugaccaucaugcugugcugcaugaccagcugcuguagcugccugaagggcugcugcagcugcggcagcugcugcaaguucgacgaggacgacagcgagccagugcugaagggcgugaagcugcacuacaccugauaauaggcuggagccucgguggccuagcuucuugccccuugggccuccccccagccccuccuccccuuccugcacccguacccccguggucuuugaauaaagucugagugggcggcaaaaaaaaaaaaaaaaaaaaaaaaaaaaaaaaaaaaaaaaaaaaaaaaaaaaaaaaaaaaaaaaaaaaaaaaaaaaaaaaaaaaaaaaaaaaaaaaaaaa

SEQ ID NO: 26113 - RNA, 4089 nt, Artificial Sequence
  SARS-CoV-2/Wuhan/WIV05/2019__EPI_ISL_402128 spike protein mRNA gc (1-1273)(H69del_V70del_A222V_Y453F_S477N_D614G_I692V)
gggaaauaagagagaaaagaagaguaagaagaaauauaagaccccggcgccgccaccauguucguguuccuggugcugcugccccuggugagcagccagugcgugaaccugaccacccggacccagcugcccccugccuacaccaacagcuucacccggggcguguacuaccccgacaagguguuccggagcagcgugcugcacagcacccaggaccuguuccugcccuucuucagcaacgugaccugguuccacgccaucagcggcaccaacggcaccaagcgguucgacaacccagugcugcccuucaacgacggcguguacuucgccagcaccgagaagucaaacaucauccggggcuggaucuucggcaccacccuggacagcaagacacagagccugcugaucgugaacaacgccaccaacguggugaucaaggugugcgaguuucaguucugcaacgaccccuuccugggcguguacuaccacaagaacaacaagagcuggauggagagcgaguuccggguguacagcagcgcuaacaauugcaccuucgaguacgucagccagcccuuccugauggaccucgagggcaagcagggcaacuucaagaaccugcgggaguucguguucaagaacaucgauggcuacuucaagaucuacagcaagcacacccccaucaaccuggugcgggaccugccccagggauucagcgugcuggagccucugguggaccugcccaucggcaucaacaucaccagguuccagacccugcuggcccugcaccggagcuaccugacccccggcgacagcagcagcggcuggaccgccggcgccgccgccuacuacgugggcuaccugcagccacggaccuuccugcugaaguacaacgagaacggcaccaucaccgacgcaguggacugcgcccuggacccccugagcgagaccaagugcacccuaaagagcuucaccguggagaagggcaucuaccagaccagcaacuuccgggugcagcccacugagagcaucgugcgguuccccaacauuaccaaccugugucccuucggcgagguguucaacgccacccgguucgccagcguguacgccuggaaccggaagcggaucagcaacugcguggccgacuacagcgugcuguacaacagcgccagcuucagcaccuucaagugcuacggcgugagcccuaccaagcugaacgaccugugcuucaccaacguguacgccgacagcuucgugauccggggcgacgaggugcggcagaucgcucccggccagaccggcaagaucgccgacuacaacuacaagcugcccgacgacuucaccggcugcgugaucgccuggaacagcaacaaccuggacagcaaggugggcggcaacuacaacuaccuguuccggcuguuccguaagagcaaccugaagccauuugagcgggacaucagcaccgagaucuaccaggccggcaacacccccugcaacgguguggagggcuucaacugcuacuucccccugcagagcuacggcuuccagcccaccaacggcgugggcuaccagcccuaccgggugguggugcugagcuucgagcugcugcacgcccccgccaccgugugcggcccuaaaaagagcaccaaccuggugaagaacaagugcgugaauuucaacuucaacggccugaccggcaccggcgugcugaccgagagcaacaagaaguuccugcccuuccagcaguucggccgggauaucgccgacaccaccgacgccgugcgggacccccagacccuggagauccuggacaucaccccaugcagcuucggcggcgugagcgucaucacccccggcacaaacaccagcaaccagguggcagugcuguaccagggagugaacugcaccgaggugcccguggccauccacgccgaccagcugacccccaccuggcggguguacagcaccggcagcaacguguuccagacccgggccggcugccugaucggcgccgagcacgugaacaacagcuacgagugcgacauccccaucggcgccggcaucugcgcuuccuaccagacccagaccaacagcccccggcgggcccggagcguggccagccagagcgugaucgccuacaccaugagcuuaggcgccgagaacagcguggccuacagcaacaacagcaucgccaucccuaccaacuucaccaucagcgugaccaccgagauccugcccgugagcaugaccaagaccagcguggacuguaccauguacauaugcggcgacagcaccgagugcagcaaccugcugcugcaguacggcagcuucugcacccagcugaaccgggcgcugaccggcaucgccguggagcaggacaagaacacccaagagguguucgcccaggugaagcagaucuacaagacucccccaaucaaggacuucggcggcuucaacuucagccagauccugcccgaccccagcaagcccagcaagcggagcuucaucgaggaccugcuguucaacaaggugacccuggccgacgccggcuucaucaagcaguacggcgacugccugggggauaucgccgcccgggaccugaucugcgcucagaaguucaacggccugaccgugcugcccccucugcugaccgacgagaugaucgcccaguacaccagcgcccugcuugccggcaccaucaccagcggcuggaccuucggcgccggcgccgcacugcagauccccuucgccaugcagauggccuaccgguucaacggcaucggcgugacccagaacgugcuguacgagaaccagaagcugaucgccaaccaguucaacagcgccaucggcaagauccaggacagccugagcagcaccgccagcgcccugggcaagcugcaggacguggugaaccagaacgcccaggcucugaacacccuggugaagcagcugagcagcaauuuuggcgccaucagcagcgugcugaacgacauccugucaaggcuggacaagguggaggccgaggugcagaucgaccggcugaucaccggccggcugcagagccugcagaccuacgugacccagcagcugauccgggccgccgagauccgggccagcgccaaccuggccgcaaccaagaugagcgagugcgugcugggccagagcaagcggguggacuucugcggcaagggcuaccaccugaugagcuucccccagagcgccccacacggcguggucuuccuccacgugacauacgugcccgcccaggagaagaacuucaccaccgcccccgccaucugccacgacggcaaggcccacuucccccgggagggaguguucgugagcaacggcacccacugguucgugacccagcggaacuucuacgagccccagauuaucaccaccgacaacaccuucgugagcggcaacugcgacguggugaucggcaucgugaacaacaccguguacgacccccugcagccugagcuggacagcuucaaggaggagcuggacaaguacuucaagaaccacaccagccccgacguggaucugggcgacaucagcggcaucaacgcuagcguggugaacauccagaaggagaucgaccggcugaacgagguggccaagaaccugaacgagagccugaucgaccugcaggagcugggcaaguacgagcaguacaucaaguggcccugguacaucuggcugggcuucaucgccggccugaucgccaucgugauggugaccaucaugcugugcugcaugaccagcugcuguagcugccugaagggcugcugcagcugcggcagcugcugcaaguucgacgaggacgacagcgagccagugcugaagggcgugaagcugcacuacaccugauaauaggcuggagccucgguggccuagcuucuugccccuugggccuccccccagccccuccuccccuuccugcacccguacccccguggucuuugaauaaagucugagugggcggcaaaaaaaaaaaaaaaaaaaaaaaaaaaaaaaaaaaaaaaaaaaaaaaaaaaaaaaaaaaaaaaaaaaaaaaaaaaaaaaaaaaaaaaaaaaaaaaaaaaa

SEQ ID NO: 26114 - RNA, 4089 nt, Artificial Sequence
  SARS-CoV-2/Wuhan/WIV05/2019__EPI_ISL_402128 spike protein mRNA gc (1-1273)(H69del_V70del_Y453F_D614G_I692V_M1229I)
gggaaauaagagagaaaagaagaguaagaagaaauauaagaccccggcgccgccaccauguucguguuccuggugcugcugccccuggugagcagccagugcgugaaccugaccacccggacccagcugcccccugccuacaccaacagcuucacccggggcguguacuaccccgacaagguguuccggagcagcgugcugcacagcacccaggaccuguuccugcccuucuucagcaacgugaccugguuccacgccaucagcggcaccaacggcaccaagcgguucgacaacccagugcugcccuucaacgacggcguguacuucgccagcaccgagaagucaaacaucauccggggcuggaucuucggcaccacccuggacagcaagacacagagccugcugaucgugaacaacgccaccaacguggugaucaaggugugcgaguuucaguucugcaacgaccccuuccugggcguguacuaccacaagaacaacaagagcuggauggagagcgaguuccggguguacagcagcgcuaacaauugcaccuucgaguacgucagccagcccuuccugauggaccucgagggcaagcagggcaacuucaagaaccugcgggaguucguguucaagaacaucgauggcuacuucaagaucuacagcaagcacacccccaucaaccuggugcgggaccugccccagggauucagcgcccuggagccucugguggaccugcccaucggcaucaacaucaccagguuccagacccugcuggcccugcaccggagcuaccugacccccggcgacagcagcagcggcuggaccgccggcgccgccgcauacuacgugggcuaccugcagccacggaccuuccugcugaaguacaacgagaacggcaccaucaccgacgccguggacugcgcccuggacccccugagcgagaccaagugcacccuaaagagcuucaccguggagaagggcaucuaccagaccagcaacuuccgggugcagcccacugagagcaucgugcgguuccccaacauuaccaaccugugucccuucggcgagguguucaacgccacccgguucgccagcguguacgccuggaaccggaagcggaucagcaacugcguggccgacuacagcgugcuguacaacagcgccagcuucagcaccuucaagugcuacggcgugagcccuaccaagcugaacgaccugugcuucaccaacguguacgcugacagcuucgugauccggggcgacgaggugcggcagaucgcccccggccagaccggcaagaucgccgacuacaacuacaagcugcccgacgacuucaccggcugcgugaucgccuggaacagcaacaaccuggacagcaaggugggcggcaacuacaacuaccuguuccggcuguuccguaagagcaaccugaagccauuugagcgggacaucagcaccgagaucuaccaggccggcagcacccccugcaacgguguggagggcuucaacugcuacuucccccugcagagcuacggcuuccagcccaccaacggcgugggcuaccagcccuaccgggugguggugcugagcuucgagcugcugcacgcccccgccaccgugugcggcccuaaaaagagcaccaaccuggugaagaacaagugcgugaacuucaauuucaacggccugaccggcaccggcgugcugaccgagagcaacaagaaguuccugcccuuccagcaguucggccgggauaucgccgacaccaccgacgcagugcgggacccccagacccuggagauccuggacaucaccccaugcagcuucggcggcgugagcgugaucacccccggcacaaacaccagcaaccaggucgccgugcuguaccagggagugaacugcaccgaggugcccguggccauccacgccgaccagcugacccccaccuggcggguguacagcaccggcagcaacguguuccagacccgggccggcugccugaucggcgccgagcacgugaacaacuccuacgagugcgacauccccaucggcgcuggcaucugcgccagcuaccagacccagaccaacagcccccggcgggcccggagcguggccagccagagcgugaucgccuacaccaugagcuuaggcgccgagaacagcguggccuacagcaacaacagcaucgcgaucccuaccaacuucaccaucagcgugaccaccgagauccugcccgugagcaugaccaagaccagcguggacuguaccauguacauaugcggcgacagcaccgagugcagcaaccugcugcugcaguacggcagcuucugcacccagcugaaccgggcccugaccggcaucgccguggagcaggacaagaacacccaagagguguucgcccaggugaagcagaucuacaagacucccccaaucaaggacuucggcggcuucaacuucagccagauccugcccgaccccagcaagcccagcaagcggagcuucaucgaggaccugcuguucaacaaggugacccuggccgacgccggcuucaucaagcaguacggcgacugccugggggauaucgccgcucgggaccugaucugcgcccagaaguucaacggccugaccgugcugcccccucugcugaccgacgagaugaucgcccaguacaccagcgcccugcuugccggcaccaucaccagcggcuggaccuucggcgccggcgcagcccugcagauccccuucgccaugcagauggccuaccgguucaacggcaucggcgugacccagaacgugcuguacgagaaccagaagcugaucgccaaccaguucaacagcgccaucggcaagauccaggacagccugagcagcaccgccagcgcccugggcaagcugcaggacguggugaaccagaacgcucaggcccugaacacccuggugaagcagcugagcagcaacuuuggcgccaucagcucagugcugaaugacauccugagcaggcuggacaagguggaggccgaggugcagaucgaccggcugaucaccggccggcugcagagccugcagaccuacgugacccagcagcugauccgggccgccgagauccgggccagcgccaaccuggcagccaccaagaugagcgagugcgugcugggccagagcaagcggguggacuucugcggcaagggcuaccaccugaugagcuucccccagagcgccccacacggcgugguguuccuccacgucacauacgugcccgcccaggagaagaacuucaccaccgcccccgccaucugccacgacggcaaggcucacuucccccgggagggaguguucgugagcaacggcacccacugguucgugacccagcggaacuucuacgagccccagauuaucaccaccgacaacaccuucgugagcggcaacugcgacguggugaucggcaucgugaacaacaccguguacgacccccugcagccugagcuggacagcuucaaggaggagcuggacaaguacuucaagaaccacaccagccccgacguggaucugggcgacaucagcggcaucaacgccagcguggugaacauccagaaggagaucgaccggcugaacgagguggccaagaaccugaacgagagccugaucgaccugcaggagcugggcaaguacgagcaguacaucaaguggcccugguacaucuggcugggcuucaucgccggccugaucgccaucgugaucgugaccaucaugcugugcugcaugaccagcugcuguagcugccugaagggcugcugcagcugcggcagcugcugcaaguucgacgaggacgacagcgagccagugcugaagggcgugaagcugcacuacaccugauaauaggcuggagccucgguggccuagcuucuugccccuugggccuccccccagccccuccuccccuuccugcacccguacccccguggucuuugaauaaagucugagugggcggcaaaaaaaaaaaaaaaaaaaaaaaaaaaaaaaaaaaaaaaaaaaaaaaaaaaaaaaaaaaaaaaaaaaaaaaaaaaaaaaaaaaaaaaaaaaaaaaaaaaa

SEQ ID NO: 26115 - RNA, 4086 nt, Artificial Sequence
  SARS-CoV-2/Wuhan/WIV05/2019__EPI_ISL_402128 spike protein mRNA gc (1-1273)(H69del_V70del_Y144del_N501Y_A570D_D614G_P681H_T716I_S982 A_D1118H)
gggaaauaagagagaaaagaagaguaagaagaaauauaagaccccggcgccgccaccauguucguguuccuggugcugcugccccuggugagcagccagugcgugaaccugaccacccggacccagcugcccccugccuacaccaacagcuucacccggggcguguacuaccccgacaagguguuccggagcagcgugcugcacagcacccaggaccuguuccugcccuucuucagcaacgugaccugguuccacgccaucagcggcaccaacggcaccaagcgguucgacaacccagugcugcccuucaacgacggcguguacuucgccagcaccgagaagucaaacaucauccggggcuggaucuucggcaccacccuggacagcaagacacagagccugcugaucgugaacaacgccaccaacguggugaucaaggugugcgaguuucaguucugcaacgaccccuuccugggcguguaccacaagaacaacaagagcuggauggagagcgaguuccggguguacagcagcgcuaacaauugcaccuucgaguacgucagccagcccuuccugauggaccucgagggcaagcagggcaacuucaagaaccugcgggaguucguguucaagaacaucgauggcuacuucaagaucuacagcaagcacacccccaucaaccuggugcgggaccugccccagggauucagcgcccuggagccucugguggaccugcccaucggcaucaacaucaccagguuccagacccugcuggcccugcaccggagcuaccugacccccggcgacagcagcagcggcuggaccgccggcgccgccgcauacuacgugggcuaccugcagccacggaccuuccugcugaaguacaacgagaacggcaccaucaccgacgccguggacugcgcccuggacccccugagcgagaccaagugcacccuaaagagcuucaccguggagaagggcaucuaccagaccagcaacuuccgggugcagcccacugagagcaucgugcgguuccccaacauuaccaaccugugucccuucggcgagguguucaacgccacccgguucgccagcguguacgccuggaaccggaagcggaucagcaacugcguggccgacuacagcgugcuguacaacagcgccagcuucagcaccuucaagugcuacggcgugagcccuaccaagcugaacgaccugugcuucaccaacguguacgcugacagcuucgugauccggggcgacgaggugcggcagaucgcccccggccagaccggcaagaucgccgacuacaacuacaagcugcccgacgacuucaccggcugcgugaucgccuggaacagcaacaaccuggacagcaaggugggcggcaacuacaacuaccuguaccggcuguuccguaagagcaaccugaagccauucgagcgggacaucagcaccgagaucuaccaggccggcagcacccccugcaacgguguggagggcuuuaacugcuacuucccccugcagagcuacggcuuccagcccaccuacggcgugggcuaccagcccuaccgggugguggugcugagcuucgagcugcugcacgcccccgccaccgugugcggcccuaaaaagagcaccaaccuggugaagaacaagugcgugaacuucaacuucaauggccugaccggcaccggcgugcugaccgagagcaacaagaaguuccugcccuuccagcaguucggccgggauaucgacgacaccaccgacgccgugcgggacccccagacccuggagauccuggacaucaccccaugcagcuucggcggcgugagcgugaucacccccggcacaaacaccagcaaccaggucgcagugcuguaccagggagugaacugcaccgaggugcccguggccauccacgccgaccagcugacccccaccuggcggguguacagcaccggcagcaacguguuccagacccgggccggcugccugaucggcgccgagcacgugaacaacuccuacgagugcgacauccccaucggcgccggcaucugcgcuagcuaccagacccagaccaacagccaccggcgggcccggagcguggccagccagagcaucaucgccuacaccaugagcuuaggcgccgagaacagcguggccuacagcaacaacagcaucgccauccccaucaacuucaccauaagcgugaccaccgagauccugccugugagcaugaccaagaccagcguggacuguaccauguacaucugcggcgacagcaccgagugcagcaaccugcugcugcaguacggcagcuucugcacccagcugaaccgggcgcugaccggcaucgccguggagcaggacaagaacacccaagagguguucgcccaggugaagcagaucuacaagaccccacccaucaaggacuucggcggcuucaacuucagccagauccugcccgaccccagcaagcccagcaagcggagcuucaucgaggaccugcuguucaacaaggugacucuggccgacgccggcuucaucaagcaguacggcgauugccugggggacaucgccgcccgggaccugaucugcgcucagaaguucaacggccugaccgugcugccuccccugcugaccgacgagaugaucgcccaguacaccagcgcccugcuugccggcaccaucaccagcggcuggaccuucggcgccggcgccgcacugcagauccccuucgccaugcagauggccuaccgguucaacggcaucggcgugacccagaacgugcuguacgagaaccagaagcugaucgccaaccaguucaacagcgccaucggcaagauccaggacagccugagcagcaccgccagcgcccugggcaagcugcaggacguggugaaccagaacgcccaggcucugaacacccuggugaagcagcugagcagcaacuucggcgccaucagcucagugcugaacgacauccuggccaggcuggacaagguggaggccgaggugcagaucgaccggcugaucaccggccggcugcagagccugcagaccuacgugacccagcagcugauccgggccgccgagauucgggccagcgccaaucuggcagccaccaagaugagcgagugcgugcugggccagagcaagcggguggacuuuugcggcaagggcuaccaccugaugagcuucccccagagcgcuccccacggcgugguguuccuccacgugaccuacgucccagcccaggagaagaacuucacaaccgcccccgccaucugccacgacggcaaggcccacuucccccgggagggaguguucgugagcaacggcacccacugguucgugacccagcggaacuucuacgagccccagaucaucaccacccacaacaccuucgugagcggcaacugcgacguggugaucggcaucgugaacaacaccguguacgacccccugcagcccgagcuggacagcuucaaggaggagcuggacaaguacuucaagaaccacaccagcccugacguggaucugggcgacaucagcggcaucaacgccagcguggugaacauccagaaggagaucgaccggcugaacgagguggccaagaaccugaacgagagccugaucgaccugcaggagcugggcaaguacgagcaguacaucaaguggcccugguacaucuggcugggcuucaucgccggccugaucgccaucgugauggugaccaucaugcugugcugcaugaccagcugcuguagcugccugaagggcugcugcagcugcggcagcugcugcaaguucgacgaggacgacagcgagcccgugcugaagggcgugaagcugcacuacaccugauaauaggcuggagccucgguggccuagcuucuugccccuugggccuccccccagccccuccuccccuuccugcacccguacccccguggucuuugaauaaagucugagugggcggcaaaaaaaaaaaaaaaaaaaaaaaaaaaaaaaaaaaaaaaaaaaaaaaaaaaaaaaaaaaaaaaaaaaaaaaaaaaaaaaaaaaaaaaaaaaaaaaaaaaa

SEQ ID NO: 26116 - RNA, 4095 nt, Artificial Sequence
  SARS-CoV-2/Wuhan/WIV05/2019__EPI_ISL_402128 spike protein mRNA gc (1-1273)(K417N_E484K_N501Y_D614G)
gggaaauaagagagaaaagaagaguaagaagaaauauaagaccccggcgccgccaccauguucguguuccuggugcugcugccccuggugagcagccagugcgugaaccugaccacccggacccagcugcccccugccuacaccaacagcuucacccggggcguguacuaccccgacaagguguuccggagcagcgugcugcacagcacccaggaccuguuccugcccuucuucagcaacgugaccugguuccacgccauccacgugagcggcaccaacggcaccaagcgguucgacaacccagugcugcccuucaacgacggcguguacuucgccagcaccgagaagucaaacaucauccggggcuggaucuucggcaccacccuggacagcaagacacagagccugcugaucgugaacaacgccaccaacguggugaucaaggugugcgaguuucaguucugcaacgaccccuuccugggcguguacuaccacaagaacaacaagagcuggauggagagcgaguuccgggucuacagcagcgcuaacaauugcaccuucgaguacgugagccagcccuuccugauggaccucgagggcaagcagggcaacuucaagaaccugcgggaguucguguucaagaacaucgauggcuacuucaagaucuacagcaagcacacccccaucaaccuggugcgggaccugccccagggauucagcgcccuggagccucugguggaccugcccaucggcaucaacaucaccagguuccagacccugcuggcccugcaccggagcuaccugacccccggcgacagcagcagcggcuggaccgccggcgccgccgcauacuacgugggcuaccugcagccacggaccuuccugcugaaguacaacgagaacggcaccaucaccgacgccguggacugcgcccuggacccccugagcgagaccaagugcacccuaaagagcuucaccguggagaagggcaucuaccagaccagcaacuuccgggugcagcccacugagagcaucgugcgguuccccaacauuaccaaccugugucccuucggcgagguguucaacgccacccgguucgccagcguguacgccuggaaccggaagcggaucagcaacugcguggccgacuacagcgugcuguacaacagcgccagcuucagcaccuucaagugcuacggcgugagcccuaccaagcugaacgaccugugcuucaccaacguguacgcugacagcuucgugauccggggcgacgaggugcggcagaucgcccccggccagaccggcaacaucgccgacuacaacuacaagcugcccgacgacuucaccggcugcgugaucgccuggaacagcaacaaccuggacagcaaggugggcggcaacuacaacuaccuguaccggcuguuccguaagagcaaccugaagccauucgagcgggacaucagcaccgagaucuaccaggccggcagcacccccugcaacggugugaagggcuuuaacugcuacuucccccugcagagcuacggcuuccagcccaccuacggcgugggcuaccagcccuaccgggugguggugcugagcuucgagcugcugcacgcccccgccaccgugugcggcccuaaaaagagcaccaaccuggugaagaacaagugcgugaacuucaauuucaacggccugaccggcaccggcgugcugaccgagagcaacaagaaguuccugcccuuccagcaguucggccgggauaucgccgacaccaccgacgcagugcgggacccccagacccuggagauccuggacaucaccccaugcagcuucggcggcgugagcgucaucacccccggcacaaacaccagcaaccagguggccgugcuguaccagggagugaacugcaccgaggugcccguggccauccacgccgaccagcugacccccaccuggcggguguacagcaccggcagcaacguguuccagacccgggccggcugccugaucggcgccgagcacgugaacaacuccuacgagugcgacauccccaucggcgcuggcaucugcgccagcuaccagacccagaccaacagcccccggcgggcccggagcguggccagccagagcaucaucgccuacaccaugagcuuaggcgccgagaacagcguggccuacagcaacaacagcaucgcgaucccuaccaacuucaccaucagcgugaccaccgagauacugcccgugagcaugaccaagaccagcguggacuguaccauguacaucugcggcgacagcaccgagugcagcaaccugcugcugcaguacggcagcuucugcacccagcugaaccgggcccugaccggcaucgccguggagcaggacaagaacacccaagagguguucgcccaggugaagcagaucuacaagacucccccaaucaaggacuucggcggcuucaacuucagccagauccugcccgaccccagcaagcccagcaagcggagcuucaucgaggaccugcuguucaacaaggugacccuggccgacgccggcuucaucaagcaguacggcgacugccugggggauaucgccgcucgggaccugaucugcgcccagaaguucaacggccugaccgugcugcccccucugcugaccgacgagaugaucgcccaguacaccagcgcccugcuugccggcaccaucaccagcggcuggaccuucggcgccggcgcagcccugcagauccccuucgccaugcagauggccuaccgguucaacggcaucggcgugacccagaacgugcuguacgagaaccagaagcugaucgccaaccaguucaacagcgccaucggcaagauccaggacagccugagcagcaccgccagcgcccugggcaagcugcaggacguggugaaccagaacgcucaggcccugaacacccuggugaagcagcugagcagcaacuucggcgccaucagcucagugcugaaugacauccugagcaggcuggacaagguggaggccgaggugcagaucgaccggcugaucaccggccggcugcagagccugcagaccuacgugacccagcagcugauccgggccgccgagauccgggccagcgccaaccuggcagccaccaagaugagcgagugcgugcugggccagagcaagcggguggacuuuugcggcaagggcuaccaccugaugagcuucccccagagcgccccacacggcgugguguuccuccacgucacauacgugcccgcccaggagaagaacuucaccaccgcccccgccauuugccacgacggcaaggcucacuucccccgggagggaguguucgugagcaacggcacccacugguucgugacccagcggaacuucuacgagccccagaucaucaccaccgacaacaccuucgugagcggcaacugcgacguggugaucggcaucgugaacaacaccguguacgacccccugcagccugagcuggacagcuucaaggaggagcuggacaaguacuucaagaaccacaccagccccgacguggaucugggcgacaucagcggcaucaacgccagcguggugaacauccagaaggagaucgaccggcugaacgagguggccaagaaccugaacgagagccugaucgaccugcaggagcugggcaaguacgagcaguacaucaaguggcccugguacaucuggcugggcuucaucgccggccugaucgccaucgugauggugaccaucaugcugugcugcaugaccagcugcuguagcugccugaagggcugcugcagcugcggcagcugcugcaaguucgacgaggacgacagcgagccagugcugaagggcgugaagcugcacuacaccugauaauaggcuggagccucgguggccuagcuucuugccccuugggccuccccccagccccuccuccccuuccugcacccguacccccguggucuuugaauaaagucugagugggcggcaaaaaaaaaaaaaaaaaaaaaaaaaaaaaaaaaaaaaaaaaaaaaaaaaaaaaaaaaaaaaaaaaaaaaaaaaaaaaaaaaaaaaaaaaaaaaaaaaaaa

SEQ ID NO: 26117 - RNA, 4086 nt, Artificial Sequence
  SARS-CoV-2/Wuhan/WIV05/2019__EPI_ISL_402128 spike protein mRNA gc (1-1273)(L18F_D80A_D215G_L242del_A243del_L244del_R246I_K417N_E484 K_N501Y_D614G_A701V)
gggaaauaagagagaaaagaagaguaagaagaaauauaagaccccggcgccgccaccauguucguguuccuggugcugcugccccuggugagcagccagugcgugaacuucaccacccggacccagcugcccccugccuacaccaacagcuucacccggggcguguacuaccccgacaagguguuccggagcagcgugcugcacagcacccaggaccuguuccugcccuucuucagcaacgugaccugguuccacgccauccacgugagcggcaccaacggcaccaagcgguucgccaacccagugcugcccuucaacgacggcguguacuucgccagcaccgagaagucaaacaucauccggggcuggaucuuuggcaccacccuggacagcaagacacagagccugcugaucgugaacaacgcuaccaacguggugaucaaggugugcgaguuccaguucugcaacgaccccuuccugggcguguacuaccacaagaacaacaagagcuggauggagagcgaguuccgggucuacagcagcgccaacaauugcaccuucgaguacgugagccagcccuuccugauggaccuggagggcaagcagggcaacuucaagaaccuccgggaguucguguucaagaacaucgacggcuacuucaagaucuacagcaagcacacccccaucaaccuggugcggggacugccccagggcuucagcgcccuggagccucugguggaucugcccaucggcaucaacaucaccagguuccagacccugcacaucagcuaccugacccccggcgacagcagcagcggcuggaccgccggcgccgccgcauacuacgugggcuaccugcagccacggaccuuccugcugaaguacaacgagaacggcaccaucaccgacgccguggacugcgcccuggacccccugagcgagaccaagugcacccuuaagagcuucaccguggagaagggcaucuaccagaccagcaacuuccgggugcagcccacugagagcauugugcgguuccccaacaucaccaaccugugucccuucggcgagguguucaacgccacccgguucgccagcguguacgccuggaaccggaagcggaucagcaacugcguggccgacuacagcgugcuguacaacagcgccagcuucagcaccuucaagugcuacggcgugagcccuaccaagcugaacgaccugugcuucaccaacguguacgcugacagcuucgugauccggggcgacgaggugcggcagaucgcccccggccagaccggcaacaucgccgacuacaacuacaagcugcccgacgacuucaccggcugcgugaucgccuggaacagcaacaaccuggacagcaaggugggcggcaacuacaacuaccuguaccggcuauuccguaagagcaaccugaagccauuugagcgggacaucagcaccgagaucuaccaggccgguagcacccccugcaacggcgugaagggcuucaacugcuacuucccccugcagagcuacggcuuccagcccaccuacggcgugggcuaccagcccuaccgggugguggugcugagcuucgagcugcugcacgcccccgccaccgugugcggcccuaaaaagagcaccaaccuggugaagaacaagugcgugaacuucaauuucaacggccugaccggcaccggcgugcugaccgagagcaacaagaaguuccugcccuuccagcaguucggccgggacaucgccgacaccaccgaugcagugcgggacccccagacccuggagauccuggacaucaccccaugcagcuucggcggcgugagcgucaucacccccggaacaaacaccagcaaccagguggccgugcuguaccagggcgugaacugcaccgaggugcccguggccauccacgccgaccagcugacccccaccuggcggguguacagcaccggcagcaacguguuccagacccgggccggcugccugaucggcgccgagcacgugaacaacuccuacgagugcgacauccccaucggcgcuggcaucugcgccagcuaccagacccagaccaacagcccccggcgggcccggagcguggccagccagagcaucaucgccuacaccaugagccugggcguggagaacagcguggccuacagcaacaacagcaucgccaucccuaccaacuucaccauaagcgugaccaccgagauccugcccgugagcaugaccaagaccagcguggacuguaccauguacaucugcggcgacagcaccgagugcagcaaccuguuacugcaguacggcagcuucugcacccagcugaaccgggcgcugaccggcaucgccguggagcaggacaagaacacccaagagguguucgcccaggugaagcagaucuacaagacucccccaaucaaggacuucggcggcuucaacuucagccagauccugcccgaccccagcaagcccagcaagcggagcuucaucgaggaccugcuguucaacaaggugacccuggccgacgccggcuucaucaagcaguacggggacugccugggcgacaucgccgcccgggaccugaucugcgcucagaaguucaacggccugaccgugcugcccccucugcugaccgaugagaugaucgcccaguacaccagcgcccugcuggccggcaccaucaccagcggcuggaccuucggcgccggcgccgcacugcagauccccuucgccaugcagauggccuaccgguucaacggcaucggcgugacccagaacgugcuguacgagaaccagaagcugaucgccaaccaguucaacagcgccaucggcaagauccaggacagccugagcagcaccgccagcgcccugggcaagcugcaggacguggugaaccagaacgcccaggcucugaacacccuggugaagcagcugagcagcaacuuuggcgccaucagcucagugcugaaugacauccugagccggcuggacaagguggaggccgaggugcagaucgacaggcugaucaccggccggcugcagagccugcagaccuacgugacccagcagcugauccgggccgccgagauucgggccagcgccaaccuggccgcaaccaagaugagcgagugcgugcugggccagagcaagcggguggacuucugcggcaagggcuaccaccugaugagcuucccccagagcgccccacacggcguggucuuccugcacgugacauacgugcccgcccaggagaagaacuucaccaccgcccccgccaucugccacgacggaaaggcccacuucccccgggagggcguguucgugagcaacggcacccacugguucgugacccagcggaacuucuacgagccccagaucaucaccaccgacaacaccuucgugagcggcaacugcgacguggugaucggcaucgugaacaacaccguguacgacccccugcagccugagcuggacagcuucaaggaggagcucgacaaguacuucaagaaccacaccagccccgacguggaccugggcgacaucagcggcaucaacgcuagcguggugaacauccagaaggagaucgaucggcugaacgagguggccaagaaccugaacgagagccugaucgaccugcaggagcugggcaaguacgagcaguacaucaaguggcccugguacaucuggcugggcuucaucgccggccugaucgccaucgugauggugaccaucaugcugugcugcaugaccagcugcuguagcugccugaagggcugcugcagcugcggcagcugcugcaaguucgacgaggacgacagcgagccagugcugaagggcgugaagcugcacuacaccugauaauaggcuggagccucgguggccuagcuucuugccccuugggccuccccccagccccuccuccccuuccugcacccguacccccguggucuuugaauaaagucugagugggcggcaaaaaaaaaaaaaaaaaaaaaaaaaaaaaaaaaaaaaaaaaaaaaaaaaaaaaaaaaaaaaaaaaaaaaaaaaaaaaaaaaaaaaaaaaaaaaaaaaaaa

SEQ ID NO: 26118 - RNA, 4095 nt, Artificial Sequence
  SARS-CoV-2/Wuhan/WIV05/2019__EPI_ISL_402128 spike protein mRNA gc (1-1273)(E484K_D614G)
gggaaauaagagagaaaagaagaguaagaagaaauauaagaccccggcgccgccaccauguucguguuccuggugcugcugccccuggugagcagccagugcgugaaccugaccacccggacccagcugcccccugccuacaccaacagcuucacccggggcguguacuaccccgacaagguguuccggagcagcgugcugcacagcacccaggaccuguuccugcccuucuucagcaacgugaccugguuccacgccauccacgugagcggcaccaacggcaccaagcgguucgacaacccagugcugcccuucaacgacggcguguacuucgccagcaccgagaagucaaacaucauccggggcuggaucuucggcaccacccuggacagcaagacacagagccugcugaucgugaacaacgccaccaacguggugaucaaggugugcgaguuucaguucugcaacgaccccuuccugggcguguacuaccacaagaacaacaagagcuggauggagagcgaguuccgggucuacagcagcgcuaacaauugcaccuucgaguacgugagccagcccuuccugauggaccucgagggcaagcagggcaacuucaagaaccugcgggaguucguguucaagaacaucgauggcuacuucaagaucuacagcaagcacacccccaucaaccuggugcgggaccugccccagggauucagcgcccuggagccucugguggaccugcccaucggcaucaacaucaccagguuccagacccugcuggcccugcaccggagcuaccugacccccggcgacagcagcagcggcuggaccgccggcgccgccgcauacuacgugggcuaccugcagccacggaccuuccugcugaaguacaacgagaacggcaccaucaccgacgccguggacugcgcccuggacccccugagcgagaccaagugcacccuaaagagcuucaccguggagaagggcaucuaccagaccagcaacuuccgggugcagcccacugagagcaucgugcgguuccccaacauuaccaaccugugucccuucggcgagguguucaacgccacccgguucgccagcguguacgccuggaaccggaagcggaucagcaacugcguggccgacuacagcgugcuguacaacagcgccagcuucagcaccuucaagugcuacggcgugagcccuaccaagcugaacgaccugugcuucaccaacguguacgcugacagcuucgugauccggggcgacgaggugcggcagaucgcccccggccagaccggcaagaucgccgacuacaacuacaagcugcccgacgacuucaccggcugcgugaucgccuggaacagcaacaaccuggacagcaaggugggcggcaacuacaacuaccuguaccggcuguuccguaagagcaaccugaagccauucgagcgggacaucagcaccgagaucuaccaggccggcagcacccccugcaacggugugaagggcuuuaacugcuacuucccccugcagagcuacggcuuccagcccaccaacggcgugggcuaccagcccuaccgggugguggugcugagcuucgagcugcugcacgcccccgccaccgugugcggcccuaaaaagagcaccaaccuggugaagaacaagugcgugaacuucaauuucaacggccugaccggcaccggcgugcugaccgagagcaacaagaaguuccugcccuuccagcaguucggccgggauaucgccgacaccaccgacgcagugcgggacccccagacccuggagauccuggacaucaccccaugcagcuucggcggcgugagcgucaucacccccggcacaaacaccagcaaccagguggccgugcuguaccagggagugaacugcaccgaggugcccguggccauccacgccgaccagcugacccccaccuggcggguguacagcaccggcagcaacguguuccagacccgggccggcugccugaucggcgccgagcacgugaacaacuccuacgagugcgacauccccaucggcgcuggcaucugcgccagcuaccagacccagaccaacagcccccggcgggcccggagcguggccagccagagcaucaucgccuacaccaugagcuuaggcgccgagaacagcguggccuacagcaacaacagcaucgcgaucccuaccaacuucaccaucagcgugaccaccgagauacugcccgugagcaugaccaagaccagcguggacuguaccauguacaucugcggcgacagcaccgagugcagcaaccugcugcugcaguacggcagcuucugcacccagcugaaccgggcccugaccggcaucgccguggagcaggacaagaacacccaagagguguucgcccaggugaagcagaucuacaagacucccccaaucaaggacuucggcggcuucaacuucagccagauccugcccgaccccagcaagcccagcaagcggagcuucaucgaggaccugcuguucaacaaggugacccuggccgacgccggcuucaucaagcaguacggcgacugccugggggauaucgccgcucgggaccugaucugcgcccagaaguucaacggccugaccgugcugcccccucugcugaccgacgagaugaucgcccaguacaccagcgcccugcuugccggcaccaucaccagcggcuggaccuucggcgccggcgcagcccugcagauccccuucgccaugcagauggccuaccgguucaacggcaucggcgugacccagaacgugcuguacgagaaccagaagcugaucgccaaccaguucaacagcgccaucggcaagauccaggacagccugagcagcaccgccagcgcccugggcaagcugcaggacguggugaaccagaacgcucaggcccugaacacccuggugaagcagcugagcagcaacuucggcgccaucagcucagugcugaaugacauccugagcaggcuggacaagguggaggccgaggugcagaucgaccggcugaucaccggccggcugcagagccugcagaccuacgugacccagcagcugauccgggccgccgagauccgggccagcgccaaccuggcagccaccaagaugagcgagugcgugcugggccagagcaagcggguggacuuuugcggcaagggcuaccaccugaugagcuucccccagagcgccccacacggcgugguguuccuccacgucacauacgugcccgcccaggagaagaacuucaccaccgcccccgccauuugccacgacggcaaggcucacuucccccgggagggaguguucgugagcaacggcacccacugguucgugacccagcggaacuucuacgagccccagaucaucaccaccgacaacaccuucgugagcggcaacugcgacguggugaucggcaucgugaacaacaccguguacgacccccugcagccugagcuggacagcuucaaggaggagcuggacaaguacuucaagaaccacaccagccccgacguggaucugggcgacaucagcggcaucaacgccagcguggugaacauccagaaggagaucgaccggcugaacgagguggccaagaaccugaacgagagccugaucgaccugcaggagcugggcaaguacgagcaguacaucaaguggcccugguacaucuggcugggcuucaucgccggccugaucgccaucgugauggugaccaucaugcugugcugcaugaccagcugcuguagcugccugaagggcugcugcagcugcggcagcugcugcaaguucgacgaggacgacagcgagccagugcugaagggcgugaagcugcacuacaccugauaauaggcuggagccucgguggccuagcuucuugccccuugggccuccccccagccccuccuccccuuccugcacccguacccccguggucuuugaauaaagucugagugggcggcaaaaaaaaaaaaaaaaaaaaaaaaaaaaaaaaaaaaaaaaaaaaaaaaaaaaaaaaaaaaaaaaaaaaaaaaaaaaaaaaaaaaaaaaaaaaaaaaaaaa

SEQ ID NO: 26119 - RNA, 4095 nt, Artificial Sequence
  SARS-CoV-2/Wuhan/WIV05/2019__EPI_ISL_402128 spike protein mRNA gc (1-1273)(L18F_T20N_P26S_D138Y_R190S_K417T_E484K_N501Y_D614G_H655Y _T1027I)
gggaaauaagagagaaaagaagaguaagaagaaauauaagaccccggcgccgccaccauguucguguuccuggugcugcugccccuggugagcagccagugcgugaacuucaccaaccggacccagcugcccagcgccuacaccaacagcuucacccggggcguguacuacccugacaagguguuccggagcagcgugcugcacagcacccaggaccuguuccugcccuucuucagcaacgugaccugguuccacgccauccacgugagcggcaccaacggcaccaagcgguucgacaaccccgugcugccauucaacgacggcguguacuucgccagcaccgagaagucaaacaucauccggggcuggaucuuuggcaccacccuggacagcaagacccagagccugcugaucgugaacaacgccacaaacguggugaucaaggugugcgaguuccaguucugcaacuaccccuuccugggcguguacuaccacaagaacaacaagagcuggauggagagcgaguuccgggucuacagcagcgcuaauaacugcaccuucgaguacgugagccagcccuuccugauggaccuggagggcaagcagggcaacuucaagaaccucagcgaguucguguucaagaacaucgacggcuacuucaagaucuacagcaagcacacccccaucaaccuggugcgggaucugccccagggauucagcgcccuggagccccugguggaccugccuaucggcaucaacaucacccgguuccagacccugcuggcccugcacaggagcuaccugacccccggcgacagcagcagcggcuggaccgccggcgccgccgcauacuacgugggcuaccugcagccccggaccuuccugcugaaguacaacgagaacggcaccaucaccgacgccguggacugcgcccuggacccacugagcgagaccaagugcacccuaaagagcuucaccguggagaagggcaucuaccagaccagcaacuuccgggugcagcccaccgagagcaucgugcgguuccccaacauuacuaaccugugucccuucggcgagguguucaacgccacccgguucgccagcguguacgccuggaaccggaagcggaucagcaacugcguggccgacuacagcgugcuguacaacagcgccagcuucagcaccuucaagugcuacggcgugagccccaccaagcugaacgaccugugcuucaccaacguguacgcugacagcuucgugauccggggcgacgaggugcggcagaucgccccuggccagaccggcaccaucgccgacuacaacuacaagcugcccgacgacuucaccggcugcgugaucgccuggaacagcaacaaccuggacagcaaggugggcggcaacuacaacuaccuguaccggcuguuccguaagagcaaccugaagcccuuugagcgggacaucagcaccgagaucuaccaggccggcagcaccccaugcaacggugugaagggcuucaacugcuacuucccccugcagagcuacggcuuccagcccaccuacggcgugggcuaccagcccuaccgggugguggugcugagcuucgagcugcugcacgcccccgccaccgugugcggccccaaaaagagcaccaaccuggugaagaacaagugcgugaacuucaauuucaacggccugaccggcaccggcgugcugaccgagagcaacaagaaguuccugccuuuccagcaguucggccgggacaucgccgauaccaccgacgcagugcgggacccccagacccuggagauccuggacaucacccccugcagcuucggcggcgugagcgucaucaccccaggcacaaacaccagcaaccagguggccgugcuguaccagggagugaacugcaccgaggugcccguggccauccacgccgaccagcugacccccaccuggcggguguacuccaccggcagcaacguguuccagacccgggccggcugccugaucggcgccgaguacgugaacaacagcuacgagugcgacauccccaucggcgcuggcaucugcgccagcuaccagacccagaccaacagcccccggcgggcccggagcguggccagccagagcaucaucgccuacaccaugagccugggcgccgagaacagcguggccuacagcaacaacagcaucgcgauccccaccaacuucaccaucagcgugaccaccgagauauuaccugugagcaugaccaagaccagcguggacuguaccauguacaucugcggcgacagcaccgagugcagcaaccugcugcugcaguacggcagcuucugcacccagcugaaccgggcccugaccggcaucgccguggagcaggacaagaacacccaagagguguucgcccaggugaagcagaucuacaagacuccacccaucaaggacuucggcggcuucaacuucagccagauccugcccgaccccagcaagcccagcaagcggagcuucaucgaggaccugcuguucaacaaggugacccuggccgacgccggcuucaucaagcaguacggcgacugccugggggacaucgccgcucgggaucugaucugcgcccagaaguucaacggccugaccgugcugccuccccugcugaccgacgagaugaucgcccaguacaccagcgcccugcuggccggcaccaucaccagcggcuggaccuucggcgccggcgcagcccuucagauccccuucgccaugcagauggccuaccgguucaacggcaucggcgugacccagaacgugcuguacgagaaccagaagcugaucgccaaccaguucaacagcgccaucggcaagauccaggacagccugagcagcaccgccagcgcccugggcaagcugcaggacguggugaaccagaacgcucaggcccugaacacccuggugaagcagcugagcucaaacuuuggcgccaucagcagcgugcugaaugacauccugagccggcuggacaagguggaggccgaggugcagaucgacaggcugaucaccggccggcugcagagccugcagaccuacgugacccagcagcugauccgggccgccgagauccgggccagcgccaaccuggcagccauuaagaugagcgagugcgugcugggccagagcaagcggguggacuucugcggcaagggcuaccaccugaugagcuucccccagagcgcuccccacggcgugguguuccugcacgucaccuacgugccagcccaggagaagaacuucacaaccgcccccgccaucugccacgacggcaaggcccacuucccccgggagggaguguucgugagcaacggcacccacugguucgugacccagcggaacuucuacgagccccagaucaucaccaccgacaacaccuucgugagcggcaacugcgacguggugaucggcaucgugaacaacaccguguacgacccccuccagcccgagcuggacagcuucaaggaggagcuggacaaguacuucaagaaccacaccagcccugacguggaccugggcgauaucagcggcaucaacgccagcguggugaacauccagaaggagaucgaccggcugaacgagguggccaagaaccugaacgagagccugaucgaccugcaggagcugggcaaguacgagcaguacaucaaguggcccugguacaucuggcugggcuucaucgccggccugaucgccaucgugauggugaccaucaugcugugcugcaugaccagcugcuguagcugccugaagggcugcugcagcugcggcagcugcugcaaguucgacgaggacgacagcgagcccgugcugaagggcgugaagcugcacuacaccugauaauaggcuggagccucgguggccuagcuucuugccccuugggccuccccccagccccuccuccccuuccugcacccguacccccguggucuuugaauaaagucugagugggcggcaaaaaaaaaaaaaaaaaaaaaaaaaaaaaaaaaaaaaaaaaaaaaaaaaaaaaaaaaaaaaaaaaaaaaaaaaaaaaaaaaaaaaaaaaaaaaaaaaaaa

SEQ ID NO: 26120 - RNA, 4095 nt, Artificial Sequence
  SARS-CoV-2/Wuhan/WIV05/2019__EPI_ISL_402128 spike protein mRNA gc (1-1273)(S13I_W152C_L452R_D614G)
gggaaauaagagagaaaagaagaguaagaagaaauauaagaccccggcgccgccaccauguucguguuccuggugcugcugccccuggugagcauccagugcgugaaccugaccacccggacccagcugcccccugccuacaccaacagcuucacccggggcguguacuaccccgacaagguguuccggagcagcgugcugcacagcacccaggaccuguuccugcccuucuucagcaacgugaccugguuccacgccauccacgugagcggcaccaacggcaccaagcgguucgacaacccagugcugcccuucaacgacggcguguacuucgccagcaccgagaagucaaacaucauccggggcuggaucuucggcaccacccuggacagcaagacacagagccugcugaucgugaacaacgccaccaacguggugaucaaggugugcgaguuucaguucugcaacgaccccuuccugggcguguacuaccacaagaacaacaagagcugcauggagagcgaguuccgggucuacagcagcgcuaacaauugcaccuucgaguacgugagccagcccuuccugauggaccucgagggcaagcagggcaacuucaagaaccugcgggaguucguguucaagaacaucgauggcuacuucaagaucuacagcaagcacacccccaucaaccuggugcgggaccugccccagggauucagcgcccuggagccucugguggaccugcccaucggcaucaacaucaccagguuccagacccugcuggcccugcaccggagcuaccugacccccggcgacagcagcagcggcuggaccgccggcgccgccgcauacuacgugggcuaccugcagccacggaccuuccugcugaaguacaacgagaacggcaccaucaccgacgccguggacugcgcccuggacccccugagcgagaccaaguguacccuaaagagcuucaccguggagaagggcaucuaccagaccagcaacuuccgggugcagcccacugagagcauugugcgguuccccaacaucaccaaccugugccccuucggcgagguguucaacgccacccgguucgccagcguguacgccuggaaccggaagcggaucagcaacugcguggccgacuacagcgugcuguacaacagcgccagcuucagcaccuucaagugcuacggcgugagcccuaccaagcugaacgaccugugcuucaccaacguguacgcugacagcuucgugauccggggcgacgaggugcggcagaucgcccccggccagaccggcaagaucgccgacuacaacuacaagcugcccgacgacuucaccggcugcgugaucgccuggaacagcaacaaccuggacagcaaggugggcggcaacuacaacuaccgguaccggcuguuccguaagagcaaccugaagccauucgagcgggacaucagcaccgagaucuaccaggccggcagcacccccugcaacgguguggagggcuuuaacugcuacuucccccugcagagcuacggcuuccagcccaccaacggcgugggcuaccagcccuaccgggugguggugcugagcuucgagcugcugcacgcccccgccaccgugugcggcccuaaaaagagcaccaaccuggugaagaacaagugcgugaacuucaauuucaacggccugaccggcaccggcgugcugaccgagagcaacaagaaguuccugcccuuccagcaguucggccgggauaucgccgacaccaccgacgcagugcgggacccccagacccuggagauccuggacaucaccccaugcagcuucggcggcgugagcgucaucacccccggcacaaacaccagcaaccagguggccgugcuguaccagggagugaacugcaccgaggugcccguggccauccacgccgaccagcugacccccaccuggcggguguacagcaccggcagcaacguguuccagacccgggccggcugccugaucggcgccgagcacgugaacaacagcuacgagugcgacauccccaucggcgcuggcaucugugccuccuaccagacccagaccaacagcccccggcgggcccggagcguggccagccagagcaucaucgccuacaccaugagccugggcgccgagaacagcguggccuacagcaacaacagcaucgcgaucccuaccaacuucaccauaagcgugaccaccgagaucuuacccgugagcaugaccaagaccagcguggacugcaccauguacaucugcggcgacagcaccgagugcagcaaccugcugcugcaguacggcagcuucugcacccagcugaaccgggcccugaccggcaucgccguggagcaggacaagaacacccaagagguguucgcccaggugaagcagaucuacaagacucccccaaucaaggacuucggcggcuucaacuucagccagauccugcccgaccccagcaagcccagcaagcggagcuucaucgaggaccugcuguucaacaaggugacccuggccgacgccggcuucaucaagcaguacggcgacugccugggggauaucgccgcucgggaccugaucugcgcccagaaguucaacggccugaccgugcugcccccucugcugaccgacgagaugaucgcccaguacaccagcgcccugcuggccggcaccaucaccagcggcuggaccuucggcgccggcgcagcccuucagauccccuucgccaugcagauggccuacagguucaacggcaucggcgugacccagaacgugcuguacgagaaccagaagcugaucgccaaccaguucaacagcgccaucggcaagauccaggacagccugagcagcaccgccagcgcccugggcaagcugcaggacguggugaaccagaacgcucaggcccugaacacccuggugaagcagcugagcagcaacuucggcgccaucagcagcgugcugaaugacauccugucacggcuggacaagguggaggccgaggugcagaucgaccggcugaucaccggccggcugcagagccugcagaccuacgugacccagcagcugauccgggccgccgagauucgggccagcgccaaccuggcagccaccaagaugagcgagugcgugcugggccagagcaagcggguggacuuuugcggcaagggcuaccaccugaugagcuucccccagagcgccccacacggcgugguguuccugcacgucacauacgugcccgcccaggagaagaacuucaccaccgcccccgccaucugccacgacggcaaggcucacuucccccgggagggaguguucgugagcaacggcacccacugguucgugacccagcggaacuucuacgagccccagaucaucaccaccgacaacaccuucgugagcggcaacugcgacguggugaucggcaucgugaacaacaccguguacgacccccuccagccugagcuggacagcuucaaggaggagcuggacaaguacuucaagaaccacaccagccccgacguggaucugggcgacaucagcggcaucaacgccagcguggugaacauccagaaggagaucgaccggcugaacgagguggccaagaaccugaacgagagccugaucgaccugcaggagcugggcaaguacgagcaguacaucaaguggcccugguacaucuggcugggcuucaucgccggccugaucgccaucgugauggugaccaucaugcugugcugcaugaccagcuguugcagcugccugaagggcugcugcagcugcggcagcugcugcaaguucgacgaggacgacagcgagccagugcugaagggcgugaagcugcacuacaccugauaauaggcuggagccucgguggccuagcuucuugccccuugggccuccccccagccccuccuccccuuccugcacccguacccccguggucuuugaauaaagucugagugggcggcaaaaaaaaaaaaaaaaaaaaaaaaaaaaaaaaaaaaaaaaaaaaaaaaaaaaaaaaaaaaaaaaaaaaaaaaaaaaaaaaaaaaaaaaaaaaaaaaaaaa

SEQ ID NO: 26121 - RNA, 4095 nt, Artificial Sequence
  SARS-CoV-2/Wuhan/WIV05/2019__EPI_ISL_402128 spike protein mRNA gc mod (1-1273)
gggaaauaagagagaaaagaagaguaagaagaaauauaagaccccggcgccgccaccauguucguguuucuggugcugcugccccugguguccagccagugugugaaccugaccaccagaacacagcugccuccagccuacaccaacagcuucaccagaggcguguacuaccccgacaagguguucagauccagcgugcugcacucuacccaggaccuguuccugccuuucuucagcaacgugaccugguuccacgccauccacguguccggcaccaauggcaccaagagauucgacaaccccgugcugcccuucaacgacgggguguacuuugccagcaccgagaaguccaacaucaucagaggcuggaucuucggcaccacacuggacagcaagacccagagccugcugaucgugaacaacgccaccaacguggucaucaaagugugcgaguuccaguucugcaacgaccccuuccugggcgucuacuaccacaagaacaacaagagcuggauggaaagcgaguuccggguguacagcagcgccaacaacugcaccuucgaguacgugucccagccuuuccugauggaccuggaaggcaagcagggcaacuucaagaaccugcgcgaguucguguucaagaacaucgacggcuacuucaaaaucuacagcaagcacaccccuaucaaccucgugcgggaucugccucagggcuucucugcucuggaaccccugguggaucugcccaucggcaucaacaucacccgguuucagacacugcuggcccugcacagaagcuaccugacaccuggcgauagcagcagcggauggacagcuggugccgccgcuuacuaugugggcuaccugcagccuagaaccuuccugcugaaguacaacgagaacggcaccaucaccgacgccguggauugugcucuggauccucugagcgagacaaagugcacccugaaguccuucaccguggaaaagggcaucuaccagaccagcaacuuccgggugcagcccaccgaauccaucgugcgguuccccaauaucaccaaucugugccccuucggcgagguguucaaugccaccagauucgccucuguguacgccuggaaccggaagcggaucagcaauugcguggccgacuacuccgugcuguacaacuccgccagcuucagcaccuucaagugcuacggcguguccccuaccaagcugaacgaccugugcuucacaaacguguacgccgacagcuucgugauccggggagaugaagugcggcagauugccccuggacagacaggcaagaucgccgacuacaacuacaagcugcccgacgacuucaccggcugugugauugccuggaacagcaacaaccuggacuccaaagucggcggcaacuacaauuaccuguaccggcuguuccggaaguccaaucugaagcccuucgagcgggacaucagcaccgaaaucuaucaggccggcagcaccccuugcaacggcguggaaggcuucaacugcuacuucccacugcaguccuacggcuuucagcccacaaauggcgugggcuaucagcccuacagagugguggugcugagcuucgaacugcugcaugcuccugccacagugugcggcccuaagaaaagcaccaaucucgugaagaacaaaugcgugaacuucaacuucaacggccugaccggcaccggcgugcugacagagagcaacaagaaguuccugccauuccagcaguuuggccgggauaucgccgauaccacagacgccguuagagauccccagacacuggaaauccuggacaucaccccaugcagcuucggcggagugucugugaucaccccuggcaccaacaccagcaaucagguggcagugcuguaccaggacgugaacuguaccgaagugcccguggccauucacgccgaucagcugacaccuacauggcggguguacuccaccggcagcaauguguuucagaccagagccggcugucugaucggagccgagcacgugaacaauagcuacgagugcgacauccccaucggcgcuggcaucugugccagcuaccagacacagacaaacagccccagacgggcuagaagcguggccagccagagcaucauugccuacacaaugucucugggcgccgagaacagcguggccuacuccaacaacucuaucgcuauccccaccaacuucaccaucagcgugaccaccgagauccugccuguguccaugaccaagaccagcguggacugcaccauguacaucugcggcgauuccaccgagugcuccaaccugcugcugcaguacggcagcuucugcacccagcugaauagagcccugacagggaucgccguggaacaggacaagaacacccaagagguguucgcccaagugaagcaaaucuacaagaccccuccuaucaaggacuucggcggcuucaauuucagccagauucugcccgauccuagcaagcccagcaagcggagcuucaucgaggaccugcuguucaacaaagugacacuggccgacgccggcuucaucaagcaguauggcgauugucugggcgacauugccgccagggaucugauuugcgcccagaaguuuaacggacugacagugcugccuccucugcugaccgaugagaugaucgcccaguacacaucugcccugcuggccggcacaaucacaagcggcuggacauuuggagcuggcgccgcucugcagauccccuuugcuaugcagauggccuaccgguucaacggcaucggagugacccagaaugugcuguacgagaaccagaagcugaucgccaaccaguucaacagcgccaucggcaagauccaggacagccugagcagcacagcaagcgcccugggaaagcugcaggacguggucaaccagaaugcccaggcacugaacacccuggucaagcagcuguccuccaacuucggcgccaucagcucugugcugaacgauauccugagcagacuggacaaggucgaggccgaggugcagaucgacagacugaucacaggcagacugcagagccuccagacauacgugacccagcagcugaucagagccgccgagauuagagccucugccaaucuggccgccaccaagaugucugagugugugcugggccagagcaagagaguggacuuuugcggcaagggcuaccaccugaugagcuucccucagucugccccucacggcgugguguuucugcacgugacauaugugcccgcucaagagaagaauuucaccaccgcuccagccaucugccacgacggcaaagcccacuuuccuagagaaggcguguucguguccaacggcacccauugguucgugacacagcggaacuucuacgagccccagaucaucaccaccgacaacaccuucgugucuggcaacugcgacguugugaucggcauugugaacaauaccguguacgacccucugcagcccgagcuggacagcuucaaagaggaacuggacaaguacuuuaagaaccacacaagccccgacguggaccugggcgauaucagcggaaucaaugccagcgucgugaacauccagaaagagaucgaccggcugaacgagguggccaagaaucugaacgagagccugaucgaccugcaagaacuggggaaguacgagcaguacaucaaguggcccugguacaucuggcugggcuuuaucgccggacugauugccaucgugauggucacaaucaugcuguguugcaugaccagcugcuguagcugccugaagggcuguuguagcuguggcagcugcugcaaguucgacgaggacgauucugagcccgugcugaagggcgugaaacugcacuacaccugauaauaggcuggagccucgguggccuagcuucuugccccuugggccuccccccagccccuccuccccuuccugcacccguacccccguggucuuugaauaaagucugagugggcggcaaaaaaaaaaaaaaaaaaaaaaaaaaaaaaaaaaaaaaaaaaaaaaaaaaaaaaaaaaaaaaaaaaaaaaaaaaaaaaaaaaaaaaaaaaaaaaaaaaaa

SEQ ID NO: 26122 - RNA, 4095 nt, Artificial Sequence
  SARS-CoV-2/Wuhan/WIV05/2019__EPI_ISL_402128 spike protein mRNA gc mod (1-1273)(D614G)
gggaaauaagagagaaaagaagaguaagaagaaauauaagaccccggcgccgccaccauguucguguuucuggugcugcugccccugguguccagccagugugugaaccugaccaccagaacacagcugccuccagccuacaccaacagcuucaccagaggcguguacuaccccgacaagguguucagauccagcgugcugcacucuacccaggaccuguuccugccuuucuucagcaacgugaccugguuccacgccauccacguguccggcaccaauggcaccaagagauucgacaaccccgugcugcccuucaacgacgggguguacuuugccagcaccgagaaguccaacaucaucagaggcuggaucuucggcaccacacuggacagcaagacccagagccugcugaucgugaacaacgccaccaacguggucaucaaagugugcgaguuccaguucugcaacgaccccuuccugggcgucuacuaccacaagaacaacaagagcuggauggaaagcgaguuccggguguacagcagcgccaacaacugcaccuucgaguacgugucccagccuuuccugauggaccuggaaggcaagcagggcaacuucaagaaccugcgcgaguucguguucaagaacaucgacggcuacuucaaaaucuacagcaagcacaccccuaucaaccucgugcgggaucugccucagggcuucucugcucuggaaccccugguggaucugcccaucggcaucaacaucacccgguuucagacacugcuggcccugcacagaagcuaccugacaccuggcgauagcagcagcggauggacagcuggugccgccgcuuacuaugugggcuaccugcagccuagaaccuuccugcugaaguacaacgagaacggcaccaucaccgacgccguggauugugcucuggauccucugagcgagacaaagugcacccugaaguccuucaccguggaaaagggcaucuaccagaccagcaacuuccgggugcagcccaccgaauccaucgugcgguuccccaauaucaccaaucugugccccuucggcgagguguucaaugccaccagauucgccucuguguacgccuggaaccggaagcggaucagcaauugcguggccgacuacuccgugcuguacaacuccgccagcuucagcaccuucaagugcuacggcguguccccuaccaagcugaacgaccugugcuucacaaacguguacgccgacagcuucgugauccggggagaugaagugcggcagauugccccuggacagacaggcaagaucgccgacuacaacuacaagcugcccgacgacuucaccggcugugugauugccuggaacagcaacaaccuggacuccaaagucggcggcaacuacaauuaccuguaccggcuguuccggaaguccaaucugaagcccuucgagcgggacaucagcaccgaaaucuaucaggccggcagcaccccuugcaacggcguggaaggcuucaacugcuacuucccacugcaguccuacggcuuucagcccacaaauggcgugggcuaucagcccuacagagugguggugcugagcuucgaacugcugcaugcuccugccacagugugcggcccuaagaaaagcaccaaucucgugaagaacaaaugcgugaacuucaacuucaacggccugaccggcaccggcgugcugacagagagcaacaagaaguuccugccauuccagcaguuuggccgggauaucgccgauaccacagacgccguuagagauccccagacacuggaaauccuggacaucaccccaugcagcuucggcggagugucugugaucaccccuggcaccaacaccagcaaucagguggcagugcuguaccagggcgugaacuguaccgaagugcccguggccauucacgccgaucagcugacaccuacauggcggguguacuccaccggcagcaauguguuucagaccagagccggcugucugaucggagccgagcacgugaacaauagcuacgagugcgacauccccaucggcgcuggcaucugugccagcuaccagacacagacaaacagccccagacgggcuagaagcguggccagccagagcaucauugccuacacaaugucucugggcgccgagaacagcguggccuacuccaacaacucuaucgcuauccccaccaacuucaccaucagcgugaccaccgagauccugccuguguccaugaccaagaccagcguggacugcaccauguacaucugcggcgauuccaccgagugcuccaaccugcugcugcaguacggcagcuucugcacccagcugaauagagcccugacagggaucgccguggaacaggacaagaacacccaagagguguucgcccaagugaagcaaaucuacaagaccccuccuaucaaggacuucggcggcuucaauuucagccagauucugcccgauccuagcaagcccagcaagcggagcuucaucgaggaccugcuguucaacaaagugacacuggccgacgccggcuucaucaagcaguauggcgauugucugggcgacauugccgccagggaucugauuugcgcccagaaguuuaacggacugacagugcugccuccucugcugaccgaugagaugaucgcccaguacacaucugcccugcuggccggcacaaucacaagcggcuggacauuuggagcuggcgccgcucugcagauccccuuugcuaugcagauggccuaccgguucaacggcaucggagugacccagaaugugcuguacgagaaccagaagcugaucgccaaccaguucaacagcgccaucggcaagauccaggacagccugagcagcacagcaagcgcccugggaaagcugcaggacguggucaaccagaaugcccaggcacugaacacccuggucaagcagcuguccuccaacuucggcgccaucagcucugugcugaacgauauccugagcagacuggacaaggucgaggccgaggugcagaucgacagacugaucacaggcagacugcagagccuccagacauacgugacccagcagcugaucagagccgccgagauuagagccucugccaaucuggccgccaccaagaugucugagugugugcugggccagagcaagagaguggacuuuugcggcaagggcuaccaccugaugagcuucccucagucugccccucacggcgugguguuucugcacgugacauaugugcccgcucaagagaagaauuucaccaccgcuccagccaucugccacgacggcaaagcccacuuuccuagagaaggcguguucguguccaacggcacccauugguucgugacacagcggaacuucuacgagccccagaucaucaccaccgacaacaccuucgugucuggcaacugcgacguugugaucggcauugugaacaauaccguguacgacccucugcagcccgagcuggacagcuucaaagaggaacuggacaaguacuuuaagaaccacacaagccccgacguggaccugggcgauaucagcggaaucaaugccagcgucgugaacauccagaaagagaucgaccggcugaacgagguggccaagaaucugaacgagagccugaucgaccugcaagaacuggggaaguacgagcaguacaucaaguggcccugguacaucuggcugggcuuuaucgccggacugauugccaucgugauggucacaaucaugcuguguugcaugaccagcugcuguagcugccugaagggcuguuguagcuguggcagcugcugcaaguucgacgaggacgauucugagcccgugcugaagggcgugaaacugcacuacaccugauaauaggcuggagccucgguggccuagcuucuugccccuugggccuccccccagccccuccuccccuuccugcacccguacccccguggucuuugaauaaagucugagugggcggcaaaaaaaaaaaaaaaaaaaaaaaaaaaaaaaaaaaaaaaaaaaaaaaaaaaaaaaaaaaaaaaaaaaaaaaaaaaaaaaaaaaaaaaaaaaaaaaaaaaa

SEQ ID NO: 26123 - RNA, 4095 nt, Artificial Sequence
  SARS-CoV-2/Wuhan/WIV05/2019__EPI_ISL_402128 spike protein mRNA gc mod (1-1273)(A222V_D614G)
gggaaauaagagagaaaagaagaguaagaagaaauauaagaccccggcgccgccaccauguucguguuucuggugcugcugccccugguguccagccagugugugaaccugaccaccagaacacagcugccuccagccuacaccaacagcuucaccagaggcguguacuaccccgacaagguguucagauccagcgugcugcacucuacccaggaccuguuccugccuuucuucagcaacgugaccugguuccacgccauccacguguccggcaccaauggcaccaagagauucgacaaccccgugcugcccuucaacgacgggguguacuuugccagcaccgagaaguccaacaucaucagaggcuggaucuucggcaccacacuggacagcaagacccagagccugcugaucgugaacaacgccaccaacguggucaucaaagugugcgaguuccaguucugcaacgaccccuuccugggcgucuacuaccacaagaacaacaagagcuggauggaaagcgaguuccggguguacagcagcgccaacaacugcaccuucgaguacgugucccagccuuuccugauggaccuggaaggcaagcagggcaacuucaagaaccugcgcgaguucguguucaagaacaucgacggcuacuucaaaaucuacagcaagcacaccccuaucaaccucgugcgggaucugccucagggcuucucugugcuggaaccccugguggaucugcccaucggcaucaacaucacccgguuucagacacugcuggcccugcacagaagcuaccugacaccuggcgauagcagcagcggauggacagcuggugccgccgcuuacuaugugggcuaccugcagccuagaaccuuccugcugaaguacaacgagaacggcaccaucaccgacgccguggauugugcucuggauccucugagcgagacaaagugcacccugaaguccuucaccguggaaaagggcaucuaccagaccagcaacuuccgggugcagcccaccgaauccaucgugcgguuccccaauaucaccaaucugugccccuucggcgagguguucaaugccaccagauucgccucuguguacgccuggaaccggaagcggaucagcaauugcguggccgacuacuccgugcuguacaacuccgccagcuucagcaccuucaagugcuacggcguguccccuaccaagcugaacgaccugugcuucacaaacguguacgccgacagcuucgugauccggggagaugaagugcggcagauugccccuggacagacaggcaagaucgccgacuacaacuacaagcugcccgacgacuucaccggcugugugauugccuggaacagcaacaaccuggacuccaaagucggcggcaacuacaauuaccuguaccggcuguuccggaaguccaaucugaagcccuucgagcgggacaucagcaccgaaaucuaucaggccggcagcaccccuugcaacggcguggaaggcuucaacugcuacuucccacugcaguccuacggcuuucagcccacaaauggcgugggcuaucagcccuacagagugguggugcugagcuucgaacugcugcaugcuccugccacagugugcggcccuaagaaaagcaccaaucucgugaagaacaaaugcgugaacuucaacuucaacggccugaccggcaccggcgugcugacagagagcaacaagaaguuccugccauuccagcaguuuggccgggauaucgccgauaccacagacgccguuagagauccccagacacuggaaauccuggacaucaccccaugcagcuucggcggagugucugugaucaccccuggcaccaacaccagcaaucagguggcagugcuguaccagggcgugaacuguaccgaagugcccguggccauucacgccgaucagcugacaccuacauggcggguguacuccaccggcagcaauguguuucagaccagagccggcugucugaucggagccgagcacgugaacaauagcuacgagugcgacauccccaucggcgcuggcaucugugccagcuaccagacacagacaaacagccccagacgggcuagaagcguggccagccagagcaucauugccuacacaaugucucugggcgccgagaacagcguggccuacuccaacaacucuaucgcuauccccaccaacuucaccaucagcgugaccaccgagauccugccuguguccaugaccaagaccagcguggacugcaccauguacaucugcggcgauuccaccgagugcuccaaccugcugcugcaguacggcagcuucugcacccagcugaauagagcccugacagggaucgccguggaacaggacaagaacacccaagagguguucgcccaagugaagcaaaucuacaagaccccuccuaucaaggacuucggcggcuucaauuucagccagauucugcccgauccuagcaagcccagcaagcggagcuucaucgaggaccugcuguucaacaaagugacacuggccgacgccggcuucaucaagcaguauggcgauugucugggcgacauugccgccagggaucugauuugcgcccagaaguuuaacggacugacagugcugccuccucugcugaccgaugagaugaucgcccaguacacaucugcccugcuggccggcacaaucacaagcggcuggacauuuggagcuggcgccgcucugcagauccccuuugcuaugcagauggccuaccgguucaacggcaucggagugacccagaaugugcuguacgagaaccagaagcugaucgccaaccaguucaacagcgccaucggcaagauccaggacagccugagcagcacagcaagcgcccugggaaagcugcaggacguggucaaccagaaugcccaggcacugaacacccuggucaagcagcuguccuccaacuucggcgccaucagcucugugcugaacgauauccugagcagacuggacaaggucgaggccgaggugcagaucgacagacugaucacaggcagacugcagagccuccagacauacgugacccagcagcugaucagagccgccgagauuagagccucugccaaucuggccgccaccaagaugucugagugugugcugggccagagcaagagaguggacuuuugcggcaagggcuaccaccugaugagcuucccucagucugccccucacggcgugguguuucugcacgugacauaugugcccgcucaagagaagaauuucaccaccgcuccagccaucugccacgacggcaaagcccacuuuccuagagaaggcguguucguguccaacggcacccauugguucgugacacagcggaacuucuacgagccccagaucaucaccaccgacaacaccuucgugucuggcaacugcgacguugugaucggcauugugaacaauaccguguacgacccucugcagcccgagcuggacagcuucaaagaggaacuggacaaguacuuuaagaaccacacaagccccgacguggaccugggcgauaucagcggaaucaaugccagcgucgugaacauccagaaagagaucgaccggcugaacgagguggccaagaaucugaacgagagccugaucgaccugcaagaacuggggaaguacgagcaguacaucaaguggcccugguacaucuggcugggcuuuaucgccggacugauugccaucgugauggucacaaucaugcuguguugcaugaccagcugcuguagcugccugaagggcuguuguagcuguggcagcugcugcaaguucgacgaggacgauucugagcccgugcugaagggcgugaaacugcacuacaccugauaauaggcuggagccucgguggccuagcuucuugccccuugggccuccccccagccccuccuccccuuccugcacccguacccccguggucuuugaauaaagucugagugggcggcaaaaaaaaaaaaaaaaaaaaaaaaaaaaaaaaaaaaaaaaaaaaaaaaaaaaaaaaaaaaaaaaaaaaaaaaaaaaaaaaaaaaaaaaaaaaaaaaaaaa

SEQ ID NO: 26124 - RNA, 4095 nt, Artificial Sequence
  SARS-CoV-2/Wuhan/WIV05/2019__EPI_ISL_402128 spike protein mRNA gc mod (1-1273)(N439K_D614G)
gggaaauaagagagaaaagaagaguaagaagaaauauaagaccccggcgccgccaccauguucguguuucuggugcugcugccccugguguccagccagugugugaaccugaccaccagaacacagcugccuccagccuacaccaacagcuucaccagaggcguguacuaccccgacaagguguucagauccagcgugcugcacucuacccaggaccuguuccugccuuucuucagcaacgugaccugguuccacgccauccacguguccggcaccaauggcaccaagagauucgacaaccccgugcugcccuucaacgacgggguguacuuugccagcaccgagaaguccaacaucaucagaggcuggaucuucggcaccacacuggacagcaagacccagagccugcugaucgugaacaacgccaccaacguggucaucaaagugugcgaguuccaguucugcaacgaccccuuccugggcgucuacuaccacaagaacaacaagagcuggauggaaagcgaguuccggguguacagcagcgccaacaacugcaccuucgaguacgugucccagccuuuccugauggaccuggaaggcaagcagggcaacuucaagaaccugcgcgaguucguguucaagaacaucgacggcuacuucaaaaucuacagcaagcacaccccuaucaaccucgugcgggaucugccucagggcuucucugcucuggaaccccugguggaucugcccaucggcaucaacaucacccgguuucagacacugcuggcccugcacagaagcuaccugacaccuggcgauagcagcagcggauggacagcuggugccgccgcuuacuaugugggcuaccugcagccuagaaccuuccugcugaaguacaacgagaacggcaccaucaccgacgccguggauugugcucuggauccucugagcgagacaaagugcacccugaaguccuucaccguggaaaagggcaucuaccagaccagcaacuuccgggugcagcccaccgaauccaucgugcgguuccccaauaucaccaaucugugccccuucggcgagguguucaaugccaccagauucgccucuguguacgccuggaaccggaagcggaucagcaauugcguggccgacuacuccgugcuguacaacuccgccagcuucagcaccuucaagugcuacggcguguccccuaccaagcugaacgaccugugcuucacaaacguguacgccgacagcuucgugauccggggagaugaagugcggcagauugccccuggacagacaggcaagaucgccgacuacaacuacaagcugcccgacgacuucaccggcugugugauugccuggaacagcaagaaccuggacuccaaagucggcggcaacuacaauuaccuguaccggcuguuccggaaguccaaucugaagcccuucgagcgggacaucagcaccgaaaucuaucaggccggcagcaccccuugcaacggcguggaaggcuucaacugcuacuucccacugcaguccuacggcuuucagcccacaaauggcgugggcuaucagcccuacagagugguggugcugagcuucgaacugcugcaugcuccugccacagugugcggcccuaagaaaagcaccaaucucgugaagaacaaaugcgugaacuucaacuucaacggccugaccggcaccggcgugcugacagagagcaacaagaaguuccugccauuccagcaguuuggccgggauaucgccgauaccacagacgccguuagagauccccagacacuggaaauccuggacaucaccccaugcagcuucggcggagugucugugaucaccccuggcaccaacaccagcaaucagguggcagugcuguaccagggcgugaacuguaccgaagugcccguggccauucacgccgaucagcugacaccuacauggcggguguacuccaccggcagcaauguguuucagaccagagccggcugucugaucggagccgagcacgugaacaauagcuacgagugcgacauccccaucggcgcuggcaucugugccagcuaccagacacagacaaacagccccagacgggcuagaagcguggccagccagagcaucauugccuacacaaugucucugggcgccgagaacagcguggccuacuccaacaacucuaucgcuauccccaccaacuucaccaucagcgugaccaccgagauccugccuguguccaugaccaagaccagcguggacugcaccauguacaucugcggcgauuccaccgagugcuccaaccugcugcugcaguacggcagcuucugcacccagcugaauagagcccugacagggaucgccguggaacaggacaagaacacccaagagguguucgcccaagugaagcaaaucuacaagaccccuccuaucaaggacuucggcggcuucaauuucagccagauucugcccgauccuagcaagcccagcaagcggagcuucaucgaggaccugcuguucaacaaagugacacuggccgacgccggcuucaucaagcaguauggcgauugucugggcgacauugccgccagggaucugauuugcgcccagaaguuuaacggacugacagugcugccuccucugcugaccgaugagaugaucgcccaguacacaucugcccugcuggccggcacaaucacaagcggcuggacauuuggagcuggcgccgcucugcagauccccuuugcuaugcagauggccuaccgguucaacggcaucggagugacccagaaugugcuguacgagaaccagaagcugaucgccaaccaguucaacagcgccaucggcaagauccaggacagccugagcagcacagcaagcgcccugggaaagcugcaggacguggucaaccagaaugcccaggcacugaacacccuggucaagcagcuguccuccaacuucggcgccaucagcucugugcugaacgauauccugagcagacuggacaaggucgaggccgaggugcagaucgacagacugaucacaggcagacugcagagccuccagacauacgugacccagcagcugaucagagccgccgagauuagagccucugccaaucuggccgccaccaagaugucugagugugugcugggccagagcaagagaguggacuuuugcggcaagggcuaccaccugaugagcuucccucagucugccccucacggcgugguguuucugcacgugacauaugugcccgcucaagagaagaauuucaccaccgcuccagccaucugccacgacggcaaagcccacuuuccuagagaaggcguguucguguccaacggcacccauugguucgugacacagcggaacuucuacgagccccagaucaucaccaccgacaacaccuucgugucuggcaacugcgacguugugaucggcauugugaacaauaccguguacgacccucugcagcccgagcuggacagcuucaaagaggaacuggacaaguacuuuaagaaccacacaagccccgacguggaccugggcgauaucagcggaaucaaugccagcgucgugaacauccagaaagagaucgaccggcugaacgagguggccaagaaucugaacgagagccugaucgaccugcaagaacuggggaaguacgagcaguacaucaaguggcccugguacaucuggcugggcuuuaucgccggacugauugccaucgugauggucacaaucaugcuguguugcaugaccagcugcuguagcugccugaagggcuguuguagcuguggcagcugcugcaaguucgacgaggacgauucugagcccgugcugaagggcgugaaacugcacuacaccugauaauaggcuggagccucgguggccuagcuucuugccccuugggccuccccccagccccuccuccccuuccugcacccguacccccguggucuuugaauaaagucugagugggcggcaaaaaaaaaaaaaaaaaaaaaaaaaaaaaaaaaaaaaaaaaaaaaaaaaaaaaaaaaaaaaaaaaaaaaaaaaaaaaaaaaaaaaaaaaaaaaaaaaaaa

SEQ ID NO: 26125 - RNA, 4095 nt, Artificial Sequence
  SARS-CoV-2/Wuhan/WIV05/2019__EPI_ISL_402128 spike protein mRNA gc mod (1-1273)(S477N_D614G)
gggaaauaagagagaaaagaagaguaagaagaaauauaagaccccggcgccgccaccauguucguguuucuggugcugcugccccugguguccagccagugugugaaccugaccaccagaacacagcugccuccagccuacaccaacagcuucaccagaggcguguacuaccccgacaagguguucagauccagcgugcugcacucuacccaggaccuguuccugccuuucuucagcaacgugaccugguuccacgccauccacguguccggcaccaauggcaccaagagauucgacaaccccgugcugcccuucaacgacgggguguacuuugccagcaccgagaaguccaacaucaucagaggcuggaucuucggcaccacacuggacagcaagacccagagccugcugaucgugaacaacgccaccaacguggucaucaaagugugcgaguuccaguucugcaacgaccccuuccugggcgucuacuaccacaagaacaacaagagcuggauggaaagcgaguuccggguguacagcagcgccaacaacugcaccuucgaguacgugucccagccuuuccugauggaccuggaaggcaagcagggcaacuucaagaaccugcgcgaguucguguucaagaacaucgacggcuacuucaaaaucuacagcaagcacaccccuaucaaccucgugcgggaucugccucagggcuucucugcucuggaaccccugguggaucugcccaucggcaucaacaucacccgguuucagacacugcuggcccugcacagaagcuaccugacaccuggcgauagcagcagcggauggacagcuggugccgccgcuuacuaugugggcuaccugcagccuagaaccuuccugcugaaguacaacgagaacggcaccaucaccgacgccguggauugugcucuggauccucugagcgagacaaagugcacccugaaguccuucaccguggaaaagggcaucuaccagaccagcaacuuccgggugcagcccaccgaauccaucgugcgguuccccaauaucaccaaucugugccccuucggcgagguguucaaugccaccagauucgccucuguguacgccuggaaccggaagcggaucagcaauugcguggccgacuacuccgugcuguacaacuccgccagcuucagcaccuucaagugcuacggcguguccccuaccaagcugaacgaccugugcuucacaaacguguacgccgacagcuucgugauccggggagaugaagugcggcagauugccccuggacagacaggcaagaucgccgacuacaacuacaagcugcccgacgacuucaccggcugugugauugccuggaacagcaacaaccuggacuccaaagucggcggcaacuacaauuaccuguaccggcuguuccggaaguccaaucugaagcccuucgagcgggacaucagcaccgaaaucuaucaggccggcaacaccccuugcaacggcguggaaggcuucaacugcuacuucccacugcaguccuacggcuuucagcccacaaauggcgugggcuaucagcccuacagagugguggugcugagcuucgaacugcugcaugcuccugccacagugugcggcccuaagaaaagcaccaaucucgugaagaacaaaugcgugaacuucaacuucaacggccugaccggcaccggcgugcugacagagagcaacaagaaguuccugccauuccagcaguuuggccgggauaucgccgauaccacagacgccguuagagauccccagacacuggaaauccuggacaucaccccaugcagcuucggcggagugucugugaucaccccuggcaccaacaccagcaaucagguggcagugcuguaccagggcgugaacuguaccgaagugcccguggccauucacgccgaucagcugacaccuacauggcggguguacuccaccggcagcaauguguuucagaccagagccggcugucugaucggagccgagcacgugaacaauagcuacgagugcgacauccccaucggcgcuggcaucugugccagcuaccagacacagacaaacagccccagacgggcuagaagcguggccagccagagcaucauugccuacacaaugucucugggcgccgagaacagcguggccuacuccaacaacucuaucgcuauccccaccaacuucaccaucagcgugaccaccgagauccugccuguguccaugaccaagaccagcguggacugcaccauguacaucugcggcgauuccaccgagugcuccaaccugcugcugcaguacggcagcuucugcacccagcugaauagagcccugacagggaucgccguggaacaggacaagaacacccaagagguguucgcccaagugaagcaaaucuacaagaccccuccuaucaaggacuucggcggcuucaauuucagccagauucugcccgauccuagcaagcccagcaagcggagcuucaucgaggaccugcuguucaacaaagugacacuggccgacgccggcuucaucaagcaguauggcgauugucugggcgacauugccgccagggaucugauuugcgcccagaaguuuaacggacugacagugcugccuccucugcugaccgaugagaugaucgcccaguacacaucugcccugcuggccggcacaaucacaagcggcuggacauuuggagcuggcgccgcucugcagauccccuuugcuaugcagauggccuaccgguucaacggcaucggagugacccagaaugugcuguacgagaaccagaagcugaucgccaaccaguucaacagcgccaucggcaagauccaggacagccugagcagcacagcaagcgcccugggaaagcugcaggacguggucaaccagaaugcccaggcacugaacacccuggucaagcagcuguccuccaacuucggcgccaucagcucugugcugaacgauauccugagcagacuggacaaggucgaggccgaggugcagaucgacagacugaucacaggcagacugcagagccuccagacauacgugacccagcagcugaucagagccgccgagauuagagccucugccaaucuggccgccaccaagaugucugagugugugcugggccagagcaagagaguggacuuuugcggcaagggcuaccaccugaugagcuucccucagucugccccucacggcgugguguuucugcacgugacauaugugcccgcucaagagaagaauuucaccaccgcuccagccaucugccacgacggcaaagcccacuuuccuagagaaggcguguucguguccaacggcacccauugguucgugacacagcggaacuucuacgagccccagaucaucaccaccgacaacaccuucgugucuggcaacugcgacguugugaucggcauugugaacaauaccguguacgacccucugcagcccgagcuggacagcuucaaagaggaacuggacaaguacuuuaagaaccacacaagccccgacguggaccugggcgauaucagcggaaucaaugccagcgucgugaacauccagaaagagaucgaccggcugaacgagguggccaagaaucugaacgagagccugaucgaccugcaagaacuggggaaguacgagcaguacaucaaguggcccugguacaucuggcugggcuuuaucgccggacugauugccaucgugauggucacaaucaugcuguguugcaugaccagcugcuguagcugccugaagggcuguuguagcuguggcagcugcugcaaguucgacgaggacgauucugagcccgugcugaagggcgugaaacugcacuacaccugauaauaggcuggagccucgguggccuagcuucuugccccuugggccuccccccagccccuccuccccuuccugcacccguacccccguggucuuugaauaaagucugagugggcggcaaaaaaaaaaaaaaaaaaaaaaaaaaaaaaaaaaaaaaaaaaaaaaaaaaaaaaaaaaaaaaaaaaaaaaaaaaaaaaaaaaaaaaaaaaaaaaaaaaaa

SEQ ID NO: 26126 - RNA, 4095 nt, Artificial Sequence
  SARS-CoV-2/Wuhan/WIV05/2019__EPI_ISL_402128 spike protein mRNA gc mod (1-1273)(N501Y_D614G)
gggaaauaagagagaaaagaagaguaagaagaaauauaagaccccggcgccgccaccauguucguguuucuggugcugcugccccugguguccagccagugugugaaccugaccaccagaacacagcugccuccagccuacaccaacagcuucaccagaggcguguacuaccccgacaagguguucagauccagcgugcugcacucuacccaggaccuguuccugccuuucuucagcaacgugaccugguuccacgccauccacguguccggcaccaauggcaccaagagauucgacaaccccgugcugcccuucaacgacgggguguacuuugccagcaccgagaaguccaacaucaucagaggcuggaucuucggcaccacacuggacagcaagacccagagccugcugaucgugaacaacgccaccaacguggucaucaaagugugcgaguuccaguucugcaacgaccccuuccugggcgucuacuaccacaagaacaacaagagcuggauggaaagcgaguuccggguguacagcagcgccaacaacugcaccuucgaguacgugucccagccuuuccugauggaccuggaaggcaagcagggcaacuucaagaaccugcgcgaguucguguucaagaacaucgacggcuacuucaaaaucuacagcaagcacaccccuaucaaccucgugcgggaucugccucagggcuucucugcucuggaaccccugguggaucugcccaucggcaucaacaucacccgguuucagacacugcuggcccugcacagaagcuaccugacaccuggcgauagcagcagcggauggacagcuggugccgccgcuuacuaugugggcuaccugcagccuagaaccuuccugcugaaguacaacgagaacggcaccaucaccgacgccguggauugugcucuggauccucugagcgagacaaagugcacccugaaguccuucaccguggaaaagggcaucuaccagaccagcaacuuccgggugcagcccaccgaauccaucgugcgguuccccaauaucaccaaucugugccccuucggcgagguguucaaugccaccagauucgccucuguguacgccuggaaccggaagcggaucagcaauugcguggccgacuacuccgugcuguacaacuccgccagcuucagcaccuucaagugcuacggcguguccccuaccaagcugaacgaccugugcuucacaaacguguacgccgacagcuucgugauccggggagaugaagugcggcagauugccccuggacagacaggcaagaucgccgacuacaacuacaagcugcccgacgacuucaccggcugugugauugccuggaacagcaacaaccuggacuccaaagucggcggcaacuacaauuaccuguaccggcuguuccggaaguccaaucugaagcccuucgagcgggacaucagcaccgaaaucuaucaggccggcagcaccccuugcaacggcguggaaggcuucaacugcuacuucccacugcaguccuacggcuuucagcccacauacggcgugggcuaucagcccuacagagugguggugcugagcuucgaacugcugcaugcuccugccacagugugcggcccuaagaaaagcaccaaucucgugaagaacaaaugcgugaacuucaacuucaacggccugaccggcaccggcgugcugacagagagcaacaagaaguuccugccauuccagcaguuuggccgggauaucgccgauaccacagacgccguuagagauccccagacacuggaaauccuggacaucaccccaugcagcuucggcggagugucugugaucaccccuggcaccaacaccagcaaucagguggcagugcuguaccagggcgugaacuguaccgaagugcccguggccauucacgccgaucagcugacaccuacauggcggguguacuccaccggcagcaauguguuucagaccagagccggcugucugaucggagccgagcacgugaacaauagcuacgagugcgacauccccaucggcgcuggcaucugugccagcuaccagacacagacaaacagccccagacgggcuagaagcguggccagccagagcaucauugccuacacaaugucucugggcgccgagaacagcguggccuacuccaacaacucuaucgcuauccccaccaacuucaccaucagcgugaccaccgagauccugccuguguccaugaccaagaccagcguggacugcaccauguacaucugcggcgauuccaccgagugcuccaaccugcugcugcaguacggcagcuucugcacccagcugaauagagcccugacagggaucgccguggaacaggacaagaacacccaagagguguucgcccaagugaagcaaaucuacaagaccccuccuaucaaggacuucggcggcuucaauuucagccagauucugcccgauccuagcaagcccagcaagcggagcuucaucgaggaccugcuguucaacaaagugacacuggccgacgccggcuucaucaagcaguauggcgauugucugggcgacauugccgccagggaucugauuugcgcccagaaguuuaacggacugacagugcugccuccucugcugaccgaugagaugaucgcccaguacacaucugcccugcuggccggcacaaucacaagcggcuggacauuuggagcuggcgccgcucugcagauccccuuugcuaugcagauggccuaccgguucaacggcaucggagugacccagaaugugcuguacgagaaccagaagcugaucgccaaccaguucaacagcgccaucggcaagauccaggacagccugagcagcacagcaagcgcccugggaaagcugcaggacguggucaaccagaaugcccaggcacugaacacccuggucaagcagcuguccuccaacuucggcgccaucagcucugugcugaacgauauccugagcagacuggacaaggucgaggccgaggugcagaucgacagacugaucacaggcagacugcagagccuccagacauacgugacccagcagcugaucagagccgccgagauuagagccucugccaaucuggccgccaccaagaugucugagugugugcugggccagagcaagagaguggacuuuugcggcaagggcuaccaccugaugagcuucccucagucugccccucacggcgugguguuucugcacgugacauaugugcccgcucaagagaagaauuucaccaccgcuccagccaucugccacgacggcaaagcccacuuuccuagagaaggcguguucguguccaacggcacccauugguucgugacacagcggaacuucuacgagccccagaucaucaccaccgacaacaccuucgugucuggcaacugcgacguugugaucggcauugugaacaauaccguguacgacccucugcagcccgagcuggacagcuucaaagaggaacuggacaaguacuuuaagaaccacacaagccccgacguggaccugggcgauaucagcggaaucaaugccagcgucgugaacauccagaaagagaucgaccggcugaacgagguggccaagaaucugaacgagagccugaucgaccugcaagaacuggggaaguacgagcaguacaucaaguggcccugguacaucuggcugggcuuuaucgccggacugauugccaucgugauggucacaaucaugcuguguugcaugaccagcugcuguagcugccugaagggcuguuguagcuguggcagcugcugcaaguucgacgaggacgauucugagcccgugcugaagggcgugaaacugcacuacaccugauaauaggcuggagccucgguggccuagcuucuugccccuugggccuccccccagccccuccuccccuuccugcacccguacccccguggucuuugaauaaagucugagugggcggcaaaaaaaaaaaaaaaaaaaaaaaaaaaaaaaaaaaaaaaaaaaaaaaaaaaaaaaaaaaaaaaaaaaaaaaaaaaaaaaaaaaaaaaaaaaaaaaaaaaa

SEQ ID NO: 26127 - RNA, 4089 nt, Artificial Sequence
  SARS-CoV-2/Wuhan/WIV05/2019__EPI_ISL_402128 spike protein mRNA gc mod (1-1273)(H69del_V70del_D614G)
gggaaauaagagagaaaagaagaguaagaagaaauauaagaccccggcgccgccaccauguucguguuucuggugcugcugccccugguguccagccagugugugaaccugaccaccagaacacagcugccuccagccuacaccaacagcuucaccagaggcguguacuaccccgacaagguguucagauccagcgugcugcacucuacccaggaccuguuccugccuuucuucagcaacgugaccugguuccacgccaucuccggcaccaauggcaccaagagauucgacaaccccgugcugcccuucaacgacgggguguacuuugccagcaccgagaaguccaacaucaucagaggcuggaucuucggcaccacacuggacagcaagacccagagccugcugaucgugaacaacgccaccaacguggucaucaaagugugcgaguuccaguucugcaacgaccccuuccugggcgucuacuaccacaagaacaacaagagcuggauggaaagcgaguuccggguguacagcagcgccaacaacugcaccuucgaguacgugucccagccuuuccugauggaccuggaaggcaagcagggcaacuucaagaaccugcgcgaguucguguucaagaacaucgacggcuacuucaaaaucuacagcaagcacaccccuaucaaccucgugcgggaucugccucagggcuucucugcucuggaaccccugguggaucugcccaucggcaucaacaucacccgguuucagacacugcuggcccugcacagaagcuaccugacaccuggcgauagcagcagcggauggacagcuggugccgccgcuuacuaugugggcuaccugcagccuagaaccuuccugcugaaguacaacgagaacggcaccaucaccgacgccguggauugugcucuggauccucugagcgagacaaagugcacccugaaguccuucaccguggaaaagggcaucuaccagaccagcaacuuccgggugcagcccaccgaauccaucgugcgguuccccaauaucaccaaucugugccccuucggcgagguguucaaugccaccagauucgccucuguguacgccuggaaccggaagcggaucagcaauugcguggccgacuacuccgugcuguacaacuccgccagcuucagcaccuucaagugcuacggcguguccccuaccaagcugaacgaccugugcuucacaaacguguacgccgacagcuucgugauccggggagaugaagugcggcagauugccccuggacagacaggcaagaucgccgacuacaacuacaagcugcccgacgacuucaccggcugugugauugccuggaacagcaacaaccuggacuccaaagucggcggcaacuacaauuaccuguaccggcuguuccggaaguccaaucugaagcccuucgagcgggacaucagcaccgaaaucuaucaggccggcagcaccccuugcaacggcguggaaggcuucaacugcuacuucccacugcaguccuacggcuuucagcccacaaauggcgugggcuaucagcccuacagagugguggugcugagcuucgaacugcugcaugcuccugccacagugugcggcccuaagaaaagcaccaaucucgugaagaacaaaugcgugaacuucaacuucaacggccugaccggcaccggcgugcugacagagagcaacaagaaguuccugccauuccagcaguuuggccgggauaucgccgauaccacagacgccguuagagauccccagacacuggaaauccuggacaucaccccaugcagcuucggcggagugucugugaucaccccuggcaccaacaccagcaaucagguggcagugcuguaccagggcgugaacuguaccgaagugcccguggccauucacgccgaucagcugacaccuacauggcggguguacuccaccggcagcaauguguuucagaccagagccggcugucugaucggagccgagcacgugaacaauagcuacgagugcgacauccccaucggcgcuggcaucugugccagcuaccagacacagacaaacagccccagacgggcuagaagcguggccagccagagcaucauugccuacacaaugucucugggcgccgagaacagcguggccuacuccaacaacucuaucgcuauccccaccaacuucaccaucagcgugaccaccgagauccugccuguguccaugaccaagaccagcguggacugcaccauguacaucugcggcgauuccaccgagugcuccaaccugcugcugcaguacggcagcuucugcacccagcugaauagagcccugacagggaucgccguggaacaggacaagaacacccaagagguguucgcccaagugaagcaaaucuacaagaccccuccuaucaaggacuucggcggcuucaauuucagccagauucugcccgauccuagcaagcccagcaagcggagcuucaucgaggaccugcuguucaacaaagugacacuggccgacgccggcuucaucaagcaguauggcgauugucugggcgacauugccgccagggaucugauuugcgcccagaaguuuaacggacugacagugcugccuccucugcugaccgaugagaugaucgcccaguacacaucugcccugcuggccggcacaaucacaagcggcuggacauuuggagcuggcgccgcucugcagauccccuuugcuaugcagauggccuaccgguucaacggcaucggagugacccagaaugugcuguacgagaaccagaagcugaucgccaaccaguucaacagcgccaucggcaagauccaggacagccugagcagcacagcaagcgcccugggaaagcugcaggacguggucaaccagaaugcccaggcacugaacacccuggucaagcagcuguccuccaacuucggcgccaucagcucugugcugaacgauauccugagcagacuggacaaggucgaggccgaggugcagaucgacagacugaucacaggcagacugcagagccuccagacauacgugacccagcagcugaucagagccgccgagauuagagccucugccaaucuggccgccaccaagaugucugagugugugcugggccagagcaagagaguggacuuuugcggcaagggcuaccaccugaugagcuucccucagucugccccucacggcgugguguuucugcacgugacauaugugcccgcucaagagaagaauuucaccaccgcuccagccaucugccacgacggcaaagcccacuuuccuagagaaggcguguucguguccaacggcacccauugguucgugacacagcggaacuucuacgagccccagaucaucaccaccgacaacaccuucgugucuggcaacugcgacguugugaucggcauugugaacaauaccguguacgacccucugcagcccgagcuggacagcuucaaagaggaacuggacaaguacuuuaagaaccacacaagccccgacguggaccugggcgauaucagcggaaucaaugccagcgucgugaacauccagaaagagaucgaccggcugaacgagguggccaagaaucugaacgagagccugaucgaccugcaagaacuggggaaguacgagcaguacaucaaguggcccugguacaucuggcugggcuuuaucgccggacugauugccaucgugauggucacaaucaugcuguguugcaugaccagcugcuguagcugccugaagggcuguuguagcuguggcagcugcugcaaguucgacgaggacgauucugagcccgugcugaagggcgugaaacugcacuacaccugauaauaggcuggagccucgguggccuagcuucuugccccuugggccuccccccagccccuccuccccuuccugcacccguacccccguggucuuugaauaaagucugagugggcggcaaaaaaaaaaaaaaaaaaaaaaaaaaaaaaaaaaaaaaaaaaaaaaaaaaaaaaaaaaaaaaaaaaaaaaaaaaaaaaaaaaaaaaaaaaaaaaaaaaaa

SEQ ID NO: 26128 - RNA, 4095 nt, Artificial Sequence
  SARS-CoV-2/Wuhan/WIV05/2019__EPI_ISL_402128 spike protein mRNA gc mod (1-1273)(Y453F_D614G)
gggaaauaagagagaaaagaagaguaagaagaaauauaagaccccggcgccgccaccauguucguguuucuggugcugcugccccugguguccagccagugugugaaccugaccaccagaacacagcugccuccagccuacaccaacagcuucaccagaggcguguacuaccccgacaagguguucagauccagcgugcugcacucuacccaggaccuguuccugccuuucuucagcaacgugaccugguuccacgccauccacguguccggcaccaauggcaccaagagauucgacaaccccgugcugcccuucaacgacgggguguacuuugccagcaccgagaaguccaacaucaucagaggcuggaucuucggcaccacacuggacagcaagacccagagccugcugaucgugaacaacgccaccaacguggucaucaaagugugcgaguuccaguucugcaacgaccccuuccugggcgucuacuaccacaagaacaacaagagcuggauggaaagcgaguuccggguguacagcagcgccaacaacugcaccuucgaguacgugucccagccuuuccugauggaccuggaaggcaagcagggcaacuucaagaaccugcgcgaguucguguucaagaacaucgacggcuacuucaaaaucuacagcaagcacaccccuaucaaccucgugcgggaucugccucagggcuucucugcucuggaaccccugguggaucugcccaucggcaucaacaucacccgguuucagacacugcuggcccugcacagaagcuaccugacaccuggcgauagcagcagcggauggacagcuggugccgccgcuuacuaugugggcuaccugcagccuagaaccuuccugcugaaguacaacgagaacggcaccaucaccgacgccguggauugugcucuggauccucugagcgagacaaagugcacccugaaguccuucaccguggaaaagggcaucuaccagaccagcaacuuccgggugcagcccaccgaauccaucgugcgguuccccaauaucaccaaucugugccccuucggcgagguguucaaugccaccagauucgccucuguguacgccuggaaccggaagcggaucagcaauugcguggccgacuacuccgugcuguacaacuccgccagcuucagcaccuucaagugcuacggcguguccccuaccaagcugaacgaccugugcuucacaaacguguacgccgacagcuucgugauccggggagaugaagugcggcagauugccccuggacagacaggcaagaucgccgacuacaacuacaagcugcccgacgacuucaccggcugugugauugccuggaacagcaacaaccuggacuccaaagucggcggcaacuacaauuaccuguuccggcuguuccggaaguccaaucugaagcccuucgagcgggacaucagcaccgaaaucuaucaggccggcagcaccccuugcaacggcguggaaggcuucaacugcuacuucccacugcaguccuacggcuuucagcccacaaauggcgugggcuaucagcccuacagagugguggugcugagcuucgaacugcugcaugcuccugccacagugugcggcccuaagaaaagcaccaaucucgugaagaacaaaugcgugaacuucaacuucaacggccugaccggcaccggcgugcugacagagagcaacaagaaguuccugccauuccagcaguuuggccgggauaucgccgauaccacagacgccguuagagauccccagacacuggaaauccuggacaucaccccaugcagcuucggcggagugucugugaucaccccuggcaccaacaccagcaaucagguggcagugcuguaccagggcgugaacuguaccgaagugcccguggccauucacgccgaucagcugacaccuacauggcggguguacuccaccggcagcaauguguuucagaccagagccggcugucugaucggagccgagcacgugaacaauagcuacgagugcgacauccccaucggcgcuggcaucugugccagcuaccagacacagacaaacagccccagacgggcuagaagcguggccagccagagcaucauugccuacacaaugucucugggcgccgagaacagcguggccuacuccaacaacucuaucgcuauccccaccaacuucaccaucagcgugaccaccgagauccugccuguguccaugaccaagaccagcguggacugcaccauguacaucugcggcgauuccaccgagugcuccaaccugcugcugcaguacggcagcuucugcacccagcugaauagagcccugacagggaucgccguggaacaggacaagaacacccaagagguguucgcccaagugaagcaaaucuacaagaccccuccuaucaaggacuucggcggcuucaauuucagccagauucugcccgauccuagcaagcccagcaagcggagcuucaucgaggaccugcuguucaacaaagugacacuggccgacgccggcuucaucaagcaguauggcgauugucugggcgacauugccgccagggaucugauuugcgcccagaaguuuaacggacugacagugcugccuccucugcugaccgaugagaugaucgcccaguacacaucugcccugcuggccggcacaaucacaagcggcuggacauuuggagcuggcgccgcucugcagauccccuuugcuaugcagauggccuaccgguucaacggcaucggagugacccagaaugugcuguacgagaaccagaagcugaucgccaaccaguucaacagcgccaucggcaagauccaggacagccugagcagcacagcaagcgcccugggaaagcugcaggacguggucaaccagaaugcccaggcacugaacacccuggucaagcagcuguccuccaacuucggcgccaucagcucugugcugaacgauauccugagcagacuggacaaggucgaggccgaggugcagaucgacagacugaucacaggcagacugcagagccuccagacauacgugacccagcagcugaucagagccgccgagauuagagccucugccaaucuggccgccaccaagaugucugagugugugcugggccagagcaagagaguggacuuuugcggcaagggcuaccaccugaugagcuucccucagucugccccucacggcgugguguuucugcacgugacauaugugcccgcucaagagaagaauuucaccaccgcuccagccaucugccacgacggcaaagcccacuuuccuagagaaggcguguucguguccaacggcacccauugguucgugacacagcggaacuucuacgagccccagaucaucaccaccgacaacaccuucgugucuggcaacugcgacguugugaucggcauugugaacaauaccguguacgacccucugcagcccgagcuggacagcuucaaagaggaacuggacaaguacuuuaagaaccacacaagccccgacguggaccugggcgauaucagcggaaucaaugccagcgucgugaacauccagaaagagaucgaccggcugaacgagguggccaagaaucugaacgagagccugaucgaccugcaagaacuggggaaguacgagcaguacaucaaguggcccugguacaucuggcugggcuuuaucgccggacugauugccaucgugauggucacaaucaugcuguguugcaugaccagcugcuguagcugccugaagggcuguuguagcuguggcagcugcugcaaguucgacgaggacgauucugagcccgugcugaagggcgugaaacugcacuacaccugauaauaggcuggagccucgguggccuagcuucuugccccuugggccuccccccagccccuccuccccuuccugcacccguacccccguggucuuugaauaaagucugagugggcggcaaaaaaaaaaaaaaaaaaaaaaaaaaaaaaaaaaaaaaaaaaaaaaaaaaaaaaaaaaaaaaaaaaaaaaaaaaaaaaaaaaaaaaaaaaaaaaaaaaaa

SEQ ID NO: 26129 - RNA, 4095 nt, Artificial Sequence
  SARS-CoV-2/Wuhan/WIV05/2019__EPI_ISL_402128 spike protein mRNA gc mod (1-1273)(D614G_I692V)
gggaaauaagagagaaaagaagaguaagaagaaauauaagaccccggcgccgccaccauguucguguuucuggugcugcugccccugguguccagccagugugugaaccugaccaccagaacacagcugccuccagccuacaccaacagcuucaccagaggcguguacuaccccgacaagguguucagauccagcgugcugcacucuacccaggaccuguuccugccuuucuucagcaacgugaccugguuccacgccauccacguguccggcaccaauggcaccaagagauucgacaaccccgugcugcccuucaacgacgggguguacuuugccagcaccgagaaguccaacaucaucagaggcuggaucuucggcaccacacuggacagcaagacccagagccugcugaucgugaacaacgccaccaacguggucaucaaagugugcgaguuccaguucugcaacgaccccuuccugggcgucuacuaccacaagaacaacaagagcuggauggaaagcgaguuccggguguacagcagcgccaacaacugcaccuucgaguacgugucccagccuuuccugauggaccuggaaggcaagcagggcaacuucaagaaccugcgcgaguucguguucaagaacaucgacggcuacuucaaaaucuacagcaagcacaccccuaucaaccucgugcgggaucugccucagggcuucucugcucuggaaccccugguggaucugcccaucggcaucaacaucacccgguuucagacacugcuggcccugcacagaagcuaccugacaccuggcgauagcagcagcggauggacagcuggugccgccgcuuacuaugugggcuaccugcagccuagaaccuuccugcugaaguacaacgagaacggcaccaucaccgacgccguggauugugcucuggauccucugagcgagacaaagugcacccugaaguccuucaccguggaaaagggcaucuaccagaccagcaacuuccgggugcagcccaccgaauccaucgugcgguuccccaauaucaccaaucugugccccuucggcgagguguucaaugccaccagauucgccucuguguacgccuggaaccggaagcggaucagcaauugcguggccgacuacuccgugcuguacaacuccgccagcuucagcaccuucaagugcuacggcguguccccuaccaagcugaacgaccugugcuucacaaacguguacgccgacagcuucgugauccggggagaugaagugcggcagauugccccuggacagacaggcaagaucgccgacuacaacuacaagcugcccgacgacuucaccggcugugugauugccuggaacagcaacaaccuggacuccaaagucggcggcaacuacaauuaccuguaccggcuguuccggaaguccaaucugaagcccuucgagcgggacaucagcaccgaaaucuaucaggccggcagcaccccuugcaacggcguggaaggcuucaacugcuacuucccacugcaguccuacggcuuucagcccacaaauggcgugggcuaucagcccuacagagugguggugcugagcuucgaacugcugcaugcuccugccacagugugcggcccuaagaaaagcaccaaucucgugaagaacaaaugcgugaacuucaacuucaacggccugaccggcaccggcgugcugacagagagcaacaagaaguuccugccauuccagcaguuuggccgggauaucgccgauaccacagacgccguuagagauccccagacacuggaaauccuggacaucaccccaugcagcuucggcggagugucugugaucaccccuggcaccaacaccagcaaucagguggcagugcuguaccagggcgugaacuguaccgaagugcccguggccauucacgccgaucagcugacaccuacauggcggguguacuccaccggcagcaauguguuucagaccagagccggcugucugaucggagccgagcacgugaacaauagcuacgagugcgacauccccaucggcgcuggcaucugugccagcuaccagacacagacaaacagccccagacgggcuagaagcguggccagccagagcgugauugccuacacaaugucucugggcgccgagaacagcguggccuacuccaacaacucuaucgcuauccccaccaacuucaccaucagcgugaccaccgagauccugccuguguccaugaccaagaccagcguggacugcaccauguacaucugcggcgauuccaccgagugcuccaaccugcugcugcaguacggcagcuucugcacccagcugaauagagcccugacagggaucgccguggaacaggacaagaacacccaagagguguucgcccaagugaagcaaaucuacaagaccccuccuaucaaggacuucggcggcuucaauuucagccagauucugcccgauccuagcaagcccagcaagcggagcuucaucgaggaccugcuguucaacaaagugacacuggccgacgccggcuucaucaagcaguauggcgauugucugggcgacauugccgccagggaucugauuugcgcccagaaguuuaacggacugacagugcugccuccucugcugaccgaugagaugaucgcccaguacacaucugcccugcuggccggcacaaucacaagcggcuggacauuuggagcuggcgccgcucugcagauccccuuugcuaugcagauggccuaccgguucaacggcaucggagugacccagaaugugcuguacgagaaccagaagcugaucgccaaccaguucaacagcgccaucggcaagauccaggacagccugagcagcacagcaagcgcccugggaaagcugcaggacguggucaaccagaaugcccaggcacugaacacccuggucaagcagcuguccuccaacuucggcgccaucagcucugugcugaacgauauccugagcagacuggacaaggucgaggccgaggugcagaucgacagacugaucacaggcagacugcagagccuccagacauacgugacccagcagcugaucagagccgccgagauuagagccucugccaaucuggccgccaccaagaugucugagugugugcugggccagagcaagagaguggacuuuugcggcaagggcuaccaccugaugagcuucccucagucugccccucacggcgugguguuucugcacgugacauaugugcccgcucaagagaagaauuucaccaccgcuccagccaucugccacgacggcaaagcccacuuuccuagagaaggcguguucguguccaacggcacccauugguucgugacacagcggaacuucuacgagccccagaucaucaccaccgacaacaccuucgugucuggcaacugcgacguugugaucggcauugugaacaauaccguguacgacccucugcagcccgagcuggacagcuucaaagaggaacuggacaaguacuuuaagaaccacacaagccccgacguggaccugggcgauaucagcggaaucaaugccagcgucgugaacauccagaaagagaucgaccggcugaacgagguggccaagaaucugaacgagagccugaucgaccugcaagaacuggggaaguacgagcaguacaucaaguggcccugguacaucuggcugggcuuuaucgccggacugauugccaucgugauggucacaaucaugcuguguugcaugaccagcugcuguagcugccugaagggcuguuguagcuguggcagcugcugcaaguucgacgaggacgauucugagcccgugcugaagggcgugaaacugcacuacaccugauaauaggcuggagccucgguggccuagcuucuugccccuugggccuccccccagccccuccuccccuuccugcacccguacccccguggucuuugaauaaagucugagugggcggcaaaaaaaaaaaaaaaaaaaaaaaaaaaaaaaaaaaaaaaaaaaaaaaaaaaaaaaaaaaaaaaaaaaaaaaaaaaaaaaaaaaaaaaaaaaaaaaaaaaa

SEQ ID NO: 26130 - RNA, 4095 nt, Artificial Sequence
  SARS-CoV-2/Wuhan/WIV05/2019__EPI_ISL_402128 spike protein mRNA gc mod (1-1273)(D614G_M1229I)
gggaaauaagagagaaaagaagaguaagaagaaauauaagaccccggcgccgccaccauguucguguuucuggugcugcugccccugguguccagccagugugugaaccugaccaccagaacacagcugccuccagccuacaccaacagcuucaccagaggcguguacuaccccgacaagguguucagauccagcgugcugcacucuacccaggaccuguuccugccuuucuucagcaacgugaccugguuccacgccauccacguguccggcaccaauggcaccaagagauucgacaaccccgugcugcccuucaacgacgggguguacuuugccagcaccgagaaguccaacaucaucagaggcuggaucuucggcaccacacuggacagcaagacccagagccugcugaucgugaacaacgccaccaacguggucaucaaagugugcgaguuccaguucugcaacgaccccuuccugggcgucuacuaccacaagaacaacaagagcuggauggaaagcgaguuccggguguacagcagcgccaacaacugcaccuucgaguacgugucccagccuuuccugauggaccuggaaggcaagcagggcaacuucaagaaccugcgcgaguucguguucaagaacaucgacggcuacuucaaaaucuacagcaagcacaccccuaucaaccucgugcgggaucugccucagggcuucucugcucuggaaccccugguggaucugcccaucggcaucaacaucacccgguuucagacacugcuggcccugcacagaagcuaccugacaccuggcgauagcagcagcggauggacagcuggugccgccgcuuacuaugugggcuaccugcagccuagaaccuuccugcugaaguacaacgagaacggcaccaucaccgacgccguggauugugcucuggauccucugagcgagacaaagugcacccugaaguccuucaccguggaaaagggcaucuaccagaccagcaacuuccgggugcagcccaccgaauccaucgugcgguuccccaauaucaccaaucugugccccuucggcgagguguucaaugccaccagauucgccucuguguacgccuggaaccggaagcggaucagcaauugcguggccgacuacuccgugcuguacaacuccgccagcuucagcaccuucaagugcuacggcguguccccuaccaagcugaacgaccugugcuucacaaacguguacgccgacagcuucgugauccggggagaugaagugcggcagauugccccuggacagacaggcaagaucgccgacuacaacuacaagcugcccgacgacuucaccggcugugugauugccuggaacagcaacaaccuggacuccaaagucggcggcaacuacaauuaccuguaccggcuguuccggaaguccaaucugaagcccuucgagcgggacaucagcaccgaaaucuaucaggccggcagcaccccuugcaacggcguggaaggcuucaacugcuacuucccacugcaguccuacggcuuucagcccacaaauggcgugggcuaucagcccuacagagugguggugcugagcuucgaacugcugcaugcuccugccacagugugcggcccuaagaaaagcaccaaucucgugaagaacaaaugcgugaacuucaacuucaacggccugaccggcaccggcgugcugacagagagcaacaagaaguuccugccauuccagcaguuuggccgggauaucgccgauaccacagacgccguuagagauccccagacacuggaaauccuggacaucaccccaugcagcuucggcggagugucugugaucaccccuggcaccaacaccagcaaucagguggcagugcuguaccagggcgugaacuguaccgaagugcccguggccauucacgccgaucagcugacaccuacauggcggguguacuccaccggcagcaauguguuucagaccagagccggcugucugaucggagccgagcacgugaacaauagcuacgagugcgacauccccaucggcgcuggcaucugugccagcuaccagacacagacaaacagccccagacgggcuagaagcguggccagccagagcaucauugccuacacaaugucucugggcgccgagaacagcguggccuacuccaacaacucuaucgcuauccccaccaacuucaccaucagcgugaccaccgagauccugccuguguccaugaccaagaccagcguggacugcaccauguacaucugcggcgauuccaccgagugcuccaaccugcugcugcaguacggcagcuucugcacccagcugaauagagcccugacagggaucgccguggaacaggacaagaacacccaagagguguucgcccaagugaagcaaaucuacaagaccccuccuaucaaggacuucggcggcuucaauuucagccagauucugcccgauccuagcaagcccagcaagcggagcuucaucgaggaccugcuguucaacaaagugacacuggccgacgccggcuucaucaagcaguauggcgauugucugggcgacauugccgccagggaucugauuugcgcccagaaguuuaacggacugacagugcugccuccucugcugaccgaugagaugaucgcccaguacacaucugcccugcuggccggcacaaucacaagcggcuggacauuuggagcuggcgccgcucugcagauccccuuugcuaugcagauggccuaccgguucaacggcaucggagugacccagaaugugcuguacgagaaccagaagcugaucgccaaccaguucaacagcgccaucggcaagauccaggacagccugagcagcacagcaagcgcccugggaaagcugcaggacguggucaaccagaaugcccaggcacugaacacccuggucaagcagcuguccuccaacuucggcgccaucagcucugugcugaacgauauccugagcagacuggacaaggucgaggccgaggugcagaucgacagacugaucacaggcagacugcagagccuccagacauacgugacccagcagcugaucagagccgccgagauuagagccucugccaaucuggccgccaccaagaugucugagugugugcugggccagagcaagagaguggacuuuugcggcaagggcuaccaccugaugagcuucccucagucugccccucacggcgugguguuucugcacgugacauaugugcccgcucaagagaagaauuucaccaccgcuccagccaucugccacgacggcaaagcccacuuuccuagagaaggcguguucguguccaacggcacccauugguucgugacacagcggaacuucuacgagccccagaucaucaccaccgacaacaccuucgugucuggcaacugcgacguugugaucggcauugugaacaauaccguguacgacccucugcagcccgagcuggacagcuucaaagaggaacuggacaaguacuuuaagaaccacacaagccccgacguggaccugggcgauaucagcggaaucaaugccagcgucgugaacauccagaaagagaucgaccggcugaacgagguggccaagaaucugaacgagagccugaucgaccugcaagaacuggggaaguacgagcaguacaucaaguggcccugguacaucuggcugggcuuuaucgccggacugauugccaucgugaucgucacaaucaugcuguguugcaugaccagcugcuguagcugccugaagggcuguuguagcuguggcagcugcugcaaguucgacgaggacgauucugagcccgugcugaagggcgugaaacugcacuacaccugauaauaggcuggagccucgguggccuagcuucuugccccuugggccuccccccagccccuccuccccuuccugcacccguacccccguggucuuugaauaaagucugagugggcggcaaaaaaaaaaaaaaaaaaaaaaaaaaaaaaaaaaaaaaaaaaaaaaaaaaaaaaaaaaaaaaaaaaaaaaaaaaaaaaaaaaaaaaaaaaaaaaaaaaaa

SEQ ID NO: 26131 - RNA, 4089 nt, Artificial Sequence
  SARS-CoV-2/Wuhan/WIV05/2019__EPI_ISL_402128 spike protein mRNA gc mod (1-1273)(H69del_V70del_A222V_Y453F_S477N_D614G_I692V)
gggaaauaagagagaaaagaagaguaagaagaaauauaagaccccggcgccgccaccauguucguguuucuggugcugcugccccugguguccagccagugugugaaccugaccaccagaacacagcugccuccagccuacaccaacagcuucaccagaggcguguacuaccccgacaagguguucagauccagcgugcugcacucuacccaggaccuguuccugccuuucuucagcaacgugaccugguuccacgccaucuccggcaccaauggcaccaagagauucgacaaccccgugcugcccuucaacgacgggguguacuuugccagcaccgagaaguccaacaucaucagaggcuggaucuucggcaccacacuggacagcaagacccagagccugcugaucgugaacaacgccaccaacguggucaucaaagugugcgaguuccaguucugcaacgaccccuuccugggcgucuacuaccacaagaacaacaagagcuggauggaaagcgaguuccggguguacagcagcgccaacaacugcaccuucgaguacgugucccagccuuuccugauggaccuggaaggcaagcagggcaacuucaagaaccugcgcgaguucguguucaagaacaucgacggcuacuucaaaaucuacagcaagcacaccccuaucaaccucgugcgggaucugccucagggcuucucugugcuggaaccccugguggaucugcccaucggcaucaacaucacccgguuucagacacugcuggcccugcacagaagcuaccugacaccuggcgauagcagcagcggauggacagcuggugccgccgcuuacuaugugggcuaccugcagccuagaaccuuccugcugaaguacaacgagaacggcaccaucaccgacgccguggauugugcucuggauccucugagcgagacaaagugcacccugaaguccuucaccguggaaaagggcaucuaccagaccagcaacuuccgggugcagcccaccgaauccaucgugcgguuccccaauaucaccaaucugugccccuucggcgagguguucaaugccaccagauucgccucuguguacgccuggaaccggaagcggaucagcaauugcguggccgacuacuccgugcuguacaacuccgccagcuucagcaccuucaagugcuacggcguguccccuaccaagcugaacgaccugugcuucacaaacguguacgccgacagcuucgugauccggggagaugaagugcggcagauugccccuggacagacaggcaagaucgccgacuacaacuacaagcugcccgacgacuucaccggcugugugauugccuggaacagcaacaaccuggacuccaaagucggcggcaacuacaauuaccuguuccggcuguuccggaaguccaaucugaagcccuucgagcgggacaucagcaccgaaaucuaucaggccggcaacaccccuugcaacggcguggaaggcuucaacugcuacuucccacugcaguccuacggcuuucagcccacaaauggcgugggcuaucagcccuacagagugguggugcugagcuucgaacugcugcaugcuccugccacagugugcggcccuaagaaaagcaccaaucucgugaagaacaaaugcgugaacuucaacuucaacggccugaccggcaccggcgugcugacagagagcaacaagaaguuccugccauuccagcaguuuggccgggauaucgccgauaccacagacgccguuagagauccccagacacuggaaauccuggacaucaccccaugcagcuucggcggagugucugugaucaccccuggcaccaacaccagcaaucagguggcagugcuguaccagggcgugaacuguaccgaagugcccguggccauucacgccgaucagcugacaccuacauggcggguguacuccaccggcagcaauguguuucagaccagagccggcugucugaucggagccgagcacgugaacaauagcuacgagugcgacauccccaucggcgcuggcaucugugccagcuaccagacacagacaaacagccccagacgggcuagaagcguggccagccagagcgugauugccuacacaaugucucugggcgccgagaacagcguggccuacuccaacaacucuaucgcuauccccaccaacuucaccaucagcgugaccaccgagauccugccuguguccaugaccaagaccagcguggacugcaccauguacaucugcggcgauuccaccgagugcuccaaccugcugcugcaguacggcagcuucugcacccagcugaauagagcccugacagggaucgccguggaacaggacaagaacacccaagagguguucgcccaagugaagcaaaucuacaagaccccuccuaucaaggacuucggcggcuucaauuucagccagauucugcccgauccuagcaagcccagcaagcggagcuucaucgaggaccugcuguucaacaaagugacacuggccgacgccggcuucaucaagcaguauggcgauugucugggcgacauugccgccagggaucugauuugcgcccagaaguuuaacggacugacagugcugccuccucugcugaccgaugagaugaucgcccaguacacaucugcccugcuggccggcacaaucacaagcggcuggacauuuggagcuggcgccgcucugcagauccccuuugcuaugcagauggccuaccgguucaacggcaucggagugacccagaaugugcuguacgagaaccagaagcugaucgccaaccaguucaacagcgccaucggcaagauccaggacagccugagcagcacagcaagcgcccugggaaagcugcaggacguggucaaccagaaugcccaggcacugaacacccuggucaagcagcuguccuccaacuucggcgccaucagcucugugcugaacgauauccugagcagacuggacaaggucgaggccgaggugcagaucgacagacugaucacaggcagacugcagagccuccagacauacgugacccagcagcugaucagagccgccgagauuagagccucugccaaucuggccgccaccaagaugucugagugugugcugggccagagcaagagaguggacuuuugcggcaagggcuaccaccugaugagcuucccucagucugccccucacggcgugguguuucugcacgugacauaugugcccgcucaagagaagaauuucaccaccgcuccagccaucugccacgacggcaaagcccacuuuccuagagaaggcguguucguguccaacggcacccauugguucgugacacagcggaacuucuacgagccccagaucaucaccaccgacaacaccuucgugucuggcaacugcgacguugugaucggcauugugaacaauaccguguacgacccucugcagcccgagcuggacagcuucaaagaggaacuggacaaguacuuuaagaaccacacaagccccgacguggaccugggcgauaucagcggaaucaaugccagcgucgugaacauccagaaagagaucgaccggcugaacgagguggccaagaaucugaacgagagccugaucgaccugcaagaacuggggaaguacgagcaguacaucaaguggcccugguacaucuggcugggcuuuaucgccggacugauugccaucgugauggucacaaucaugcuguguugcaugaccagcugcuguagcugccugaagggcuguuguagcuguggcagcugcugcaaguucgacgaggacgauucugagcccgugcugaagggcgugaaacugcacuacaccugauaauaggcuggagccucgguggccuagcuucuugccccuugggccuccccccagccccuccuccccuuccugcacccguacccccguggucuuugaauaaagucugagugggcggcaaaaaaaaaaaaaaaaaaaaaaaaaaaaaaaaaaaaaaaaaaaaaaaaaaaaaaaaaaaaaaaaaaaaaaaaaaaaaaaaaaaaaaaaaaaaaaaaaaaa

SEQ ID NO: 26132 - RNA, 4089 nt, Artificial Sequence
  SARS-CoV-2/Wuhan/WIV05/2019__EPI_ISL_402128 spike protein mRNA gc mod (1-1273)(H69del_V70del_Y453F_D614G_I692V_M1229I)
gggaaauaagagagaaaagaagaguaagaagaaauauaagaccccggcgccgccaccauguucguguuucuggugcugcugccccugguguccagccagugugugaaccugaccaccagaacacagcugccuccagccuacaccaacagcuucaccagaggcguguacuaccccgacaagguguucagauccagcgugcugcacucuacccaggaccuguuccugccuuucuucagcaacgugaccugguuccacgccaucuccggcaccaauggcaccaagagauucgacaaccccgugcugcccuucaacgacgggguguacuuugccagcaccgagaaguccaacaucaucagaggcuggaucuucggcaccacacuggacagcaagacccagagccugcugaucgugaacaacgccaccaacguggucaucaaagugugcgaguuccaguucugcaacgaccccuuccugggcgucuacuaccacaagaacaacaagagcuggauggaaagcgaguuccggguguacagcagcgccaacaacugcaccuucgaguacgugucccagccuuuccugauggaccuggaaggcaagcagggcaacuucaagaaccugcgcgaguucguguucaagaacaucgacggcuacuucaaaaucuacagcaagcacaccccuaucaaccucgugcgggaucugccucagggcuucucugcucuggaaccccugguggaucugcccaucggcaucaacaucacccgguuucagacacugcuggcccugcacagaagcuaccugacaccuggcgauagcagcagcggauggacagcuggugccgccgcuuacuaugugggcuaccugcagccuagaaccuuccugcugaaguacaacgagaacggcaccaucaccgacgccguggauugugcucuggauccucugagcgagacaaagugcacccugaaguccuucaccguggaaaagggcaucuaccagaccagcaacuuccgggugcagcccaccgaauccaucgugcgguuccccaauaucaccaaucugugccccuucggcgagguguucaaugccaccagauucgccucuguguacgccuggaaccggaagcggaucagcaauugcguggccgacuacuccgugcuguacaacuccgccagcuucagcaccuucaagugcuacggcguguccccuaccaagcugaacgaccugugcuucacaaacguguacgccgacagcuucgugauccggggagaugaagugcggcagauugccccuggacagacaggcaagaucgccgacuacaacuacaagcugcccgacgacuucaccggcugugugauugccuggaacagcaacaaccuggacuccaaagucggcggcaacuacaauuaccuguuccggcuguuccggaaguccaaucugaagcccuucgagcgggacaucagcaccgaaaucuaucaggccggcagcaccccuugcaacggcguggaaggcuucaacugcuacuucccacugcaguccuacggcuuucagcccacaaauggcgugggcuaucagcccuacagagugguggugcugagcuucgaacugcugcaugcuccugccacagugugcggcccuaagaaaagcaccaaucucgugaagaacaaaugcgugaacuucaacuucaacggccugaccggcaccggcgugcugacagagagcaacaagaaguuccugccauuccagcaguuuggccgggauaucgccgauaccacagacgccguuagagauccccagacacuggaaauccuggacaucaccccaugcagcuucggcggagugucugugaucaccccuggcaccaacaccagcaaucagguggcagugcuguaccagggcgugaacuguaccgaagugcccguggccauucacgccgaucagcugacaccuacauggcggguguacuccaccggcagcaauguguuucagaccagagccggcugucugaucggagccgagcacgugaacaauagcuacgagugcgacauccccaucggcgcuggcaucugugccagcuaccagacacagacaaacagccccagacgggcuagaagcguggccagccagagcgugauugccuacacaaugucucugggcgccgagaacagcguggccuacuccaacaacucuaucgcuauccccaccaacuucaccaucagcgugaccaccgagauccugccuguguccaugaccaagaccagcguggacugcaccauguacaucugcggcgauuccaccgagugcuccaaccugcugcugcaguacggcagcuucugcacccagcugaauagagcccugacagggaucgccguggaacaggacaagaacacccaagagguguucgcccaagugaagcaaaucuacaagaccccuccuaucaaggacuucggcggcuucaauuucagccagauucugcccgauccuagcaagcccagcaagcggagcuucaucgaggaccugcuguucaacaaagugacacuggccgacgccggcuucaucaagcaguauggcgauugucugggcgacauugccgccagggaucugauuugcgcccagaaguuuaacggacugacagugcugccuccucugcugaccgaugagaugaucgcccaguacacaucugcccugcuggccggcacaaucacaagcggcuggacauuuggagcuggcgccgcucugcagauccccuuugcuaugcagauggccuaccgguucaacggcaucggagugacccagaaugugcuguacgagaaccagaagcugaucgccaaccaguucaacagcgccaucggcaagauccaggacagccugagcagcacagcaagcgcccugggaaagcugcaggacguggucaaccagaaugcccaggcacugaacacccuggucaagcagcuguccuccaacuucggcgccaucagcucugugcugaacgauauccugagcagacuggacaaggucgaggccgaggugcagaucgacagacugaucacaggcagacugcagagccuccagacauacgugacccagcagcugaucagagccgccgagauuagagccucugccaaucuggccgccaccaagaugucugagugugugcugggccagagcaagagaguggacuuuugcggcaagggcuaccaccugaugagcuucccucagucugccccucacggcgugguguuucugcacgugacauaugugcccgcucaagagaagaauuucaccaccgcuccagccaucugccacgacggcaaagcccacuuuccuagagaaggcguguucguguccaacggcacccauugguucgugacacagcggaacuucuacgagccccagaucaucaccaccgacaacaccuucgugucuggcaacugcgacguugugaucggcauugugaacaauaccguguacgacccucugcagcccgagcuggacagcuucaaagaggaacuggacaaguacuuuaagaaccacacaagccccgacguggaccugggcgauaucagcggaaucaaugccagcgucgugaacauccagaaagagaucgaccggcugaacgagguggccaagaaucugaacgagagccugaucgaccugcaagaacuggggaaguacgagcaguacaucaaguggcccugguacaucuggcugggcuuuaucgccggacugauugccaucgugaucgucacaaucaugcuguguugcaugaccagcugcuguagcugccugaagggcuguuguagcuguggcagcugcugcaaguucgacgaggacgauucugagcccgugcugaagggcgugaaacugcacuacaccugauaauaggcuggagccucgguggccuagcuucuugccccuugggccuccccccagccccuccuccccuuccugcacccguacccccguggucuuugaauaaagucugagugggcggcaaaaaaaaaaaaaaaaaaaaaaaaaaaaaaaaaaaaaaaaaaaaaaaaaaaaaaaaaaaaaaaaaaaaaaaaaaaaaaaaaaaaaaaaaaaaaaaaaaaa

SEQ ID NO: 26133 - RNA, 4086 nt, Artificial Sequence
  SARS-CoV-2/Wuhan/WIV05/2019__EPI_ISL_402128 spike protein mRNA gc mod (1-1273)(H69del_V70del_Y144del_N501Y_A570D_D614G_P681H_T716I_S982 A_D1118H)
gggaaauaagagagaaaagaagaguaagaagaaauauaagaccccggcgccgccaccauguucguguuucuggugcugcugccccugguguccagccagugugugaaccugaccaccagaacacagcugccuccagccuacaccaacagcuucaccagaggcguguacuaccccgacaagguguucagauccagcgugcugcacucuacccaggaccuguuccugccuuucuucagcaacgugaccugguuccacgccaucuccggcaccaauggcaccaagagauucgacaaccccgugcugcccuucaacgacgggguguacuuugccagcaccgagaaguccaacaucaucagaggcuggaucuucggcaccacacuggacagcaagacccagagccugcugaucgugaacaacgccaccaacguggucaucaaagugugcgaguuccaguucugcaacgaccccuuccugggcgucuaccacaagaacaacaagagcuggauggaaagcgaguuccggguguacagcagcgccaacaacugcaccuucgaguacgugucccagccuuuccugauggaccuggaaggcaagcagggcaacuucaagaaccugcgcgaguucguguucaagaacaucgacggcuacuucaaaaucuacagcaagcacaccccuaucaaccucgugcgggaucugccucagggcuucucugcucuggaaccccugguggaucugcccaucggcaucaacaucacccgguuucagacacugcuggcccugcacagaagcuaccugacaccuggcgauagcagcagcggauggacagcuggugccgccgcuuacuaugugggcuaccugcagccuagaaccuuccugcugaaguacaacgagaacggcaccaucaccgacgccguggauugugcucuggauccucugagcgagacaaagugcacccugaaguccuucaccguggaaaagggcaucuaccagaccagcaacuuccgggugcagcccaccgaauccaucgugcgguuccccaauaucaccaaucugugccccuucggcgagguguucaaugccaccagauucgccucuguguacgccuggaaccggaagcggaucagcaauugcguggccgacuacuccgugcuguacaacuccgccagcuucagcaccuucaagugcuacggcguguccccuaccaagcugaacgaccugugcuucacaaacguguacgccgacagcuucgugauccggggagaugaagugcggcagauugccccuggacagacaggcaagaucgccgacuacaacuacaagcugcccgacgacuucaccggcugugugauugccuggaacagcaacaaccuggacuccaaagucggcggcaacuacaauuaccuguaccggcuguuccggaaguccaaucugaagcccuucgagcgggacaucagcaccgaaaucuaucaggccggcagcaccccuugcaacggcguggaaggcuucaacugcuacuucccacugcaguccuacggcuuucagcccacauacggcgugggcuaucagcccuacagagugguggugcugagcuucgaacugcugcaugcuccugccacagugugcggcccuaagaaaagcaccaaucucgugaagaacaaaugcgugaacuucaacuucaacggccugaccggcaccggcgugcugacagagagcaacaagaaguuccugccauuccagcaguuuggccgggauaucgacgauaccacagacgccguuagagauccccagacacuggaaauccuggacaucaccccaugcagcuucggcggagugucugugaucaccccuggcaccaacaccagcaaucagguggcagugcuguaccagggcgugaacuguaccgaagugcccguggccauucacgccgaucagcugacaccuacauggcggguguacuccaccggcagcaauguguuucagaccagagccggcugucugaucggagccgagcacgugaacaauagcuacgagugcgacauccccaucggcgcuggcaucugugccagcuaccagacacagacaaacagccacagacgggcuagaagcguggccagccagagcaucauugccuacacaaugucucugggcgccgagaacagcguggccuacuccaacaacucuaucgcuauccccaucaacuucaccaucagcgugaccaccgagauccugccuguguccaugaccaagaccagcguggacugcaccauguacaucugcggcgauuccaccgagugcuccaaccugcugcugcaguacggcagcuucugcacccagcugaauagagcccugacagggaucgccguggaacaggacaagaacacccaagagguguucgcccaagugaagcaaaucuacaagaccccuccuaucaaggacuucggcggcuucaauuucagccagauucugcccgauccuagcaagcccagcaagcggagcuucaucgaggaccugcuguucaacaaagugacacuggccgacgccggcuucaucaagcaguauggcgauugucugggcgacauugccgccagggaucugauuugcgcccagaaguuuaacggacugacagugcugccuccucugcugaccgaugagaugaucgcccaguacacaucugcccugcuggccggcacaaucacaagcggcuggacauuuggagcuggcgccgcucugcagauccccuuugcuaugcagauggccuaccgguucaacggcaucggagugacccagaaugugcuguacgagaaccagaagcugaucgccaaccaguucaacagcgccaucggcaagauccaggacagccugagcagcacagcaagcgcccugggaaagcugcaggacguggucaaccagaaugcccaggcacugaacacccuggucaagcagcuguccuccaacuucggcgccaucagcucugugcugaacgauauccuggccagacuggacaaggucgaggccgaggugcagaucgacagacugaucacaggcagacugcagagccuccagacauacgugacccagcagcugaucagagccgccgagauuagagccucugccaaucuggccgccaccaagaugucugagugugugcugggccagagcaagagaguggacuuuugcggcaagggcuaccaccugaugagcuucccucagucugccccucacggcgugguguuucugcacgugacauaugugcccgcucaagagaagaauuucaccaccgcuccagccaucugccacgacggcaaagcccacuuuccuagagaaggcguguucguguccaacggcacccauugguucgugacacagcggaacuucuacgagccccagaucaucaccacccacaacaccuucgugucuggcaacugcgacguugugaucggcauugugaacaauaccguguacgacccucugcagcccgagcuggacagcuucaaagaggaacuggacaaguacuuuaagaaccacacaagccccgacguggaccugggcgauaucagcggaaucaaugccagcgucgugaacauccagaaagagaucgaccggcugaacgagguggccaagaaucugaacgagagccugaucgaccugcaagaacuggggaaguacgagcaguacaucaaguggcccugguacaucuggcugggcuuuaucgccggacugauugccaucgugauggucacaaucaugcuguguugcaugaccagcugcuguagcugccugaagggcuguuguagcuguggcagcugcugcaaguucgacgaggacgauucugagcccgugcugaagggcgugaaacugcacuacaccugauaauaggcuggagccucgguggccuagcuucuugccccuugggccuccccccagccccuccuccccuuccugcacccguacccccguggucuuugaauaaagucugagugggcggcaaaaaaaaaaaaaaaaaaaaaaaaaaaaaaaaaaaaaaaaaaaaaaaaaaaaaaaaaaaaaaaaaaaaaaaaaaaaaaaaaaaaaaaaaaaaaaaaaaaa

SEQ ID NO: 26134 - RNA, 4095 nt, Artificial Sequence
  SARS-CoV-2/Wuhan/WIV05/2019__EPI_ISL_402128 spike protein mRNA gc mod (1-1273)(K417N_E484K_N501Y_D614G)
gggaaauaagagagaaaagaagaguaagaagaaauauaagaccccggcgccgccaccauguucguguuucuggugcugcugccccugguguccagccagugugugaaccugaccaccagaacacagcugccuccagccuacaccaacagcuucaccagaggcguguacuaccccgacaagguguucagauccagcgugcugcacucuacccaggaccuguuccugccuuucuucagcaacgugaccugguuccacgccauccacguguccggcaccaauggcaccaagagauucgacaaccccgugcugcccuucaacgacgggguguacuuugccagcaccgagaaguccaacaucaucagaggcuggaucuucggcaccacacuggacagcaagacccagagccugcugaucgugaacaacgccaccaacguggucaucaaagugugcgaguuccaguucugcaacgaccccuuccugggcgucuacuaccacaagaacaacaagagcuggauggaaagcgaguuccggguguacagcagcgccaacaacugcaccuucgaguacgugucccagccuuuccugauggaccuggaaggcaagcagggcaacuucaagaaccugcgcgaguucguguucaagaacaucgacggcuacuucaaaaucuacagcaagcacaccccuaucaaccucgugcgggaucugccucagggcuucucugcucuggaaccccugguggaucugcccaucggcaucaacaucacccgguuucagacacugcuggcccugcacagaagcuaccugacaccuggcgauagcagcagcggauggacagcuggugccgccgcuuacuaugugggcuaccugcagccuagaaccuuccugcugaaguacaacgagaacggcaccaucaccgacgccguggauugugcucuggauccucugagcgagacaaagugcacccugaaguccuucaccguggaaaagggcaucuaccagaccagcaacuuccgggugcagcccaccgaauccaucgugcgguuccccaauaucaccaaucugugccccuucggcgagguguucaaugccaccagauucgccucuguguacgccuggaaccggaagcggaucagcaauugcguggccgacuacuccgugcuguacaacuccgccagcuucagcaccuucaagugcuacggcguguccccuaccaagcugaacgaccugugcuucacaaacguguacgccgacagcuucgugauccggggagaugaagugcggcagauugccccuggacagacaggcaacaucgccgacuacaacuacaagcugcccgacgacuucaccggcugugugauugccuggaacagcaacaaccuggacuccaaagucggcggcaacuacaauuaccuguaccggcuguuccggaaguccaaucugaagcccuucgagcgggacaucagcaccgaaaucuaucaggccggcagcaccccuugcaacggcgugaagggcuucaacugcuacuucccacugcaguccuacggcuuucagcccacauacggcgugggcuaucagcccuacagagugguggugcugagcuucgaacugcugcaugcuccugccacagugugcggcccuaagaaaagcaccaaucucgugaagaacaaaugcgugaacuucaacuucaacggccugaccggcaccggcgugcugacagagagcaacaagaaguuccugccauuccagcaguuuggccgggauaucgccgauaccacagacgccguuagagauccccagacacuggaaauccuggacaucaccccaugcagcuucggcggagugucugugaucaccccuggcaccaacaccagcaaucagguggcagugcuguaccagggcgugaacuguaccgaagugcccguggccauucacgccgaucagcugacaccuacauggcggguguacuccaccggcagcaauguguuucagaccagagccggcugucugaucggagccgagcacgugaacaauagcuacgagugcgacauccccaucggcgcuggcaucugugccagcuaccagacacagacaaacagccccagacgggcuagaagcguggccagccagagcaucauugccuacacaaugucucugggcgccgagaacagcguggccuacuccaacaacucuaucgcuauccccaccaacuucaccaucagcgugaccaccgagauccugccuguguccaugaccaagaccagcguggacugcaccauguacaucugcggcgauuccaccgagugcuccaaccugcugcugcaguacggcagcuucugcacccagcugaauagagcccugacagggaucgccguggaacaggacaagaacacccaagagguguucgcccaagugaagcaaaucuacaagaccccuccuaucaaggacuucggcggcuucaauuucagccagauucugcccgauccuagcaagcccagcaagcggagcuucaucgaggaccugcuguucaacaaagugacacuggccgacgccggcuucaucaagcaguauggcgauugucugggcgacauugccgccagggaucugauuugcgcccagaaguuuaacggacugacagugcugccuccucugcugaccgaugagaugaucgcccaguacacaucugcccugcuggccggcacaaucacaagcggcuggacauuuggagcuggcgccgcucugcagauccccuuugcuaugcagauggccuaccgguucaacggcaucggagugacccagaaugugcuguacgagaaccagaagcugaucgccaaccaguucaacagcgccaucggcaagauccaggacagccugagcagcacagcaagcgcccugggaaagcugcaggacguggucaaccagaaugcccaggcacugaacacccuggucaagcagcuguccuccaacuucggcgccaucagcucugugcugaacgauauccugagcagacuggacaaggucgaggccgaggugcagaucgacagacugaucacaggcagacugcagagccuccagacauacgugacccagcagcugaucagagccgccgagauuagagccucugccaaucuggccgccaccaagaugucugagugugugcugggccagagcaagagaguggacuuuugcggcaagggcuaccaccugaugagcuucccucagucugccccucacggcgugguguuucugcacgugacauaugugcccgcucaagagaagaauuucaccaccgcuccagccaucugccacgacggcaaagcccacuuuccuagagaaggcguguucguguccaacggcacccauugguucgugacacagcggaacuucuacgagccccagaucaucaccaccgacaacaccuucgugucuggcaacugcgacguugugaucggcauugugaacaauaccguguacgacccucugcagcccgagcuggacagcuucaaagaggaacuggacaaguacuuuaagaaccacacaagccccgacguggaccugggcgauaucagcggaaucaaugccagcgucgugaacauccagaaagagaucgaccggcugaacgagguggccaagaaucugaacgagagccugaucgaccugcaagaacuggggaaguacgagcaguacaucaaguggcccugguacaucuggcugggcuuuaucgccggacugauugccaucgugauggucacaaucaugcuguguugcaugaccagcugcuguagcugccugaagggcuguuguagcuguggcagcugcugcaaguucgacgaggacgauucugagcccgugcugaagggcgugaaacugcacuacaccugauaauaggcuggagccucgguggccuagcuucuugccccuugggccuccccccagccccuccuccccuuccugcacccguacccccguggucuuugaauaaagucugagugggcggcaaaaaaaaaaaaaaaaaaaaaaaaaaaaaaaaaaaaaaaaaaaaaaaaaaaaaaaaaaaaaaaaaaaaaaaaaaaaaaaaaaaaaaaaaaaaaaaaaaaa

SEQ ID NO: 26135 - RNA, 4086 nt, Artificial Sequence
  SARS-CoV-2/Wuhan/WIV05/2019__EPI_ISL_402128 spike protein mRNA gc mod (1-1273)(L18F_D80A_D215G_L242del_A243del_L244del_R246I_K417N_E484 K_N501Y_D614G_A701V)
gggaaauaagagagaaaagaagaguaagaagaaauauaagaccccggcgccgccaccauguucguguuucuggugcugcugccccugguguccagccagugugugaacuucaccaccagaacacagcugccuccagccuacaccaacagcuucaccagaggcguguacuaccccgacaagguguucagauccagcgugcugcacucuacccaggaccuguuccugccuuucuucagcaacgugaccugguuccacgccauccacguguccggcaccaauggcaccaagagauucgccaaccccgugcugcccuucaacgacgggguguacuuugccagcaccgagaaguccaacaucaucagaggcuggaucuucggcaccacacuggacagcaagacccagagccugcugaucgugaacaacgccaccaacguggucaucaaagugugcgaguuccaguucugcaacgaccccuuccugggcgucuacuaccacaagaacaacaagagcuggauggaaagcgaguuccggguguacagcagcgccaacaacugcaccuucgaguacgugucccagccuuuccugauggaccuggaaggcaagcagggcaacuucaagaaccugcgcgaguucguguucaagaacaucgacggcuacuucaaaaucuacagcaagcacaccccuaucaaccucgugcggggccugccucagggcuucucugcucuggaaccccugguggaucugcccaucggcaucaacaucacccgguuucagacacugcacaucagcuaccugacaccuggcgauagcagcagcggauggacagcuggugccgccgcuuacuaugugggcuaccugcagccuagaaccuuccugcugaaguacaacgagaacggcaccaucaccgacgccguggauugugcucuggauccucugagcgagacaaagugcacccugaaguccuucaccguggaaaagggcaucuaccagaccagcaacuuccgggugcagcccaccgaauccaucgugcgguuccccaauaucaccaaucugugccccuucggcgagguguucaaugccaccagauucgccucuguguacgccuggaaccggaagcggaucagcaauugcguggccgacuacuccgugcuguacaacuccgccagcuucagcaccuucaagugcuacggcguguccccuaccaagcugaacgaccugugcuucacaaacguguacgccgacagcuucgugauccggggagaugaagugcggcagauugccccuggacagacaggcaacaucgccgacuacaacuacaagcugcccgacgacuucaccggcugugugauugccuggaacagcaacaaccuggacuccaaagucggcggcaacuacaauuaccuguaccggcuguuccggaaguccaaucugaagcccuucgagcgggacaucagcaccgaaaucuaucaggccggcagcaccccuugcaacggcgugaagggcuucaacugcuacuucccacugcaguccuacggcuuucagcccacauacggcgugggcuaucagcccuacagagugguggugcugagcuucgaacugcugcaugcuccugccacagugugcggcccuaagaaaagcaccaaucucgugaagaacaaaugcgugaacuucaacuucaacggccugaccggcaccggcgugcugacagagagcaacaagaaguuccugccauuccagcaguuuggccgggauaucgccgauaccacagacgccguuagagauccccagacacuggaaauccuggacaucaccccaugcagcuucggcggagugucugugaucaccccuggcaccaacaccagcaaucagguggcagugcuguaccagggcgugaacuguaccgaagugcccguggccauucacgccgaucagcugacaccuacauggcggguguacuccaccggcagcaauguguuucagaccagagccggcugucugaucggagccgagcacgugaacaauagcuacgagugcgacauccccaucggcgcuggcaucugugccagcuaccagacacagacaaacagccccagacgggcuagaagcguggccagccagagcaucauugccuacacaaugucucugggcguggagaacagcguggccuacuccaacaacucuaucgcuauccccaccaacuucaccaucagcgugaccaccgagauccugccuguguccaugaccaagaccagcguggacugcaccauguacaucugcggcgauuccaccgagugcuccaaccugcugcugcaguacggcagcuucugcacccagcugaauagagcccugacagggaucgccguggaacaggacaagaacacccaagagguguucgcccaagugaagcaaaucuacaagaccccuccuaucaaggacuucggcggcuucaauuucagccagauucugcccgauccuagcaagcccagcaagcggagcuucaucgaggaccugcuguucaacaaagugacacuggccgacgccggcuucaucaagcaguauggcgauugucugggcgacauugccgccagggaucugauuugcgcccagaaguuuaacggacugacagugcugccuccucugcugaccgaugagaugaucgcccaguacacaucugcccugcuggccggcacaaucacaagcggcuggacauuuggagcuggcgccgcucugcagauccccuuugcuaugcagauggccuaccgguucaacggcaucggagugacccagaaugugcuguacgagaaccagaagcugaucgccaaccaguucaacagcgccaucggcaagauccaggacagccugagcagcacagcaagcgcccugggaaagcugcaggacguggucaaccagaaugcccaggcacugaacacccuggucaagcagcuguccuccaacuucggcgccaucagcucugugcugaacgauauccugagcagacuggacaaggucgaggccgaggugcagaucgacagacugaucacaggcagacugcagagccuccagacauacgugacccagcagcugaucagagccgccgagauuagagccucugccaaucuggccgccaccaagaugucugagugugugcugggccagagcaagagaguggacuuuugcggcaagggcuaccaccugaugagcuucccucagucugccccucacggcgugguguuucugcacgugacauaugugcccgcucaagagaagaauuucaccaccgcuccagccaucugccacgacggcaaagcccacuuuccuagagaaggcguguucguguccaacggcacccauugguucgugacacagcggaacuucuacgagccccagaucaucaccaccgacaacaccuucgugucuggcaacugcgacguugugaucggcauugugaacaauaccguguacgacccucugcagcccgagcuggacagcuucaaagaggaacuggacaaguacuuuaagaaccacacaagccccgacguggaccugggcgauaucagcggaaucaaugccagcgucgugaacauccagaaagagaucgaccggcugaacgagguggccaagaaucugaacgagagccugaucgaccugcaagaacuggggaaguacgagcaguacaucaaguggcccugguacaucuggcugggcuuuaucgccggacugauugccaucgugauggucacaaucaugcuguguugcaugaccagcugcuguagcugccugaagggcuguuguagcuguggcagcugcugcaaguucgacgaggacgauucugagcccgugcugaagggcgugaaacugcacuacaccugauaauaggcuggagccucgguggccuagcuucuugccccuugggccuccccccagccccuccuccccuuccugcacccguacccccguggucuuugaauaaagucugagugggcggcaaaaaaaaaaaaaaaaaaaaaaaaaaaaaaaaaaaaaaaaaaaaaaaaaaaaaaaaaaaaaaaaaaaaaaaaaaaaaaaaaaaaaaaaaaaaaaaaaaaa

SEQ ID NO: 26136 - RNA, 4095 nt, Artificial Sequence
  SARS-CoV-2/Wuhan/WIV05/2019__EPI_ISL_402128 spike protein mRNA gc mod (1-1273)(E484K_D614G)
gggaaauaagagagaaaagaagaguaagaagaaauauaagaccccggcgccgccaccauguucguguuucuggugcugcugccccugguguccagccagugugugaaccugaccaccagaacacagcugccuccagccuacaccaacagcuucaccagaggcguguacuaccccgacaagguguucagauccagcgugcugcacucuacccaggaccuguuccugccuuucuucagcaacgugaccugguuccacgccauccacguguccggcaccaauggcaccaagagauucgacaaccccgugcugcccuucaacgacgggguguacuuugccagcaccgagaaguccaacaucaucagaggcuggaucuucggcaccacacuggacagcaagacccagagccugcugaucgugaacaacgccaccaacguggucaucaaagugugcgaguuccaguucugcaacgaccccuuccugggcgucuacuaccacaagaacaacaagagcuggauggaaagcgaguuccggguguacagcagcgccaacaacugcaccuucgaguacgugucccagccuuuccugauggaccuggaaggcaagcagggcaacuucaagaaccugcgcgaguucguguucaagaacaucgacggcuacuucaaaaucuacagcaagcacaccccuaucaaccucgugcgggaucugccucagggcuucucugcucuggaaccccugguggaucugcccaucggcaucaacaucacccgguuucagacacugcuggcccugcacagaagcuaccugacaccuggcgauagcagcagcggauggacagcuggugccgccgcuuacuaugugggcuaccugcagccuagaaccuuccugcugaaguacaacgagaacggcaccaucaccgacgccguggauugugcucuggauccucugagcgagacaaagugcacccugaaguccuucaccguggaaaagggcaucuaccagaccagcaacuuccgggugcagcccaccgaauccaucgugcgguuccccaauaucaccaaucugugccccuucggcgagguguucaaugccaccagauucgccucuguguacgccuggaaccggaagcggaucagcaauugcguggccgacuacuccgugcuguacaacuccgccagcuucagcaccuucaagugcuacggcguguccccuaccaagcugaacgaccugugcuucacaaacguguacgccgacagcuucgugauccggggagaugaagugcggcagauugccccuggacagacaggcaagaucgccgacuacaacuacaagcugcccgacgacuucaccggcugugugauugccuggaacagcaacaaccuggacuccaaagucggcggcaacuacaauuaccuguaccggcuguuccggaaguccaaucugaagcccuucgagcgggacaucagcaccgaaaucuaucaggccggcagcaccccuugcaacggcgugaagggcuucaacugcuacuucccacugcaguccuacggcuuucagcccacaaauggcgugggcuaucagcccuacagagugguggugcugagcuucgaacugcugcaugcuccugccacagugugcggcccuaagaaaagcaccaaucucgugaagaacaaaugcgugaacuucaacuucaacggccugaccggcaccggcgugcugacagagagcaacaagaaguuccugccauuccagcaguuuggccgggauaucgccgauaccacagacgccguuagagauccccagacacuggaaauccuggacaucaccccaugcagcuucggcggagugucugugaucaccccuggcaccaacaccagcaaucagguggcagugcuguaccagggcgugaacuguaccgaagugcccguggccauucacgccgaucagcugacaccuacauggcggguguacuccaccggcagcaauguguuucagaccagagccggcugucugaucggagccgagcacgugaacaauagcuacgagugcgacauccccaucggcgcuggcaucugugccagcuaccagacacagacaaacagccccagacgggcuagaagcguggccagccagagcaucauugccuacacaaugucucugggcgccgagaacagcguggccuacuccaacaacucuaucgcuauccccaccaacuucaccaucagcgugaccaccgagauccugccuguguccaugaccaagaccagcguggacugcaccauguacaucugcggcgauuccaccgagugcuccaaccugcugcugcaguacggcagcuucugcacccagcugaauagagcccugacagggaucgccguggaacaggacaagaacacccaagagguguucgcccaagugaagcaaaucuacaagaccccuccuaucaaggacuucggcggcuucaauuucagccagauucugcccgauccuagcaagcccagcaagcggagcuucaucgaggaccugcuguucaacaaagugacacuggccgacgccggcuucaucaagcaguauggcgauugucugggcgacauugccgccagggaucugauuugcgcccagaaguuuaacggacugacagugcugccuccucugcugaccgaugagaugaucgcccaguacacaucugcccugcuggccggcacaaucacaagcggcuggacauuuggagcuggcgccgcucugcagauccccuuugcuaugcagauggccuaccgguucaacggcaucggagugacccagaaugugcuguacgagaaccagaagcugaucgccaaccaguucaacagcgccaucggcaagauccaggacagccugagcagcacagcaagcgcccugggaaagcugcaggacguggucaaccagaaugcccaggcacugaacacccuggucaagcagcuguccuccaacuucggcgccaucagcucugugcugaacgauauccugagcagacuggacaaggucgaggccgaggugcagaucgacagacugaucacaggcagacugcagagccuccagacauacgugacccagcagcugaucagagccgccgagauuagagccucugccaaucuggccgccaccaagaugucugagugugugcugggccagagcaagagaguggacuuuugcggcaagggcuaccaccugaugagcuucccucagucugccccucacggcgugguguuucugcacgugacauaugugcccgcucaagagaagaauuucaccaccgcuccagccaucugccacgacggcaaagcccacuuuccuagagaaggcguguucguguccaacggcacccauugguucgugacacagcggaacuucuacgagccccagaucaucaccaccgacaacaccuucgugucuggcaacugcgacguugugaucggcauugugaacaauaccguguacgacccucugcagcccgagcuggacagcuucaaagaggaacuggacaaguacuuuaagaaccacacaagccccgacguggaccugggcgauaucagcggaaucaaugccagcgucgugaacauccagaaagagaucgaccggcugaacgagguggccaagaaucugaacgagagccugaucgaccugcaagaacuggggaaguacgagcaguacaucaaguggcccugguacaucuggcugggcuuuaucgccggacugauugccaucgugauggucacaaucaugcuguguugcaugaccagcugcuguagcugccugaagggcuguuguagcuguggcagcugcugcaaguucgacgaggacgauucugagcccgugcugaagggcgugaaacugcacuacaccugauaauaggcuggagccucgguggccuagcuucuugccccuugggccuccccccagccccuccuccccuuccugcacccguacccccguggucuuugaauaaagucugagugggcggcaaaaaaaaaaaaaaaaaaaaaaaaaaaaaaaaaaaaaaaaaaaaaaaaaaaaaaaaaaaaaaaaaaaaaaaaaaaaaaaaaaaaaaaaaaaaaaaaaaaa

SEQ ID NO: 26137 - RNA, 4095 nt, Artificial Sequence
  SARS-CoV-2/Wuhan/WIV05/2019__EPI_ISL_402128 spike protein mRNA gc mod (1-1273)(L18F_T20N_P26S_D138Y_R190S_K417T_E484K_N501Y_D614G_H655Y _T1027I)
gggaaauaagagagaaaagaagaguaagaagaaauauaagaccccggcgccgccaccauguucguguuucuggugcugcugccccugguguccagccagugugugaacuucaccaacagaacacagcugccuagcgccuacaccaacagcuucaccagaggcguguacuaccccgacaagguguucagauccagcgugcugcacucuacccaggaccuguuccugccuuucuucagcaacgugaccugguuccacgccauccacguguccggcaccaauggcaccaagagauucgacaaccccgugcugcccuucaacgacgggguguacuuugccagcaccgagaaguccaacaucaucagaggcuggaucuucggcaccacacuggacagcaagacccagagccugcugaucgugaacaacgccaccaacguggucaucaaagugugcgaguuccaguucugcaacuaccccuuccugggcgucuacuaccacaagaacaacaagagcuggauggaaagcgaguuccggguguacagcagcgccaacaacugcaccuucgaguacgugucccagccuuuccugauggaccuggaaggcaagcagggcaacuucaagaaccugagcgaguucguguucaagaacaucgacggcuacuucaaaaucuacagcaagcacaccccuaucaaccucgugcgggaucugccucagggcuucucugcucuggaaccccugguggaucugcccaucggcaucaacaucacccgguuucagacacugcuggcccugcacagaagcuaccugacaccuggcgauagcagcagcggauggacagcuggugccgccgcuuacuaugugggcuaccugcagccuagaaccuuccugcugaaguacaacgagaacggcaccaucaccgacgccguggauugugcucuggauccucugagcgagacaaagugcacccugaaguccuucaccguggaaaagggcaucuaccagaccagcaacuuccgggugcagcccaccgaauccaucgugcgguuccccaauaucaccaaucugugccccuucggcgagguguucaaugccaccagauucgccucuguguacgccuggaaccggaagcggaucagcaauugcguggccgacuacuccgugcuguacaacuccgccagcuucagcaccuucaagugcuacggcguguccccuaccaagcugaacgaccugugcuucacaaacguguacgccgacagcuucgugauccggggagaugaagugcggcagauugccccuggacagacaggcaccaucgccgacuacaacuacaagcugcccgacgacuucaccggcugugugauugccuggaacagcaacaaccuggacuccaaagucggcggcaacuacaauuaccuguaccggcuguuccggaaguccaaucugaagcccuucgagcgggacaucagcaccgaaaucuaucaggccggcagcaccccuugcaacggcgugaagggcuucaacugcuacuucccacugcaguccuacggcuuucagcccacauacggcgugggcuaucagcccuacagagugguggugcugagcuucgaacugcugcaugcuccugccacagugugcggcccuaagaaaagcaccaaucucgugaagaacaaaugcgugaacuucaacuucaacggccugaccggcaccggcgugcugacagagagcaacaagaaguuccugccauuccagcaguuuggccgggauaucgccgauaccacagacgccguuagagauccccagacacuggaaauccuggacaucaccccaugcagcuucggcggagugucugugaucaccccuggcaccaacaccagcaaucagguggcagugcuguaccagggcgugaacuguaccgaagugcccguggccauucacgccgaucagcugacaccuacauggcggguguacuccaccggcagcaauguguuucagaccagagccggcugucugaucggagccgaguacgugaacaauagcuacgagugcgacauccccaucggcgcuggcaucugugccagcuaccagacacagacaaacagccccagacgggcuagaagcguggccagccagagcaucauugccuacacaaugucucugggcgccgagaacagcguggccuacuccaacaacucuaucgcuauccccaccaacuucaccaucagcgugaccaccgagauccugccuguguccaugaccaagaccagcguggacugcaccauguacaucugcggcgauuccaccgagugcuccaaccugcugcugcaguacggcagcuucugcacccagcugaauagagcccugacagggaucgccguggaacaggacaagaacacccaagagguguucgcccaagugaagcaaaucuacaagaccccuccuaucaaggacuucggcggcuucaauuucagccagauucugcccgauccuagcaagcccagcaagcggagcuucaucgaggaccugcuguucaacaaagugacacuggccgacgccggcuucaucaagcaguauggcgauugucugggcgacauugccgccagggaucugauuugcgcccagaaguuuaacggacugacagugcugccuccucugcugaccgaugagaugaucgcccaguacacaucugcccugcuggccggcacaaucacaagcggcuggacauuuggagcuggcgccgcucugcagauccccuuugcuaugcagauggccuaccgguucaacggcaucggagugacccagaaugugcuguacgagaaccagaagcugaucgccaaccaguucaacagcgccaucggcaagauccaggacagccugagcagcacagcaagcgcccugggaaagcugcaggacguggucaaccagaaugcccaggcacugaacacccuggucaagcagcuguccuccaacuucggcgccaucagcucugugcugaacgauauccugagcagacuggacaaggucgaggccgaggugcagaucgacagacugaucacaggcagacugcagagccuccagacauacgugacccagcagcugaucagagccgccgagauuagagccucugccaaucuggccgccaucaagaugucugagugugugcugggccagagcaagagaguggacuuuugcggcaagggcuaccaccugaugagcuucccucagucugccccucacggcgugguguuucugcacgugacauaugugcccgcucaagagaagaauuucaccaccgcuccagccaucugccacgacggcaaagcccacuuuccuagagaaggcguguucguguccaacggcacccauugguucgugacacagcggaacuucuacgagccccagaucaucaccaccgacaacaccuucgugucuggcaacugcgacguugugaucggcauugugaacaauaccguguacgacccucugcagcccgagcuggacagcuucaaagaggaacuggacaaguacuuuaagaaccacacaagccccgacguggaccugggcgauaucagcggaaucaaugccagcgucgugaacauccagaaagagaucgaccggcugaacgagguggccaagaaucugaacgagagccugaucgaccugcaagaacuggggaaguacgagcaguacaucaaguggcccugguacaucuggcugggcuuuaucgccggacugauugccaucgugauggucacaaucaugcuguguugcaugaccagcugcuguagcugccugaagggcuguuguagcuguggcagcugcugcaaguucgacgaggacgauucugagcccgugcugaagggcgugaaacugcacuacaccugauaauaggcuggagccucgguggccuagcuucuugccccuugggccuccccccagccccuccuccccuuccugcacccguacccccguggucuuugaauaaagucugagugggcggcaaaaaaaaaaaaaaaaaaaaaaaaaaaaaaaaaaaaaaaaaaaaaaaaaaaaaaaaaaaaaaaaaaaaaaaaaaaaaaaaaaaaaaaaaaaaaaaaaaaa

SEQ ID NO: 26138 - RNA, 4095 nt, Artificial Sequence
  SARS-CoV-2/Wuhan/WIV05/2019__EPI_ISL_402128 spike protein mRNA gc mod (1-1273)(S13I_W152C_L452R_D614G)
gggaaauaagagagaaaagaagaguaagaagaaauauaagaccccggcgccgccaccauguucguguuucuggugcugcugccccugguguccauccagugugugaaccugaccaccagaacacagcugccuccagccuacaccaacagcuucaccagaggcguguacuaccccgacaagguguucagauccagcgugcugcacucuacccaggaccuguuccugccuuucuucagcaacgugaccugguuccacgccauccacguguccggcaccaauggcaccaagagauucgacaaccccgugcugcccuucaacgacgggguguacuuugccagcaccgagaaguccaacaucaucagaggcuggaucuucggcaccacacuggacagcaagacccagagccugcugaucgugaacaacgccaccaacguggucaucaaagugugcgaguuccaguucugcaacgaccccuuccugggcgucuacuaccacaagaacaacaagagcugcauggaaagcgaguuccggguguacagcagcgccaacaacugcaccuucgaguacgugucccagccuuuccugauggaccuggaaggcaagcagggcaacuucaagaaccugcgcgaguucguguucaagaacaucgacggcuacuucaaaaucuacagcaagcacaccccuaucaaccucgugcgggaucugccucagggcuucucugcucuggaaccccugguggaucugcccaucggcaucaacaucacccgguuucagacacugcuggcccugcacagaagcuaccugacaccuggcgauagcagcagcggauggacagcuggugccgccgcuuacuaugugggcuaccugcagccuagaaccuuccugcugaaguacaacgagaacggcaccaucaccgacgccguggauugugcucuggauccucugagcgagacaaagugcacccugaaguccuucaccguggaaaagggcaucuaccagaccagcaacuuccgggugcagcccaccgaauccaucgugcgguuccccaauaucaccaaucugugccccuucggcgagguguucaaugccaccagauucgccucuguguacgccuggaaccggaagcggaucagcaauugcguggccgacuacuccgugcuguacaacuccgccagcuucagcaccuucaagugcuacggcguguccccuaccaagcugaacgaccugugcuucacaaacguguacgccgacagcuucgugauccggggagaugaagugcggcagauugccccuggacagacaggcaagaucgccgacuacaacuacaagcugcccgacgacuucaccggcugugugauugccuggaacagcaacaaccuggacuccaaagucggcggcaacuacaauuaccgcuaccggcuguuccggaaguccaaucugaagcccuucgagcgggacaucagcaccgaaaucuaucaggccggcagcaccccuugcaacggcguggaaggcuucaacugcuacuucccacugcaguccuacggcuuucagcccacaaauggcgugggcuaucagcccuacagagugguggugcugagcuucgaacugcugcaugcuccugccacagugugcggcccuaagaaaagcaccaaucucgugaagaacaaaugcgugaacuucaacuucaacggccugaccggcaccggcgugcugacagagagcaacaagaaguuccugccauuccagcaguuuggccgggauaucgccgauaccacagacgccguuagagauccccagacacuggaaauccuggacaucaccccaugcagcuucggcggagugucugugaucaccccuggcaccaacaccagcaaucagguggcagugcuguaccagggcgugaacuguaccgaagugcccguggccauucacgccgaucagcugacaccuacauggcggguguacuccaccggcagcaauguguuucagaccagagccggcugucugaucggagccgagcacgugaacaauagcuacgagugcgacauccccaucggcgcuggcaucugugccagcuaccagacacagacaaacagccccagacgggcuagaagcguggccagccagagcaucauugccuacacaaugucucugggcgccgagaacagcguggccuacuccaacaacucuaucgcuauccccaccaacuucaccaucagcgugaccaccgagauccugccuguguccaugaccaagaccagcguggacugcaccauguacaucugcggcgauuccaccgagugcuccaaccugcugcugcaguacggcagcuucugcacccagcugaauagagcccugacagggaucgccguggaacaggacaagaacacccaagagguguucgcccaagugaagcaaaucuacaagaccccuccuaucaaggacuucggcggcuucaauuucagccagauucugcccgauccuagcaagcccagcaagcggagcuucaucgaggaccugcuguucaacaaagugacacuggccgacgccggcuucaucaagcaguauggcgauugucugggcgacauugccgccagggaucugauuugcgcccagaaguuuaacggacugacagugcugccuccucugcugaccgaugagaugaucgcccaguacacaucugcccugcuggccggcacaaucacaagcggcuggacauuuggagcuggcgccgcucugcagauccccuuugcuaugcagauggccuaccgguucaacggcaucggagugacccagaaugugcuguacgagaaccagaagcugaucgccaaccaguucaacagcgccaucggcaagauccaggacagccugagcagcacagcaagcgcccugggaaagcugcaggacguggucaaccagaaugcccaggcacugaacacccuggucaagcagcuguccuccaacuucggcgccaucagcucugugcugaacgauauccugagcagacuggacaaggucgaggccgaggugcagaucgacagacugaucacaggcagacugcagagccuccagacauacgugacccagcagcugaucagagccgccgagauuagagccucugccaaucuggccgccaccaagaugucugagugugugcugggccagagcaagagaguggacuuuugcggcaagggcuaccaccugaugagcuucccucagucugccccucacggcgugguguuucugcacgugacauaugugcccgcucaagagaagaauuucaccaccgcuccagccaucugccacgacggcaaagcccacuuuccuagagaaggcguguucguguccaacggcacccauugguucgugacacagcggaacuucuacgagccccagaucaucaccaccgacaacaccuucgugucuggcaacugcgacguugugaucggcauugugaacaauaccguguacgacccucugcagcccgagcuggacagcuucaaagaggaacuggacaaguacuuuaagaaccacacaagccccgacguggaccugggcgauaucagcggaaucaaugccagcgucgugaacauccagaaagagaucgaccggcugaacgagguggccaagaaucugaacgagagccugaucgaccugcaagaacuggggaaguacgagcaguacaucaaguggcccugguacaucuggcugggcuuuaucgccggacugauugccaucgugauggucacaaucaugcuguguugcaugaccagcugcuguagcugccugaagggcuguuguagcuguggcagcugcugcaaguucgacgaggacgauucugagcccgugcugaagggcgugaaacugcacuacaccugauaauaggcuggagccucgguggccuagcuucuugccccuugggccuccccccagccccuccuccccuuccugcacccguacccccguggucuuugaauaaagucugagugggcggcaaaaaaaaaaaaaaaaaaaaaaaaaaaaaaaaaaaaaaaaaaaaaaaaaaaaaaaaaaaaaaaaaaaaaaaaaaaaaaaaaaaaaaaaaaaaaaaaaaaa

SEQ ID NO: 26139 - RNA, 4095 nt, Artificial Sequence
  SARS-CoV-2/Wuhan/WIV05/2019__EPI_ISL_402128 spike protein mRNA gc mod (1-1273)
gggaaauaagagagaaaagaagaguaagaagaaauauaagaccccggcgccgccaccauguucguguuccuggugcugcugccucugguguccagccagugugugaaccugaccaccagaacacagcugccuccagccuacaccaacagcuuuaccagaggcguguacuaccccgacaagguguucagauccagcgugcugcacucuacccaggaccuguuccugccuuucuucagcaacgugaccugguuccacgccauccacguguccggcaccaauggcaccaagagauucgacaaccccgugcugcccuucaacgacgggguguacuuugccagcaccgagaaguccaacaucaucagaggcuggaucuucggcaccacacuggacagcaagacccagagccugcugaucgugaacaacgccaccaacguggucaucaaagugugcgaguuccaguucugcaacgaccccuuccugggcgucuacuaccacaagaacaacaagagcuggauggaaagcgaguuccggguguacagcagcgccaacaacugcaccuucgaguacgugucccagccuuuccugauggaccuggaaggcaagcagggcaacuucaagaaccugcgcgaguucguguuuaagaacaucgacggcuacuucaagaucuacagcaagcacaccccuaucaaccucgugcgggaucugccucagggcuucucugcucuggaaccccugguggaucugcccaucggcaucaacaucacccgguuucagacacugcuggcccugcacagaagcuaccugacaccuggcgauagcagcagcggauggacagcuggugccgccgcuuacuaugugggcuaccugcagccuagaaccuuccugcugaaguacaacgagaacggcaccaucaccgacgccguggauugugcucuggauccucugagcgagacaaagugcacccugaaguccuucaccguggaaaagggcaucuaccagaccagcaacuuccgggugcagcccaccgaauccaucgugcgguuccccaauaucaccaaucugugccccuucggcgagguguucaaugccaccagauucgccucuguguacgccuggaaccggaagcggaucagcaauugcguggccgacuacuccgugcuguacaacuccgccagcuucagcaccuucaagugcuacggcguguccccuaccaagcugaacgaccugugcuucacaaacguguacgccgacagcuucgugauccggggagaugaagugcggcagauugccccuggacagacaggcaagaucgccgacuacaacuacaagcugcccgacgacuucaccggcugugugauugccuggaacagcaacaaccuggacuccaaagucggcggcaacuacaauuaccuguaccggcuguuccggaaguccaaucugaagcccuucgagcgggacaucuccaccgagaucuaucaggccggcagcaccccuuguaacggcguggaaggcuucaacugcuacuucccacugcaguccuacggcuuucagcccacaaauggcgugggcuaucagcccuacagagugguggugcugagcuucgaacugcugcaugccccugccacagugugcggcccuaagaaaagcaccaaucucgugaagaacaaaugcgugaacuucaacuucaacggccugaccggcaccggcgugcugacagagagcaacaagaaguuccugccauuccagcaguuuggccgggauaucgccgauaccacagacgccguuagagauccccagacacuggaaauccuggacaucaccccuugcagcuucggcggagugucugugaucaccccuggcaccaacaccagcaaucagguggcagugcuguaccaggacgugaacuguaccgaagugcccguggccauucacgccgaucagcugacaccuacauggcggguguacuccaccggcagcaauguguuucagaccagagccggcugucugaucggagccgagcacgugaacaauagcuacgagugcgacauccccaucggcgcuggaaucugcgccagcuaccagacacagacaaacagcccucggagagccagaagcguggccagccagagcaucauugccuacacaaugucucugggcgccgagaacagcguggccuacuccaacaacucuaucgcuauccccaccaacuucaccaucagcgugaccacagagauccugccuguguccaugaccaagaccagcguggacugcaccauguacaucugcggcgauuccaccgagugcuccaaccugcugcugcaguacggcagcuucugcacccagcugaauagagcccugacagggaucgccguggaacaggacaagaacacccaagagguguucgcccaagugaagcagaucuacaagaccccuccuaucaaggacuucggcggcuucaauuucagccagauucugcccgauccuagcaagcccagcaagcggagcuucaucgaggaccugcuguucaacaaagugacacuggccgacgccggcuucaucaagcaguauggcgauugucugggcgacauugccgccagggaucugauuugcgcccagaaguuuaacggacugacagugcugccuccucugcugaccgaugagaugaucgcccaguacacaucugcccugcuggccggcacaaucacaagcggcuggacauuuggagcaggcgccgcucugcagauccccuuugcuaugcagauggccuaccgguucaacggcaucggagugacccagaaugugcuguacgagaaccagaagcugaucgccaaccaguucaacagcgccaucggcaagauccaggacagccugagcagcacagcaagcgcccugggaaagcugcaggacguggucaaccagaaugcccaggcacugaacacccuggucaagcagcuguccuccaacuucggcgccaucagcucugugcugaacgauauccugagcagacuggacaaggucgaggccgaggugcagaucgacagacugaucacaggcagacugcagagccuccagacauacgugacccagcagcugaucagagccgccgagauuagagccucugccaaucuggccgccaccaagaugucugagugugugcugggccagagcaagagaguggacuuuugcggcaagggcuaccaccugaugagcuucccucagucugccccucacggcgugguguuucugcacgugacauaugugcccgcucaagagaagaauuucaccaccgcuccagccaucugccacgacggcaaagcccacuuuccuagagaaggcguguucguguccaacggcacccauugguucgugacacagcggaacuucuacgagccccagaucaucaccaccgacaacaccuucgugucuggcaacugcgacgucgugaucggcauugugaacaauaccguguacgacccucugcagcccgagcuggacagcuucaaagaggaacuggacaaguacuuuaagaaccacacaagccccgacguggaccugggcgauaucagcggaaucaaugccagcgucgugaacauccagaaagagaucgaccggcugaacgagguggccaagaaucugaacgagagccugaucgaccugcaagaacuggggaaguacgagcaguacaucaaguggcccugguacaucuggcugggcuuuaucgccggacugauugccaucgugauggucacaaucaugcuguguugcaugaccagcugcuguagcugccugaagggcuguuguagcuguggcagcugcugcaaguucgacgaggacgauucugagcccgugcugaagggcgugaaacugcacuacacaugauaauaggcuggagccucgguggccuagcuucuugccccuugggccuccccccagccccuccuccccuuccugcacccguacccccguggucuuugaauaaagucugagugggcggcaaaaaaaaaaaaaaaaaaaaaaaaaaaaaaaaaaaaaaaaaaaaaaaaaaaaaaaaaaaaaaaaaaaaaaaaaaaaaaaaaaaaaaaaaaaaaaaaaaaa

SEQ ID NO: 26140 - RNA, 4095 nt, Artificial Sequence
  SARS-CoV-2/Wuhan/WIV05/2019__EPI_ISL_402128 spike protein mRNA gc mod (1-1273)(D614G)
gggaaauaagagagaaaagaagaguaagaagaaauauaagaccccggcgccgccaccauguucguguuccuggugcugcugccucugguguccagccagugugugaaccugaccaccagaacacagcugccuccagccuacaccaacagcuuuaccagaggcguguacuaccccgacaagguguucagauccagcgugcugcacucuacccaggaccuguuccugccuuucuucagcaacgugaccugguuccacgccauccacguguccggcaccaauggcaccaagagauucgacaaccccgugcugcccuucaacgacgggguguacuuugccagcaccgagaaguccaacaucaucagaggcuggaucuucggcaccacacuggacagcaagacccagagccugcugaucgugaacaacgccaccaacguggucaucaaagugugcgaguuccaguucugcaacgaccccuuccugggcgucuacuaccacaagaacaacaagagcuggauggaaagcgaguuccggguguacagcagcgccaacaacugcaccuucgaguacgugucccagccuuuccugauggaccuggaaggcaagcagggcaacuucaagaaccugcgcgaguucguguuuaagaacaucgacggcuacuucaagaucuacagcaagcacaccccuaucaaccucgugcgggaucugccucagggcuucucugcucuggaaccccugguggaucugcccaucggcaucaacaucacccgguuucagacacugcuggcccugcacagaagcuaccugacaccuggcgauagcagcagcggauggacagcuggugccgccgcuuacuaugugggcuaccugcagccuagaaccuuccugcugaaguacaacgagaacggcaccaucaccgacgccguggauugugcucuggauccucugagcgagacaaagugcacccugaaguccuucaccguggaaaagggcaucuaccagaccagcaacuuccgggugcagcccaccgaauccaucgugcgguuccccaauaucaccaaucugugccccuucggcgagguguucaaugccaccagauucgccucuguguacgccuggaaccggaagcggaucagcaauugcguggccgacuacuccgugcuguacaacuccgccagcuucagcaccuucaagugcuacggcguguccccuaccaagcugaacgaccugugcuucacaaacguguacgccgacagcuucgugauccggggagaugaagugcggcagauugccccuggacagacaggcaagaucgccgacuacaacuacaagcugcccgacgacuucaccggcugugugauugccuggaacagcaacaaccuggacuccaaagucggcggcaacuacaauuaccuguaccggcuguuccggaaguccaaucugaagcccuucgagcgggacaucuccaccgagaucuaucaggccggcagcaccccuuguaacggcguggaaggcuucaacugcuacuucccacugcaguccuacggcuuucagcccacaaauggcgugggcuaucagcccuacagagugguggugcugagcuucgaacugcugcaugccccugccacagugugcggcccuaagaaaagcaccaaucucgugaagaacaaaugcgugaacuucaacuucaacggccugaccggcaccggcgugcugacagagagcaacaagaaguuccugccauuccagcaguuuggccgggauaucgccgauaccacagacgccguuagagauccccagacacuggaaauccuggacaucaccccuugcagcuucggcggagugucugugaucaccccuggcaccaacaccagcaaucagguggcagugcuguaccagggcgugaacuguaccgaagugcccguggccauucacgccgaucagcugacaccuacauggcggguguacuccaccggcagcaauguguuucagaccagagccggcugucugaucggagccgagcacgugaacaauagcuacgagugcgacauccccaucggcgcuggaaucugcgccagcuaccagacacagacaaacagcccucggagagccagaagcguggccagccagagcaucauugccuacacaaugucucugggcgccgagaacagcguggccuacuccaacaacucuaucgcuauccccaccaacuucaccaucagcgugaccacagagauccugccuguguccaugaccaagaccagcguggacugcaccauguacaucugcggcgauuccaccgagugcuccaaccugcugcugcaguacggcagcuucugcacccagcugaauagagcccugacagggaucgccguggaacaggacaagaacacccaagagguguucgcccaagugaagcagaucuacaagaccccuccuaucaaggacuucggcggcuucaauuucagccagauucugcccgauccuagcaagcccagcaagcggagcuucaucgaggaccugcuguucaacaaagugacacuggccgacgccggcuucaucaagcaguauggcgauugucugggcgacauugccgccagggaucugauuugcgcccagaaguuuaacggacugacagugcugccuccucugcugaccgaugagaugaucgcccaguacacaucugcccugcuggccggcacaaucacaagcggcuggacauuuggagcaggcgccgcucugcagauccccuuugcuaugcagauggccuaccgguucaacggcaucggagugacccagaaugugcuguacgagaaccagaagcugaucgccaaccaguucaacagcgccaucggcaagauccaggacagccugagcagcacagcaagcgcccugggaaagcugcaggacguggucaaccagaaugcccaggcacugaacacccuggucaagcagcuguccuccaacuucggcgccaucagcucugugcugaacgauauccugagcagacuggacaaggucgaggccgaggugcagaucgacagacugaucacaggcagacugcagagccuccagacauacgugacccagcagcugaucagagccgccgagauuagagccucugccaaucuggccgccaccaagaugucugagugugugcugggccagagcaagagaguggacuuuugcggcaagggcuaccaccugaugagcuucccucagucugccccucacggcgugguguuucugcacgugacauaugugcccgcucaagagaagaauuucaccaccgcuccagccaucugccacgacggcaaagcccacuuuccuagagaaggcguguucguguccaacggcacccauugguucgugacacagcggaacuucuacgagccccagaucaucaccaccgacaacaccuucgugucuggcaacugcgacgucgugaucggcauugugaacaauaccguguacgacccucugcagcccgagcuggacagcuucaaagaggaacuggacaaguacuuuaagaaccacacaagccccgacguggaccugggcgauaucagcggaaucaaugccagcgucgugaacauccagaaagagaucgaccggcugaacgagguggccaagaaucugaacgagagccugaucgaccugcaagaacuggggaaguacgagcaguacaucaaguggcccugguacaucuggcugggcuuuaucgccggacugauugccaucgugauggucacaaucaugcuguguugcaugaccagcugcuguagcugccugaagggcuguuguagcuguggcagcugcugcaaguucgacgaggacgauucugagcccgugcugaagggcgugaaacugcacuacacaugauaauaggcuggagccucgguggccuagcuucuugccccuugggccuccccccagccccuccuccccuuccugcacccguacccccguggucuuugaauaaagucugagugggcggcaaaaaaaaaaaaaaaaaaaaaaaaaaaaaaaaaaaaaaaaaaaaaaaaaaaaaaaaaaaaaaaaaaaaaaaaaaaaaaaaaaaaaaaaaaaaaaaaaaaa

SEQ ID NO: 26141 - RNA, 4095 nt, Artificial Sequence
  SARS-CoV-2/Wuhan/WIV05/2019__EPI_ISL_402128 spike protein mRNA gc mod (1-1273)(A222V_D614G)
gggaaauaagagagaaaagaagaguaagaagaaauauaagaccccggcgccgccaccauguucguguuccuggugcugcugccucugguguccagccagugugugaaccugaccaccagaacacagcugccuccagccuacaccaacagcuuuaccagaggcguguacuaccccgacaagguguucagauccagcgugcugcacucuacccaggaccuguuccugccuuucuucagcaacgugaccugguuccacgccauccacguguccggcaccaauggcaccaagagauucgacaaccccgugcugcccuucaacgacgggguguacuuugccagcaccgagaaguccaacaucaucagaggcuggaucuucggcaccacacuggacagcaagacccagagccugcugaucgugaacaacgccaccaacguggucaucaaagugugcgaguuccaguucugcaacgaccccuuccugggcgucuacuaccacaagaacaacaagagcuggauggaaagcgaguuccggguguacagcagcgccaacaacugcaccuucgaguacgugucccagccuuuccugauggaccuggaaggcaagcagggcaacuucaagaaccugcgcgaguucguguuuaagaacaucgacggcuacuucaagaucuacagcaagcacaccccuaucaaccucgugcgggaucugccucagggcuucucugugcuggaaccccugguggaucugcccaucggcaucaacaucacccgguuucagacacugcuggcccugcacagaagcuaccugacaccuggcgauagcagcagcggauggacagcuggugccgccgcuuacuaugugggcuaccugcagccuagaaccuuccugcugaaguacaacgagaacggcaccaucaccgacgccguggauugugcucuggauccucugagcgagacaaagugcacccugaaguccuucaccguggaaaagggcaucuaccagaccagcaacuuccgggugcagcccaccgaauccaucgugcgguuccccaauaucaccaaucugugccccuucggcgagguguucaaugccaccagauucgccucuguguacgccuggaaccggaagcggaucagcaauugcguggccgacuacuccgugcuguacaacuccgccagcuucagcaccuucaagugcuacggcguguccccuaccaagcugaacgaccugugcuucacaaacguguacgccgacagcuucgugauccggggagaugaagugcggcagauugccccuggacagacaggcaagaucgccgacuacaacuacaagcugcccgacgacuucaccggcugugugauugccuggaacagcaacaaccuggacuccaaagucggcggcaacuacaauuaccuguaccggcuguuccggaaguccaaucugaagcccuucgagcgggacaucuccaccgagaucuaucaggccggcagcaccccuuguaacggcguggaaggcuucaacugcuacuucccacugcaguccuacggcuuucagcccacaaauggcgugggcuaucagcccuacagagugguggugcugagcuucgaacugcugcaugccccugccacagugugcggcccuaagaaaagcaccaaucucgugaagaacaaaugcgugaacuucaacuucaacggccugaccggcaccggcgugcugacagagagcaacaagaaguuccugccauuccagcaguuuggccgggauaucgccgauaccacagacgccguuagagauccccagacacuggaaauccuggacaucaccccuugcagcuucggcggagugucugugaucaccccuggcaccaacaccagcaaucagguggcagugcuguaccagggcgugaacuguaccgaagugcccguggccauucacgccgaucagcugacaccuacauggcggguguacuccaccggcagcaauguguuucagaccagagccggcugucugaucggagccgagcacgugaacaauagcuacgagugcgacauccccaucggcgcuggaaucugcgccagcuaccagacacagacaaacagcccucggagagccagaagcguggccagccagagcaucauugccuacacaaugucucugggcgccgagaacagcguggccuacuccaacaacucuaucgcuauccccaccaacuucaccaucagcgugaccacagagauccugccuguguccaugaccaagaccagcguggacugcaccauguacaucugcggcgauuccaccgagugcuccaaccugcugcugcaguacggcagcuucugcacccagcugaauagagcccugacagggaucgccguggaacaggacaagaacacccaagagguguucgcccaagugaagcagaucuacaagaccccuccuaucaaggacuucggcggcuucaauuucagccagauucugcccgauccuagcaagcccagcaagcggagcuucaucgaggaccugcuguucaacaaagugacacuggccgacgccggcuucaucaagcaguauggcgauugucugggcgacauugccgccagggaucugauuugcgcccagaaguuuaacggacugacagugcugccuccucugcugaccgaugagaugaucgcccaguacacaucugcccugcuggccggcacaaucacaagcggcuggacauuuggagcaggcgccgcucugcagauccccuuugcuaugcagauggccuaccgguucaacggcaucggagugacccagaaugugcuguacgagaaccagaagcugaucgccaaccaguucaacagcgccaucggcaagauccaggacagccugagcagcacagcaagcgcccugggaaagcugcaggacguggucaaccagaaugcccaggcacugaacacccuggucaagcagcuguccuccaacuucggcgccaucagcucugugcugaacgauauccugagcagacuggacaaggucgaggccgaggugcagaucgacagacugaucacaggcagacugcagagccuccagacauacgugacccagcagcugaucagagccgccgagauuagagccucugccaaucuggccgccaccaagaugucugagugugugcugggccagagcaagagaguggacuuuugcggcaagggcuaccaccugaugagcuucccucagucugccccucacggcgugguguuucugcacgugacauaugugcccgcucaagagaagaauuucaccaccgcuccagccaucugccacgacggcaaagcccacuuuccuagagaaggcguguucguguccaacggcacccauugguucgugacacagcggaacuucuacgagccccagaucaucaccaccgacaacaccuucgugucuggcaacugcgacgucgugaucggcauugugaacaauaccguguacgacccucugcagcccgagcuggacagcuucaaagaggaacuggacaaguacuuuaagaaccacacaagccccgacguggaccugggcgauaucagcggaaucaaugccagcgucgugaacauccagaaagagaucgaccggcugaacgagguggccaagaaucugaacgagagccugaucgaccugcaagaacuggggaaguacgagcaguacaucaaguggcccugguacaucuggcugggcuuuaucgccggacugauugccaucgugauggucacaaucaugcuguguugcaugaccagcugcuguagcugccugaagggcuguuguagcuguggcagcugcugcaaguucgacgaggacgauucugagcccgugcugaagggcgugaaacugcacuacacaugauaauaggcuggagccucgguggccuagcuucuugccccuugggccuccccccagccccuccuccccuuccugcacccguacccccguggucuuugaauaaagucugagugggcggcaaaaaaaaaaaaaaaaaaaaaaaaaaaaaaaaaaaaaaaaaaaaaaaaaaaaaaaaaaaaaaaaaaaaaaaaaaaaaaaaaaaaaaaaaaaaaaaaaaaa

SEQ ID NO: 26142 - RNA, 4095 nt, Artificial Sequence
  SARS-CoV-2/Wuhan/WIV05/2019__EPI_ISL_402128 spike protein mRNA gc mod (1-1273)(N439K_D614G)
gggaaauaagagagaaaagaagaguaagaagaaauauaagaccccggcgccgccaccauguucguguuccuggugcugcugccucugguguccagccagugugugaaccugaccaccagaacacagcugccuccagccuacaccaacagcuuuaccagaggcguguacuaccccgacaagguguucagauccagcgugcugcacucuacccaggaccuguuccugccuuucuucagcaacgugaccugguuccacgccauccacguguccggcaccaauggcaccaagagauucgacaaccccgugcugcccuucaacgacgggguguacuuugccagcaccgagaaguccaacaucaucagaggcuggaucuucggcaccacacuggacagcaagacccagagccugcugaucgugaacaacgccaccaacguggucaucaaagugugcgaguuccaguucugcaacgaccccuuccugggcgucuacuaccacaagaacaacaagagcuggauggaaagcgaguuccggguguacagcagcgccaacaacugcaccuucgaguacgugucccagccuuuccugauggaccuggaaggcaagcagggcaacuucaagaaccugcgcgaguucguguuuaagaacaucgacggcuacuucaagaucuacagcaagcacaccccuaucaaccucgugcgggaucugccucagggcuucucugcucuggaaccccugguggaucugcccaucggcaucaacaucacccgguuucagacacugcuggcccugcacagaagcuaccugacaccuggcgauagcagcagcggauggacagcuggugccgccgcuuacuaugugggcuaccugcagccuagaaccuuccugcugaaguacaacgagaacggcaccaucaccgacgccguggauugugcucuggauccucugagcgagacaaagugcacccugaaguccuucaccguggaaaagggcaucuaccagaccagcaacuuccgggugcagcccaccgaauccaucgugcgguuccccaauaucaccaaucugugccccuucggcgagguguucaaugccaccagauucgccucuguguacgccuggaaccggaagcggaucagcaauugcguggccgacuacuccgugcuguacaacuccgccagcuucagcaccuucaagugcuacggcguguccccuaccaagcugaacgaccugugcuucacaaacguguacgccgacagcuucgugauccggggagaugaagugcggcagauugccccuggacagacaggcaagaucgccgacuacaacuacaagcugcccgacgacuucaccggcugugugauugccuggaacagcaagaaccuggacuccaaagucggcggcaacuacaauuaccuguaccggcuguuccggaaguccaaucugaagcccuucgagcgggacaucuccaccgagaucuaucaggccggcagcaccccuuguaacggcguggaaggcuucaacugcuacuucccacugcaguccuacggcuuucagcccacaaauggcgugggcuaucagcccuacagagugguggugcugagcuucgaacugcugcaugccccugccacagugugcggcccuaagaaaagcaccaaucucgugaagaacaaaugcgugaacuucaacuucaacggccugaccggcaccggcgugcugacagagagcaacaagaaguuccugccauuccagcaguuuggccgggauaucgccgauaccacagacgccguuagagauccccagacacuggaaauccuggacaucaccccuugcagcuucggcggagugucugugaucaccccuggcaccaacaccagcaaucagguggcagugcuguaccagggcgugaacuguaccgaagugcccguggccauucacgccgaucagcugacaccuacauggcggguguacuccaccggcagcaauguguuucagaccagagccggcugucugaucggagccgagcacgugaacaauagcuacgagugcgacauccccaucggcgcuggaaucugcgccagcuaccagacacagacaaacagcccucggagagccagaagcguggccagccagagcaucauugccuacacaaugucucugggcgccgagaacagcguggccuacuccaacaacucuaucgcuauccccaccaacuucaccaucagcgugaccacagagauccugccuguguccaugaccaagaccagcguggacugcaccauguacaucugcggcgauuccaccgagugcuccaaccugcugcugcaguacggcagcuucugcacccagcugaauagagcccugacagggaucgccguggaacaggacaagaacacccaagagguguucgcccaagugaagcagaucuacaagaccccuccuaucaaggacuucggcggcuucaauuucagccagauucugcccgauccuagcaagcccagcaagcggagcuucaucgaggaccugcuguucaacaaagugacacuggccgacgccggcuucaucaagcaguauggcgauugucugggcgacauugccgccagggaucugauuugcgcccagaaguuuaacggacugacagugcugccuccucugcugaccgaugagaugaucgcccaguacacaucugcccugcuggccggcacaaucacaagcggcuggacauuuggagcaggcgccgcucugcagauccccuuugcuaugcagauggccuaccgguucaacggcaucggagugacccagaaugugcuguacgagaaccagaagcugaucgccaaccaguucaacagcgccaucggcaagauccaggacagccugagcagcacagcaagcgcccugggaaagcugcaggacguggucaaccagaaugcccaggcacugaacacccuggucaagcagcuguccuccaacuucggcgccaucagcucugugcugaacgauauccugagcagacuggacaaggucgaggccgaggugcagaucgacagacugaucacaggcagacugcagagccuccagacauacgugacccagcagcugaucagagccgccgagauuagagccucugccaaucuggccgccaccaagaugucugagugugugcugggccagagcaagagaguggacuuuugcggcaagggcuaccaccugaugagcuucccucagucugccccucacggcgugguguuucugcacgugacauaugugcccgcucaagagaagaauuucaccaccgcuccagccaucugccacgacggcaaagcccacuuuccuagagaaggcguguucguguccaacggcacccauugguucgugacacagcggaacuucuacgagccccagaucaucaccaccgacaacaccuucgugucuggcaacugcgacgucgugaucggcauugugaacaauaccguguacgacccucugcagcccgagcuggacagcuucaaagaggaacuggacaaguacuuuaagaaccacacaagccccgacguggaccugggcgauaucagcggaaucaaugccagcgucgugaacauccagaaagagaucgaccggcugaacgagguggccaagaaucugaacgagagccugaucgaccugcaagaacuggggaaguacgagcaguacaucaaguggcccugguacaucuggcugggcuuuaucgccggacugauugccaucgugauggucacaaucaugcuguguugcaugaccagcugcuguagcugccugaagggcuguuguagcuguggcagcugcugcaaguucgacgaggacgauucugagcccgugcugaagggcgugaaacugcacuacacaugauaauaggcuggagccucgguggccuagcuucuugccccuugggccuccccccagccccuccuccccuuccugcacccguacccccguggucuuugaauaaagucugagugggcggcaaaaaaaaaaaaaaaaaaaaaaaaaaaaaaaaaaaaaaaaaaaaaaaaaaaaaaaaaaaaaaaaaaaaaaaaaaaaaaaaaaaaaaaaaaaaaaaaaaaa

SEQ ID NO: 26143 - RNA, 4095 nt, Artificial Sequence
  SARS-CoV-2/Wuhan/WIV05/2019__EPI_ISL_402128 spike protein mRNA gc mod (1-1273)(S477N_D614G)
gggaaauaagagagaaaagaagaguaagaagaaauauaagaccccggcgccgccaccauguucguguuccuggugcugcugccucugguguccagccagugugugaaccugaccaccagaacacagcugccuccagccuacaccaacagcuuuaccagaggcguguacuaccccgacaagguguucagauccagcgugcugcacucuacccaggaccuguuccugccuuucuucagcaacgugaccugguuccacgccauccacguguccggcaccaauggcaccaagagauucgacaaccccgugcugcccuucaacgacgggguguacuuugccagcaccgagaaguccaacaucaucagaggcuggaucuucggcaccacacuggacagcaagacccagagccugcugaucgugaacaacgccaccaacguggucaucaaagugugcgaguuccaguucugcaacgaccccuuccugggcgucuacuaccacaagaacaacaagagcuggauggaaagcgaguuccggguguacagcagcgccaacaacugcaccuucgaguacgugucccagccuuuccugauggaccuggaaggcaagcagggcaacuucaagaaccugcgcgaguucguguuuaagaacaucgacggcuacuucaagaucuacagcaagcacaccccuaucaaccucgugcgggaucugccucagggcuucucugcucuggaaccccugguggaucugcccaucggcaucaacaucacccgguuucagacacugcuggcccugcacagaagcuaccugacaccuggcgauagcagcagcggauggacagcuggugccgccgcuuacuaugugggcuaccugcagccuagaaccuuccugcugaaguacaacgagaacggcaccaucaccgacgccguggauugugcucuggauccucugagcgagacaaagugcacccugaaguccuucaccguggaaaagggcaucuaccagaccagcaacuuccgggugcagcccaccgaauccaucgugcgguuccccaauaucaccaaucugugccccuucggcgagguguucaaugccaccagauucgccucuguguacgccuggaaccggaagcggaucagcaauugcguggccgacuacuccgugcuguacaacuccgccagcuucagcaccuucaagugcuacggcguguccccuaccaagcugaacgaccugugcuucacaaacguguacgccgacagcuucgugauccggggagaugaagugcggcagauugccccuggacagacaggcaagaucgccgacuacaacuacaagcugcccgacgacuucaccggcugugugauugccuggaacagcaacaaccuggacuccaaagucggcggcaacuacaauuaccuguaccggcuguuccggaaguccaaucugaagcccuucgagcgggacaucuccaccgagaucuaucaggccggcaacaccccuuguaacggcguggaaggcuucaacugcuacuucccacugcaguccuacggcuuucagcccacaaauggcgugggcuaucagcccuacagagugguggugcugagcuucgaacugcugcaugccccugccacagugugcggcccuaagaaaagcaccaaucucgugaagaacaaaugcgugaacuucaacuucaacggccugaccggcaccggcgugcugacagagagcaacaagaaguuccugccauuccagcaguuuggccgggauaucgccgauaccacagacgccguuagagauccccagacacuggaaauccuggacaucaccccuugcagcuucggcggagugucugugaucaccccuggcaccaacaccagcaaucagguggcagugcuguaccagggcgugaacuguaccgaagugcccguggccauucacgccgaucagcugacaccuacauggcggguguacuccaccggcagcaauguguuucagaccagagccggcugucugaucggagccgagcacgugaacaauagcuacgagugcgacauccccaucggcgcuggaaucugcgccagcuaccagacacagacaaacagcccucggagagccagaagcguggccagccagagcaucauugccuacacaaugucucugggcgccgagaacagcguggccuacuccaacaacucuaucgcuauccccaccaacuucaccaucagcgugaccacagagauccugccuguguccaugaccaagaccagcguggacugcaccauguacaucugcggcgauuccaccgagugcuccaaccugcugcugcaguacggcagcuucugcacccagcugaauagagcccugacagggaucgccguggaacaggacaagaacacccaagagguguucgcccaagugaagcagaucuacaagaccccuccuaucaaggacuucggcggcuucaauuucagccagauucugcccgauccuagcaagcccagcaagcggagcuucaucgaggaccugcuguucaacaaagugacacuggccgacgccggcuucaucaagcaguauggcgauugucugggcgacauugccgccagggaucugauuugcgcccagaaguuuaacggacugacagugcugccuccucugcugaccgaugagaugaucgcccaguacacaucugcccugcuggccggcacaaucacaagcggcuggacauuuggagcaggcgccgcucugcagauccccuuugcuaugcagauggccuaccgguucaacggcaucggagugacccagaaugugcuguacgagaaccagaagcugaucgccaaccaguucaacagcgccaucggcaagauccaggacagccugagcagcacagcaagcgcccugggaaagcugcaggacguggucaaccagaaugcccaggcacugaacacccuggucaagcagcuguccuccaacuucggcgccaucagcucugugcugaacgauauccugagcagacuggacaaggucgaggccgaggugcagaucgacagacugaucacaggcagacugcagagccuccagacauacgugacccagcagcugaucagagccgccgagauuagagccucugccaaucuggccgccaccaagaugucugagugugugcugggccagagcaagagaguggacuuuugcggcaagggcuaccaccugaugagcuucccucagucugccccucacggcgugguguuucugcacgugacauaugugcccgcucaagagaagaauuucaccaccgcuccagccaucugccacgacggcaaagcccacuuuccuagagaaggcguguucguguccaacggcacccauugguucgugacacagcggaacuucuacgagccccagaucaucaccaccgacaacaccuucgugucuggcaacugcgacgucgugaucggcauugugaacaauaccguguacgacccucugcagcccgagcuggacagcuucaaagaggaacuggacaaguacuuuaagaaccacacaagccccgacguggaccugggcgauaucagcggaaucaaugccagcgucgugaacauccagaaagagaucgaccggcugaacgagguggccaagaaucugaacgagagccugaucgaccugcaagaacuggggaaguacgagcaguacaucaaguggcccugguacaucuggcugggcuuuaucgccggacugauugccaucgugauggucacaaucaugcuguguugcaugaccagcugcuguagcugccugaagggcuguuguagcuguggcagcugcugcaaguucgacgaggacgauucugagcccgugcugaagggcgugaaacugcacuacacaugauaauaggcuggagccucgguggccuagcuucuugccccuugggccuccccccagccccuccuccccuuccugcacccguacccccguggucuuugaauaaagucugagugggcggcaaaaaaaaaaaaaaaaaaaaaaaaaaaaaaaaaaaaaaaaaaaaaaaaaaaaaaaaaaaaaaaaaaaaaaaaaaaaaaaaaaaaaaaaaaaaaaaaaaaa

SEQ ID NO: 26144 - RNA, 4095 nt, Artificial Sequence
  SARS-CoV-2/Wuhan/WIV05/2019__EPI_ISL_402128 spike protein mRNA gc mod (1-1273)(N501Y_D614G)
gggaaauaagagagaaaagaagaguaagaagaaauauaagaccccggcgccgccaccauguucguguuccuggugcugcugccucugguguccagccagugugugaaccugaccaccagaacacagcugccuccagccuacaccaacagcuuuaccagaggcguguacuaccccgacaagguguucagauccagcgugcugcacucuacccaggaccuguuccugccuuucuucagcaacgugaccugguuccacgccauccacguguccggcaccaauggcaccaagagauucgacaaccccgugcugcccuucaacgacgggguguacuuugccagcaccgagaaguccaacaucaucagaggcuggaucuucggcaccacacuggacagcaagacccagagccugcugaucgugaacaacgccaccaacguggucaucaaagugugcgaguuccaguucugcaacgaccccuuccugggcgucuacuaccacaagaacaacaagagcuggauggaaagcgaguuccggguguacagcagcgccaacaacugcaccuucgaguacgugucccagccuuuccugauggaccuggaaggcaagcagggcaacuucaagaaccugcgcgaguucguguuuaagaacaucgacggcuacuucaagaucuacagcaagcacaccccuaucaaccucgugcgggaucugccucagggcuucucugcucuggaaccccugguggaucugcccaucggcaucaacaucacccgguuucagacacugcuggcccugcacagaagcuaccugacaccuggcgauagcagcagcggauggacagcuggugccgccgcuuacuaugugggcuaccugcagccuagaaccuuccugcugaaguacaacgagaacggcaccaucaccgacgccguggauugugcucuggauccucugagcgagacaaagugcacccugaaguccuucaccguggaaaagggcaucuaccagaccagcaacuuccgggugcagcccaccgaauccaucgugcgguuccccaauaucaccaaucugugccccuucggcgagguguucaaugccaccagauucgccucuguguacgccuggaaccggaagcggaucagcaauugcguggccgacuacuccgugcuguacaacuccgccagcuucagcaccuucaagugcuacggcguguccccuaccaagcugaacgaccugugcuucacaaacguguacgccgacagcuucgugauccggggagaugaagugcggcagauugccccuggacagacaggcaagaucgccgacuacaacuacaagcugcccgacgacuucaccggcugugugauugccuggaacagcaacaaccuggacuccaaagucggcggcaacuacaauuaccuguaccggcuguuccggaaguccaaucugaagcccuucgagcgggacaucuccaccgagaucuaucaggccggcagcaccccuuguaacggcguggaaggcuucaacugcuacuucccacugcaguccuacggcuuucagcccacauacggcgugggcuaucagcccuacagagugguggugcugagcuucgaacugcugcaugccccugccacagugugcggcccuaagaaaagcaccaaucucgugaagaacaaaugcgugaacuucaacuucaacggccugaccggcaccggcgugcugacagagagcaacaagaaguuccugccauuccagcaguuuggccgggauaucgccgauaccacagacgccguuagagauccccagacacuggaaauccuggacaucaccccuugcagcuucggcggagugucugugaucaccccuggcaccaacaccagcaaucagguggcagugcuguaccagggcgugaacuguaccgaagugcccguggccauucacgccgaucagcugacaccuacauggcggguguacuccaccggcagcaauguguuucagaccagagccggcugucugaucggagccgagcacgugaacaauagcuacgagugcgacauccccaucggcgcuggaaucugcgccagcuaccagacacagacaaacagcccucggagagccagaagcguggccagccagagcaucauugccuacacaaugucucugggcgccgagaacagcguggccuacuccaacaacucuaucgcuauccccaccaacuucaccaucagcgugaccacagagauccugccuguguccaugaccaagaccagcguggacugcaccauguacaucugcggcgauuccaccgagugcuccaaccugcugcugcaguacggcagcuucugcacccagcugaauagagcccugacagggaucgccguggaacaggacaagaacacccaagagguguucgcccaagugaagcagaucuacaagaccccuccuaucaaggacuucggcggcuucaauuucagccagauucugcccgauccuagcaagcccagcaagcggagcuucaucgaggaccugcuguucaacaaagugacacuggccgacgccggcuucaucaagcaguauggcgauugucugggcgacauugccgccagggaucugauuugcgcccagaaguuuaacggacugacagugcugccuccucugcugaccgaugagaugaucgcccaguacacaucugcccugcuggccggcacaaucacaagcggcuggacauuuggagcaggcgccgcucugcagauccccuuugcuaugcagauggccuaccgguucaacggcaucggagugacccagaaugugcuguacgagaaccagaagcugaucgccaaccaguucaacagcgccaucggcaagauccaggacagccugagcagcacagcaagcgcccugggaaagcugcaggacguggucaaccagaaugcccaggcacugaacacccuggucaagcagcuguccuccaacuucggcgccaucagcucugugcugaacgauauccugagcagacuggacaaggucgaggccgaggugcagaucgacagacugaucacaggcagacugcagagccuccagacauacgugacccagcagcugaucagagccgccgagauuagagccucugccaaucuggccgccaccaagaugucugagugugugcugggccagagcaagagaguggacuuuugcggcaagggcuaccaccugaugagcuucccucagucugccccucacggcgugguguuucugcacgugacauaugugcccgcucaagagaagaauuucaccaccgcuccagccaucugccacgacggcaaagcccacuuuccuagagaaggcguguucguguccaacggcacccauugguucgugacacagcggaacuucuacgagccccagaucaucaccaccgacaacaccuucgugucuggcaacugcgacgucgugaucggcauugugaacaauaccguguacgacccucugcagcccgagcuggacagcuucaaagaggaacuggacaaguacuuuaagaaccacacaagccccgacguggaccugggcgauaucagcggaaucaaugccagcgucgugaacauccagaaagagaucgaccggcugaacgagguggccaagaaucugaacgagagccugaucgaccugcaagaacuggggaaguacgagcaguacaucaaguggcccugguacaucuggcugggcuuuaucgccggacugauugccaucgugauggucacaaucaugcuguguugcaugaccagcugcuguagcugccugaagggcuguuguagcuguggcagcugcugcaaguucgacgaggacgauucugagcccgugcugaagggcgugaaacugcacuacacaugauaauaggcuggagccucgguggccuagcuucuugccccuugggccuccccccagccccuccuccccuuccugcacccguacccccguggucuuugaauaaagucugagugggcggcaaaaaaaaaaaaaaaaaaaaaaaaaaaaaaaaaaaaaaaaaaaaaaaaaaaaaaaaaaaaaaaaaaaaaaaaaaaaaaaaaaaaaaaaaaaaaaaaaaaa

SEQ ID NO: 26145 - RNA, 4089 nt, Artificial Sequence
  SARS-CoV-2/Wuhan/WIV05/2019__EPI_ISL_402128 spike protein mRNA gc mod (1-1273)(H69del_V70del_D614G)
gggaaauaagagagaaaagaagaguaagaagaaauauaagaccccggcgccgccaccauguucguguuccuggugcugcugccucugguguccagccagugugugaaccugaccaccagaacacagcugccuccagccuacaccaacagcuuuaccagaggcguguacuaccccgacaagguguucagauccagcgugcugcacucuacccaggaccuguuccugccuuucuucagcaacgugaccugguuccacgccaucuccggcaccaauggcaccaagagauucgacaaccccgugcugcccuucaacgacgggguguacuuugccagcaccgagaaguccaacaucaucagaggcuggaucuucggcaccacacuggacagcaagacccagagccugcugaucgugaacaacgccaccaacguggucaucaaagugugcgaguuccaguucugcaacgaccccuuccugggcgucuacuaccacaagaacaacaagagcuggauggaaagcgaguuccggguguacagcagcgccaacaacugcaccuucgaguacgugucccagccuuuccugauggaccuggaaggcaagcagggcaacuucaagaaccugcgcgaguucguguuuaagaacaucgacggcuacuucaagaucuacagcaagcacaccccuaucaaccucgugcgggaucugccucagggcuucucugcucuggaaccccugguggaucugcccaucggcaucaacaucacccgguuucagacacugcuggcccugcacagaagcuaccugacaccuggcgauagcagcagcggauggacagcuggugccgccgcuuacuaugugggcuaccugcagccuagaaccuuccugcugaaguacaacgagaacggcaccaucaccgacgccguggauugugcucuggauccucugagcgagacaaagugcacccugaaguccuucaccguggaaaagggcaucuaccagaccagcaacuuccgggugcagcccaccgaauccaucgugcgguuccccaauaucaccaaucugugccccuucggcgagguguucaaugccaccagauucgccucuguguacgccuggaaccggaagcggaucagcaauugcguggccgacuacuccgugcuguacaacuccgccagcuucagcaccuucaagugcuacggcguguccccuaccaagcugaacgaccugugcuucacaaacguguacgccgacagcuucgugauccggggagaugaagugcggcagauugccccuggacagacaggcaagaucgccgacuacaacuacaagcugcccgacgacuucaccggcugugugauugccuggaacagcaacaaccuggacuccaaagucggcggcaacuacaauuaccuguaccggcuguuccggaaguccaaucugaagcccuucgagcgggacaucuccaccgagaucuaucaggccggcagcaccccuuguaacggcguggaaggcuucaacugcuacuucccacugcaguccuacggcuuucagcccacaaauggcgugggcuaucagcccuacagagugguggugcugagcuucgaacugcugcaugccccugccacagugugcggcccuaagaaaagcaccaaucucgugaagaacaaaugcgugaacuucaacuucaacggccugaccggcaccggcgugcugacagagagcaacaagaaguuccugccauuccagcaguuuggccgggauaucgccgauaccacagacgccguuagagauccccagacacuggaaauccuggacaucaccccuugcagcuucggcggagugucugugaucaccccuggcaccaacaccagcaaucagguggcagugcuguaccagggcgugaacuguaccgaagugcccguggccauucacgccgaucagcugacaccuacauggcggguguacuccaccggcagcaauguguuucagaccagagccggcugucugaucggagccgagcacgugaacaauagcuacgagugcgacauccccaucggcgcuggaaucugcgccagcuaccagacacagacaaacagcccucggagagccagaagcguggccagccagagcaucauugccuacacaaugucucugggcgccgagaacagcguggccuacuccaacaacucuaucgcuauccccaccaacuucaccaucagcgugaccacagagauccugccuguguccaugaccaagaccagcguggacugcaccauguacaucugcggcgauuccaccgagugcuccaaccugcugcugcaguacggcagcuucugcacccagcugaauagagcccugacagggaucgccguggaacaggacaagaacacccaagagguguucgcccaagugaagcagaucuacaagaccccuccuaucaaggacuucggcggcuucaauuucagccagauucugcccgauccuagcaagcccagcaagcggagcuucaucgaggaccugcuguucaacaaagugacacuggccgacgccggcuucaucaagcaguauggcgauugucugggcgacauugccgccagggaucugauuugcgcccagaaguuuaacggacugacagugcugccuccucugcugaccgaugagaugaucgcccaguacacaucugcccugcuggccggcacaaucacaagcggcuggacauuuggagcaggcgccgcucugcagauccccuuugcuaugcagauggccuaccgguucaacggcaucggagugacccagaaugugcuguacgagaaccagaagcugaucgccaaccaguucaacagcgccaucggcaagauccaggacagccugagcagcacagcaagcgcccugggaaagcugcaggacguggucaaccagaaugcccaggcacugaacacccuggucaagcagcuguccuccaacuucggcgccaucagcucugugcugaacgauauccugagcagacuggacaaggucgaggccgaggugcagaucgacagacugaucacaggcagacugcagagccuccagacauacgugacccagcagcugaucagagccgccgagauuagagccucugccaaucuggccgccaccaagaugucugagugugugcugggccagagcaagagaguggacuuuugcggcaagggcuaccaccugaugagcuucccucagucugccccucacggcgugguguuucugcacgugacauaugugcccgcucaagagaagaauuucaccaccgcuccagccaucugccacgacggcaaagcccacuuuccuagagaaggcguguucguguccaacggcacccauugguucgugacacagcggaacuucuacgagccccagaucaucaccaccgacaacaccuucgugucuggcaacugcgacgucgugaucggcauugugaacaauaccguguacgacccucugcagcccgagcuggacagcuucaaagaggaacuggacaaguacuuuaagaaccacacaagccccgacguggaccugggcgauaucagcggaaucaaugccagcgucgugaacauccagaaagagaucgaccggcugaacgagguggccaagaaucugaacgagagccugaucgaccugcaagaacuggggaaguacgagcaguacaucaaguggcccugguacaucuggcugggcuuuaucgccggacugauugccaucgugauggucacaaucaugcuguguugcaugaccagcugcuguagcugccugaagggcuguuguagcuguggcagcugcugcaaguucgacgaggacgauucugagcccgugcugaagggcgugaaacugcacuacacaugauaauaggcuggagccucgguggccuagcuucuugccccuugggccuccccccagccccuccuccccuuccugcacccguacccccguggucuuugaauaaagucugagugggcggcaaaaaaaaaaaaaaaaaaaaaaaaaaaaaaaaaaaaaaaaaaaaaaaaaaaaaaaaaaaaaaaaaaaaaaaaaaaaaaaaaaaaaaaaaaaaaaaaaaaa

SEQ ID NO: 26146 - RNA, 4095 nt, Artificial Sequence
  SARS-CoV-2/Wuhan/WIV05/2019__EPI_ISL_402128 spike protein mRNA gc mod (1-1273)(Y453F_D614G)
gggaaauaagagagaaaagaagaguaagaagaaauauaagaccccggcgccgccaccauguucguguuccuggugcugcugccucugguguccagccagugugugaaccugaccaccagaacacagcugccuccagccuacaccaacagcuuuaccagaggcguguacuaccccgacaagguguucagauccagcgugcugcacucuacccaggaccuguuccugccuuucuucagcaacgugaccugguuccacgccauccacguguccggcaccaauggcaccaagagauucgacaaccccgugcugcccuucaacgacgggguguacuuugccagcaccgagaaguccaacaucaucagaggcuggaucuucggcaccacacuggacagcaagacccagagccugcugaucgugaacaacgccaccaacguggucaucaaagugugcgaguuccaguucugcaacgaccccuuccugggcgucuacuaccacaagaacaacaagagcuggauggaaagcgaguuccggguguacagcagcgccaacaacugcaccuucgaguacgugucccagccuuuccugauggaccuggaaggcaagcagggcaacuucaagaaccugcgcgaguucguguuuaagaacaucgacggcuacuucaagaucuacagcaagcacaccccuaucaaccucgugcgggaucugccucagggcuucucugcucuggaaccccugguggaucugcccaucggcaucaacaucacccgguuucagacacugcuggcccugcacagaagcuaccugacaccuggcgauagcagcagcggauggacagcuggugccgccgcuuacuaugugggcuaccugcagccuagaaccuuccugcugaaguacaacgagaacggcaccaucaccgacgccguggauugugcucuggauccucugagcgagacaaagugcacccugaaguccuucaccguggaaaagggcaucuaccagaccagcaacuuccgggugcagcccaccgaauccaucgugcgguuccccaauaucaccaaucugugccccuucggcgagguguucaaugccaccagauucgccucuguguacgccuggaaccggaagcggaucagcaauugcguggccgacuacuccgugcuguacaacuccgccagcuucagcaccuucaagugcuacggcguguccccuaccaagcugaacgaccugugcuucacaaacguguacgccgacagcuucgugauccggggagaugaagugcggcagauugccccuggacagacaggcaagaucgccgacuacaacuacaagcugcccgacgacuucaccggcugugugauugccuggaacagcaacaaccuggacuccaaagucggcggcaacuacaauuaccuguuccggcuguuccggaaguccaaucugaagcccuucgagcgggacaucuccaccgagaucuaucaggccggcagcaccccuuguaacggcguggaaggcuucaacugcuacuucccacugcaguccuacggcuuucagcccacaaauggcgugggcuaucagcccuacagagugguggugcugagcuucgaacugcugcaugccccugccacagugugcggcccuaagaaaagcaccaaucucgugaagaacaaaugcgugaacuucaacuucaacggccugaccggcaccggcgugcugacagagagcaacaagaaguuccugccauuccagcaguuuggccgggauaucgccgauaccacagacgccguuagagauccccagacacuggaaauccuggacaucaccccuugcagcuucggcggagugucugugaucaccccuggcaccaacaccagcaaucagguggcagugcuguaccagggcgugaacuguaccgaagugcccguggccauucacgccgaucagcugacaccuacauggcggguguacuccaccggcagcaauguguuucagaccagagccggcugucugaucggagccgagcacgugaacaauagcuacgagugcgacauccccaucggcgcuggaaucugcgccagcuaccagacacagacaaacagcccucggagagccagaagcguggccagccagagcaucauugccuacacaaugucucugggcgccgagaacagcguggccuacuccaacaacucuaucgcuauccccaccaacuucaccaucagcgugaccacagagauccugccuguguccaugaccaagaccagcguggacugcaccauguacaucugcggcgauuccaccgagugcuccaaccugcugcugcaguacggcagcuucugcacccagcugaauagagcccugacagggaucgccguggaacaggacaagaacacccaagagguguucgcccaagugaagcagaucuacaagaccccuccuaucaaggacuucggcggcuucaauuucagccagauucugcccgauccuagcaagcccagcaagcggagcuucaucgaggaccugcuguucaacaaagugacacuggccgacgccggcuucaucaagcaguauggcgauugucugggcgacauugccgccagggaucugauuugcgcccagaaguuuaacggacugacagugcugccuccucugcugaccgaugagaugaucgcccaguacacaucugcccugcuggccggcacaaucacaagcggcuggacauuuggagcaggcgccgcucugcagauccccuuugcuaugcagauggccuaccgguucaacggcaucggagugacccagaaugugcuguacgagaaccagaagcugaucgccaaccaguucaacagcgccaucggcaagauccaggacagccugagcagcacagcaagcgcccugggaaagcugcaggacguggucaaccagaaugcccaggcacugaacacccuggucaagcagcuguccuccaacuucggcgccaucagcucugugcugaacgauauccugagcagacuggacaaggucgaggccgaggugcagaucgacagacugaucacaggcagacugcagagccuccagacauacgugacccagcagcugaucagagccgccgagauuagagccucugccaaucuggccgccaccaagaugucugagugugugcugggccagagcaagagaguggacuuuugcggcaagggcuaccaccugaugagcuucccucagucugccccucacggcgugguguuucugcacgugacauaugugcccgcucaagagaagaauuucaccaccgcuccagccaucugccacgacggcaaagcccacuuuccuagagaaggcguguucguguccaacggcacccauugguucgugacacagcggaacuucuacgagccccagaucaucaccaccgacaacaccuucgugucuggcaacugcgacgucgugaucggcauugugaacaauaccguguacgacccucugcagcccgagcuggacagcuucaaagaggaacuggacaaguacuuuaagaaccacacaagccccgacguggaccugggcgauaucagcggaaucaaugccagcgucgugaacauccagaaagagaucgaccggcugaacgagguggccaagaaucugaacgagagccugaucgaccugcaagaacuggggaaguacgagcaguacaucaaguggcccugguacaucuggcugggcuuuaucgccggacugauugccaucgugauggucacaaucaugcuguguugcaugaccagcugcuguagcugccugaagggcuguuguagcuguggcagcugcugcaaguucgacgaggacgauucugagcccgugcugaagggcgugaaacugcacuacacaugauaauaggcuggagccucgguggccuagcuucuugccccuugggccuccccccagccccuccuccccuuccugcacccguacccccguggucuuugaauaaagucugagugggcggcaaaaaaaaaaaaaaaaaaaaaaaaaaaaaaaaaaaaaaaaaaaaaaaaaaaaaaaaaaaaaaaaaaaaaaaaaaaaaaaaaaaaaaaaaaaaaaaaaaaa

SEQ ID NO: 26147 - RNA, 4095 nt, Artificial Sequence
  SARS-CoV-2/Wuhan/WIV05/2019__EPI_ISL_402128 spike protein mRNA gc mod (1-1273)(D614G_I692V)
gggaaauaagagagaaaagaagaguaagaagaaauauaagaccccggcgccgccaccauguucguguuccuggugcugcugccucugguguccagccagugugugaaccugaccaccagaacacagcugccuccagccuacaccaacagcuuuaccagaggcguguacuaccccgacaagguguucagauccagcgugcugcacucuacccaggaccuguuccugccuuucuucagcaacgugaccugguuccacgccauccacguguccggcaccaauggcaccaagagauucgacaaccccgugcugcccuucaacgacgggguguacuuugccagcaccgagaaguccaacaucaucagaggcuggaucuucggcaccacacuggacagcaagacccagagccugcugaucgugaacaacgccaccaacguggucaucaaagugugcgaguuccaguucugcaacgaccccuuccugggcgucuacuaccacaagaacaacaagagcuggauggaaagcgaguuccggguguacagcagcgccaacaacugcaccuucgaguacgugucccagccuuuccugauggaccuggaaggcaagcagggcaacuucaagaaccugcgcgaguucguguuuaagaacaucgacggcuacuucaagaucuacagcaagcacaccccuaucaaccucgugcgggaucugccucagggcuucucugcucuggaaccccugguggaucugcccaucggcaucaacaucacccgguuucagacacugcuggcccugcacagaagcuaccugacaccuggcgauagcagcagcggauggacagcuggugccgccgcuuacuaugugggcuaccugcagccuagaaccuuccugcugaaguacaacgagaacggcaccaucaccgacgccguggauugugcucuggauccucugagcgagacaaagugcacccugaaguccuucaccguggaaaagggcaucuaccagaccagcaacuuccgggugcagcccaccgaauccaucgugcgguuccccaauaucaccaaucugugccccuucggcgagguguucaaugccaccagauucgccucuguguacgccuggaaccggaagcggaucagcaauugcguggccgacuacuccgugcuguacaacuccgccagcuucagcaccuucaagugcuacggcguguccccuaccaagcugaacgaccugugcuucacaaacguguacgccgacagcuucgugauccggggagaugaagugcggcagauugccccuggacagacaggcaagaucgccgacuacaacuacaagcugcccgacgacuucaccggcugugugauugccuggaacagcaacaaccuggacuccaaagucggcggcaacuacaauuaccuguaccggcuguuccggaaguccaaucugaagcccuucgagcgggacaucuccaccgagaucuaucaggccggcagcaccccuuguaacggcguggaaggcuucaacugcuacuucccacugcaguccuacggcuuucagcccacaaauggcgugggcuaucagcccuacagagugguggugcugagcuucgaacugcugcaugccccugccacagugugcggcccuaagaaaagcaccaaucucgugaagaacaaaugcgugaacuucaacuucaacggccugaccggcaccggcgugcugacagagagcaacaagaaguuccugccauuccagcaguuuggccgggauaucgccgauaccacagacgccguuagagauccccagacacuggaaauccuggacaucaccccuugcagcuucggcggagugucugugaucaccccuggcaccaacaccagcaaucagguggcagugcuguaccagggcgugaacuguaccgaagugcccguggccauucacgccgaucagcugacaccuacauggcggguguacuccaccggcagcaauguguuucagaccagagccggcugucugaucggagccgagcacgugaacaauagcuacgagugcgacauccccaucggcgcuggaaucugcgccagcuaccagacacagacaaacagcccucggagagccagaagcguggccagccagagcgugauugccuacacaaugucucugggcgccgagaacagcguggccuacuccaacaacucuaucgcuauccccaccaacuucaccaucagcgugaccacagagauccugccuguguccaugaccaagaccagcguggacugcaccauguacaucugcggcgauuccaccgagugcuccaaccugcugcugcaguacggcagcuucugcacccagcugaauagagcccugacagggaucgccguggaacaggacaagaacacccaagagguguucgcccaagugaagcagaucuacaagaccccuccuaucaaggacuucggcggcuucaauuucagccagauucugcccgauccuagcaagcccagcaagcggagcuucaucgaggaccugcuguucaacaaagugacacuggccgacgccggcuucaucaagcaguauggcgauugucugggcgacauugccgccagggaucugauuugcgcccagaaguuuaacggacugacagugcugccuccucugcugaccgaugagaugaucgcccaguacacaucugcccugcuggccggcacaaucacaagcggcuggacauuuggagcaggcgccgcucugcagauccccuuugcuaugcagauggccuaccgguucaacggcaucggagugacccagaaugugcuguacgagaaccagaagcugaucgccaaccaguucaacagcgccaucggcaagauccaggacagccugagcagcacagcaagcgcccugggaaagcugcaggacguggucaaccagaaugcccaggcacugaacacccuggucaagcagcuguccuccaacuucggcgccaucagcucugugcugaacgauauccugagcagacuggacaaggucgaggccgaggugcagaucgacagacugaucacaggcagacugcagagccuccagacauacgugacccagcagcugaucagagccgccgagauuagagccucugccaaucuggccgccaccaagaugucugagugugugcugggccagagcaagagaguggacuuuugcggcaagggcuaccaccugaugagcuucccucagucugccccucacggcgugguguuucugcacgugacauaugugcccgcucaagagaagaauuucaccaccgcuccagccaucugccacgacggcaaagcccacuuuccuagagaaggcguguucguguccaacggcacccauugguucgugacacagcggaacuucuacgagccccagaucaucaccaccgacaacaccuucgugucuggcaacugcgacgucgugaucggcauugugaacaauaccguguacgacccucugcagcccgagcuggacagcuucaaagaggaacuggacaaguacuuuaagaaccacacaagccccgacguggaccugggcgauaucagcggaaucaaugccagcgucgugaacauccagaaagagaucgaccggcugaacgagguggccaagaaucugaacgagagccugaucgaccugcaagaacuggggaaguacgagcaguacaucaaguggcccugguacaucuggcugggcuuuaucgccggacugauugccaucgugauggucacaaucaugcuguguugcaugaccagcugcuguagcugccugaagggcuguuguagcuguggcagcugcugcaaguucgacgaggacgauucugagcccgugcugaagggcgugaaacugcacuacacaugauaauaggcuggagccucgguggccuagcuucuugccccuugggccuccccccagccccuccuccccuuccugcacccguacccccguggucuuugaauaaagucugagugggcggcaaaaaaaaaaaaaaaaaaaaaaaaaaaaaaaaaaaaaaaaaaaaaaaaaaaaaaaaaaaaaaaaaaaaaaaaaaaaaaaaaaaaaaaaaaaaaaaaaaaa

SEQ ID NO: 26148 - RNA, 4095 nt, Artificial Sequence
  SARS-CoV-2/Wuhan/WIV05/2019__EPI_ISL_402128 spike protein mRNA gc mod (1-1273)(D614G_M1229I)
gggaaauaagagagaaaagaagaguaagaagaaauauaagaccccggcgccgccaccauguucguguuccuggugcugcugccucugguguccagccagugugugaaccugaccaccagaacacagcugccuccagccuacaccaacagcuuuaccagaggcguguacuaccccgacaagguguucagauccagcgugcugcacucuacccaggaccuguuccugccuuucuucagcaacgugaccugguuccacgccauccacguguccggcaccaauggcaccaagagauucgacaaccccgugcugcccuucaacgacgggguguacuuugccagcaccgagaaguccaacaucaucagaggcuggaucuucggcaccacacuggacagcaagacccagagccugcugaucgugaacaacgccaccaacguggucaucaaagugugcgaguuccaguucugcaacgaccccuuccugggcgucuacuaccacaagaacaacaagagcuggauggaaagcgaguuccggguguacagcagcgccaacaacugcaccuucgaguacgugucccagccuuuccugauggaccuggaaggcaagcagggcaacuucaagaaccugcgcgaguucguguuuaagaacaucgacggcuacuucaagaucuacagcaagcacaccccuaucaaccucgugcgggaucugccucagggcuucucugcucuggaaccccugguggaucugcccaucggcaucaacaucacccgguuucagacacugcuggcccugcacagaagcuaccugacaccuggcgauagcagcagcggauggacagcuggugccgccgcuuacuaugugggcuaccugcagccuagaaccuuccugcugaaguacaacgagaacggcaccaucaccgacgccguggauugugcucuggauccucugagcgagacaaagugcacccugaaguccuucaccguggaaaagggcaucuaccagaccagcaacuuccgggugcagcccaccgaauccaucgugcgguuccccaauaucaccaaucugugccccuucggcgagguguucaaugccaccagauucgccucuguguacgccuggaaccggaagcggaucagcaauugcguggccgacuacuccgugcuguacaacuccgccagcuucagcaccuucaagugcuacggcguguccccuaccaagcugaacgaccugugcuucacaaacguguacgccgacagcuucgugauccggggagaugaagugcggcagauugccccuggacagacaggcaagaucgccgacuacaacuacaagcugcccgacgacuucaccggcugugugauugccuggaacagcaacaaccuggacuccaaagucggcggcaacuacaauuaccuguaccggcuguuccggaaguccaaucugaagcccuucgagcgggacaucuccaccgagaucuaucaggccggcagcaccccuuguaacggcguggaaggcuucaacugcuacuucccacugcaguccuacggcuuucagcccacaaauggcgugggcuaucagcccuacagagugguggugcugagcuucgaacugcugcaugccccugccacagugugcggcccuaagaaaagcaccaaucucgugaagaacaaaugcgugaacuucaacuucaacggccugaccggcaccggcgugcugacagagagcaacaagaaguuccugccauuccagcaguuuggccgggauaucgccgauaccacagacgccguuagagauccccagacacuggaaauccuggacaucaccccuugcagcuucggcggagugucugugaucaccccuggcaccaacaccagcaaucagguggcagugcuguaccagggcgugaacuguaccgaagugcccguggccauucacgccgaucagcugacaccuacauggcggguguacuccaccggcagcaauguguuucagaccagagccggcugucugaucggagccgagcacgugaacaauagcuacgagugcgacauccccaucggcgcuggaaucugcgccagcuaccagacacagacaaacagcccucggagagccagaagcguggccagccagagcaucauugccuacacaaugucucugggcgccgagaacagcguggccuacuccaacaacucuaucgcuauccccaccaacuucaccaucagcgugaccacagagauccugccuguguccaugaccaagaccagcguggacugcaccauguacaucugcggcgauuccaccgagugcuccaaccugcugcugcaguacggcagcuucugcacccagcugaauagagcccugacagggaucgccguggaacaggacaagaacacccaagagguguucgcccaagugaagcagaucuacaagaccccuccuaucaaggacuucggcggcuucaauuucagccagauucugcccgauccuagcaagcccagcaagcggagcuucaucgaggaccugcuguucaacaaagugacacuggccgacgccggcuucaucaagcaguauggcgauugucugggcgacauugccgccagggaucugauuugcgcccagaaguuuaacggacugacagugcugccuccucugcugaccgaugagaugaucgcccaguacacaucugcccugcuggccggcacaaucacaagcggcuggacauuuggagcaggcgccgcucugcagauccccuuugcuaugcagauggccuaccgguucaacggcaucggagugacccagaaugugcuguacgagaaccagaagcugaucgccaaccaguucaacagcgccaucggcaagauccaggacagccugagcagcacagcaagcgcccugggaaagcugcaggacguggucaaccagaaugcccaggcacugaacacccuggucaagcagcuguccuccaacuucggcgccaucagcucugugcugaacgauauccugagcagacuggacaaggucgaggccgaggugcagaucgacagacugaucacaggcagacugcagagccuccagacauacgugacccagcagcugaucagagccgccgagauuagagccucugccaaucuggccgccaccaagaugucugagugugugcugggccagagcaagagaguggacuuuugcggcaagggcuaccaccugaugagcuucccucagucugccccucacggcgugguguuucugcacgugacauaugugcccgcucaagagaagaauuucaccaccgcuccagccaucugccacgacggcaaagcccacuuuccuagagaaggcguguucguguccaacggcacccauugguucgugacacagcggaacuucuacgagccccagaucaucaccaccgacaacaccuucgugucuggcaacugcgacgucgugaucggcauugugaacaauaccguguacgacccucugcagcccgagcuggacagcuucaaagaggaacuggacaaguacuuuaagaaccacacaagccccgacguggaccugggcgauaucagcggaaucaaugccagcgucgugaacauccagaaagagaucgaccggcugaacgagguggccaagaaucugaacgagagccugaucgaccugcaagaacuggggaaguacgagcaguacaucaaguggcccugguacaucuggcugggcuuuaucgccggacugauugccaucgugaucgucacaaucaugcuguguugcaugaccagcugcuguagcugccugaagggcuguuguagcuguggcagcugcugcaaguucgacgaggacgauucugagcccgugcugaagggcgugaaacugcacuacacaugauaauaggcuggagccucgguggccuagcuucuugccccuugggccuccccccagccccuccuccccuuccugcacccguacccccguggucuuugaauaaagucugagugggcggcaaaaaaaaaaaaaaaaaaaaaaaaaaaaaaaaaaaaaaaaaaaaaaaaaaaaaaaaaaaaaaaaaaaaaaaaaaaaaaaaaaaaaaaaaaaaaaaaaaaa

SEQ ID NO: 26149 - RNA, 4089 nt, Artificial Sequence
  SARS-CoV-2/Wuhan/WIV05/2019__EPI_ISL_402128 spike protein mRNA gc mod (1-1273)(H69del_V70del_A222V_Y453F_S477N_D614G_I692V)
gggaaauaagagagaaaagaagaguaagaagaaauauaagaccccggcgccgccaccauguucguguuccuggugcugcugccucugguguccagccagugugugaaccugaccaccagaacacagcugccuccagccuacaccaacagcuuuaccagaggcguguacuaccccgacaagguguucagauccagcgugcugcacucuacccaggaccuguuccugccuuucuucagcaacgugaccugguuccacgccaucuccggcaccaauggcaccaagagauucgacaaccccgugcugcccuucaacgacgggguguacuuugccagcaccgagaaguccaacaucaucagaggcuggaucuucggcaccacacuggacagcaagacccagagccugcugaucgugaacaacgccaccaacguggucaucaaagugugcgaguuccaguucugcaacgaccccuuccugggcgucuacuaccacaagaacaacaagagcuggauggaaagcgaguuccggguguacagcagcgccaacaacugcaccuucgaguacgugucccagccuuuccugauggaccuggaaggcaagcagggcaacuucaagaaccugcgcgaguucguguuuaagaacaucgacggcuacuucaagaucuacagcaagcacaccccuaucaaccucgugcgggaucugccucagggcuucucugugcuggaaccccugguggaucugcccaucggcaucaacaucacccgguuucagacacugcuggcccugcacagaagcuaccugacaccuggcgauagcagcagcggauggacagcuggugccgccgcuuacuaugugggcuaccugcagccuagaaccuuccugcugaaguacaacgagaacggcaccaucaccgacgccguggauugugcucuggauccucugagcgagacaaagugcacccugaaguccuucaccguggaaaagggcaucuaccagaccagcaacuuccgggugcagcccaccgaauccaucgugcgguuccccaauaucaccaaucugugccccuucggcgagguguucaaugccaccagauucgccucuguguacgccuggaaccggaagcggaucagcaauugcguggccgacuacuccgugcuguacaacuccgccagcuucagcaccuucaagugcuacggcguguccccuaccaagcugaacgaccugugcuucacaaacguguacgccgacagcuucgugauccggggagaugaagugcggcagauugccccuggacagacaggcaagaucgccgacuacaacuacaagcugcccgacgacuucaccggcugugugauugccuggaacagcaacaaccuggacuccaaagucggcggcaacuacaauuaccuguuccggcuguuccggaaguccaaucugaagcccuucgagcgggacaucuccaccgagaucuaucaggccggcaacaccccuuguaacggcguggaaggcuucaacugcuacuucccacugcaguccuacggcuuucagcccacaaauggcgugggcuaucagcccuacagagugguggugcugagcuucgaacugcugcaugccccugccacagugugcggcccuaagaaaagcaccaaucucgugaagaacaaaugcgugaacuucaacuucaacggccugaccggcaccggcgugcugacagagagcaacaagaaguuccugccauuccagcaguuuggccgggauaucgccgauaccacagacgccguuagagauccccagacacuggaaauccuggacaucaccccuugcagcuucggcggagugucugugaucaccccuggcaccaacaccagcaaucagguggcagugcuguaccagggcgugaacuguaccgaagugcccguggccauucacgccgaucagcugacaccuacauggcggguguacuccaccggcagcaauguguuucagaccagagccggcugucugaucggagccgagcacgugaacaauagcuacgagugcgacauccccaucggcgcuggaaucugcgccagcuaccagacacagacaaacagcccucggagagccagaagcguggccagccagagcgugauugccuacacaaugucucugggcgccgagaacagcguggccuacuccaacaacucuaucgcuauccccaccaacuucaccaucagcgugaccacagagauccugccuguguccaugaccaagaccagcguggacugcaccauguacaucugcggcgauuccaccgagugcuccaaccugcugcugcaguacggcagcuucugcacccagcugaauagagcccugacagggaucgccguggaacaggacaagaacacccaagagguguucgcccaagugaagcagaucuacaagaccccuccuaucaaggacuucggcggcuucaauuucagccagauucugcccgauccuagcaagcccagcaagcggagcuucaucgaggaccugcuguucaacaaagugacacuggccgacgccggcuucaucaagcaguauggcgauugucugggcgacauugccgccagggaucugauuugcgcccagaaguuuaacggacugacagugcugccuccucugcugaccgaugagaugaucgcccaguacacaucugcccugcuggccggcacaaucacaagcggcuggacauuuggagcaggcgccgcucugcagauccccuuugcuaugcagauggccuaccgguucaacggcaucggagugacccagaaugugcuguacgagaaccagaagcugaucgccaaccaguucaacagcgccaucggcaagauccaggacagccugagcagcacagcaagcgcccugggaaagcugcaggacguggucaaccagaaugcccaggcacugaacacccuggucaagcagcuguccuccaacuucggcgccaucagcucugugcugaacgauauccugagcagacuggacaaggucgaggccgaggugcagaucgacagacugaucacaggcagacugcagagccuccagacauacgugacccagcagcugaucagagccgccgagauuagagccucugccaaucuggccgccaccaagaugucugagugugugcugggccagagcaagagaguggacuuuugcggcaagggcuaccaccugaugagcuucccucagucugccccucacggcgugguguuucugcacgugacauaugugcccgcucaagagaagaauuucaccaccgcuccagccaucugccacgacggcaaagcccacuuuccuagagaaggcguguucguguccaacggcacccauugguucgugacacagcggaacuucuacgagccccagaucaucaccaccgacaacaccuucgugucuggcaacugcgacgucgugaucggcauugugaacaauaccguguacgacccucugcagcccgagcuggacagcuucaaagaggaacuggacaaguacuuuaagaaccacacaagccccgacguggaccugggcgauaucagcggaaucaaugccagcgucgugaacauccagaaagagaucgaccggcugaacgagguggccaagaaucugaacgagagccugaucgaccugcaagaacuggggaaguacgagcaguacaucaaguggcccugguacaucuggcugggcuuuaucgccggacugauugccaucgugauggucacaaucaugcuguguugcaugaccagcugcuguagcugccugaagggcuguuguagcuguggcagcugcugcaaguucgacgaggacgauucugagcccgugcugaagggcgugaaacugcacuacacaugauaauaggcuggagccucgguggccuagcuucuugccccuugggccuccccccagccccuccuccccuuccugcacccguacccccguggucuuugaauaaagucugagugggcggcaaaaaaaaaaaaaaaaaaaaaaaaaaaaaaaaaaaaaaaaaaaaaaaaaaaaaaaaaaaaaaaaaaaaaaaaaaaaaaaaaaaaaaaaaaaaaaaaaaaa

SEQ ID NO: 26150 - RNA, 4089 nt, Artificial Sequence
  SARS-CoV-2/Wuhan/WIV05/2019__EPI_ISL_402128 spike protein mRNA gc mod (1-1273)(H69del_V70del_Y453F_D614G_I692V_M1229I)
gggaaauaagagagaaaagaagaguaagaagaaauauaagaccccggcgccgccaccauguucguguuccuggugcugcugccucugguguccagccagugugugaaccugaccaccagaacacagcugccuccagccuacaccaacagcuuuaccagaggcguguacuaccccgacaagguguucagauccagcgugcugcacucuacccaggaccuguuccugccuuucuucagcaacgugaccugguuccacgccaucuccggcaccaauggcaccaagagauucgacaaccccgugcugcccuucaacgacgggguguacuuugccagcaccgagaaguccaacaucaucagaggcuggaucuucggcaccacacuggacagcaagacccagagccugcugaucgugaacaacgccaccaacguggucaucaaagugugcgaguuccaguucugcaacgaccccuuccugggcgucuacuaccacaagaacaacaagagcuggauggaaagcgaguuccggguguacagcagcgccaacaacugcaccuucgaguacgugucccagccuuuccugauggaccuggaaggcaagcagggcaacuucaagaaccugcgcgaguucguguuuaagaacaucgacggcuacuucaagaucuacagcaagcacaccccuaucaaccucgugcgggaucugccucagggcuucucugcucuggaaccccugguggaucugcccaucggcaucaacaucacccgguuucagacacugcuggcccugcacagaagcuaccugacaccuggcgauagcagcagcggauggacagcuggugccgccgcuuacuaugugggcuaccugcagccuagaaccuuccugcugaaguacaacgagaacggcaccaucaccgacgccguggauugugcucuggauccucugagcgagacaaagugcacccugaaguccuucaccguggaaaagggcaucuaccagaccagcaacuuccgggugcagcccaccgaauccaucgugcgguuccccaauaucaccaaucugugccccuucggcgagguguucaaugccaccagauucgccucuguguacgccuggaaccggaagcggaucagcaauugcguggccgacuacuccgugcuguacaacuccgccagcuucagcaccuucaagugcuacggcguguccccuaccaagcugaacgaccugugcuucacaaacguguacgccgacagcuucgugauccggggagaugaagugcggcagauugccccuggacagacaggcaagaucgccgacuacaacuacaagcugcccgacgacuucaccggcugugugauugccuggaacagcaacaaccuggacuccaaagucggcggcaacuacaauuaccuguuccggcuguuccggaaguccaaucugaagcccuucgagcgggacaucuccaccgagaucuaucaggccggcagcaccccuuguaacggcguggaaggcuucaacugcuacuucccacugcaguccuacggcuuucagcccacaaauggcgugggcuaucagcccuacagagugguggugcugagcuucgaacugcugcaugccccugccacagugugcggcccuaagaaaagcaccaaucucgugaagaacaaaugcgugaacuucaacuucaacggccugaccggcaccggcgugcugacagagagcaacaagaaguuccugccauuccagcaguuuggccgggauaucgccgauaccacagacgccguuagagauccccagacacuggaaauccuggacaucaccccuugcagcuucggcggagugucugugaucaccccuggcaccaacaccagcaaucagguggcagugcuguaccagggcgugaacuguaccgaagugcccguggccauucacgccgaucagcugacaccuacauggcggguguacuccaccggcagcaauguguuucagaccagagccggcugucugaucggagccgagcacgugaacaauagcuacgagugcgacauccccaucggcgcuggaaucugcgccagcuaccagacacagacaaacagcccucggagagccagaagcguggccagccagagcgugauugccuacacaaugucucugggcgccgagaacagcguggccuacuccaacaacucuaucgcuauccccaccaacuucaccaucagcgugaccacagagauccugccuguguccaugaccaagaccagcguggacugcaccauguacaucugcggcgauuccaccgagugcuccaaccugcugcugcaguacggcagcuucugcacccagcugaauagagcccugacagggaucgccguggaacaggacaagaacacccaagagguguucgcccaagugaagcagaucuacaagaccccuccuaucaaggacuucggcggcuucaauuucagccagauucugcccgauccuagcaagcccagcaagcggagcuucaucgaggaccugcuguucaacaaagugacacuggccgacgccggcuucaucaagcaguauggcgauugucugggcgacauugccgccagggaucugauuugcgcccagaaguuuaacggacugacagugcugccuccucugcugaccgaugagaugaucgcccaguacacaucugcccugcuggccggcacaaucacaagcggcuggacauuuggagcaggcgccgcucugcagauccccuuugcuaugcagauggccuaccgguucaacggcaucggagugacccagaaugugcuguacgagaaccagaagcugaucgccaaccaguucaacagcgccaucggcaagauccaggacagccugagcagcacagcaagcgcccugggaaagcugcaggacguggucaaccagaaugcccaggcacugaacacccuggucaagcagcuguccuccaacuucggcgccaucagcucugugcugaacgauauccugagcagacuggacaaggucgaggccgaggugcagaucgacagacugaucacaggcagacugcagagccuccagacauacgugacccagcagcugaucagagccgccgagauuagagccucugccaaucuggccgccaccaagaugucugagugugugcugggccagagcaagagaguggacuuuugcggcaagggcuaccaccugaugagcuucccucagucugccccucacggcgugguguuucugcacgugacauaugugcccgcucaagagaagaauuucaccaccgcuccagccaucugccacgacggcaaagcccacuuuccuagagaaggcguguucguguccaacggcacccauugguucgugacacagcggaacuucuacgagccccagaucaucaccaccgacaacaccuucgugucuggcaacugcgacgucgugaucggcauugugaacaauaccguguacgacccucugcagcccgagcuggacagcuucaaagaggaacuggacaaguacuuuaagaaccacacaagccccgacguggaccugggcgauaucagcggaaucaaugccagcgucgugaacauccagaaagagaucgaccggcugaacgagguggccaagaaucugaacgagagccugaucgaccugcaagaacuggggaaguacgagcaguacaucaaguggcccugguacaucuggcugggcuuuaucgccggacugauugccaucgugaucgucacaaucaugcuguguugcaugaccagcugcuguagcugccugaagggcuguuguagcuguggcagcugcugcaaguucgacgaggacgauucugagcccgugcugaagggcgugaaacugcacuacacaugauaauaggcuggagccucgguggccuagcuucuugccccuugggccuccccccagccccuccuccccuuccugcacccguacccccguggucuuugaauaaagucugagugggcggcaaaaaaaaaaaaaaaaaaaaaaaaaaaaaaaaaaaaaaaaaaaaaaaaaaaaaaaaaaaaaaaaaaaaaaaaaaaaaaaaaaaaaaaaaaaaaaaaaaaa

SEQ ID NO: 26151 - RNA, 4086 nt, Artificial Sequence
  SARS-CoV-2/Wuhan/WIV05/2019__EPI_ISL_402128 spike protein mRNA gc mod (1-1273)(H69del_V70del_Y144del_N501Y_A570D_D614G_P681H_T716I_S982 A_D1118H)
gggaaauaagagagaaaagaagaguaagaagaaauauaagaccccggcgccgccaccauguucguguuccuggugcugcugccucugguguccagccagugugugaaccugaccaccagaacacagcugccuccagccuacaccaacagcuuuaccagaggcguguacuaccccgacaagguguucagauccagcgugcugcacucuacccaggaccuguuccugccuuucuucagcaacgugaccugguuccacgccaucuccggcaccaauggcaccaagagauucgacaaccccgugcugcccuucaacgacgggguguacuuugccagcaccgagaaguccaacaucaucagaggcuggaucuucggcaccacacuggacagcaagacccagagccugcugaucgugaacaacgccaccaacguggucaucaaagugugcgaguuccaguucugcaacgaccccuuccugggcgucuaccacaagaacaacaagagcuggauggaaagcgaguuccggguguacagcagcgccaacaacugcaccuucgaguacgugucccagccuuuccugauggaccuggaaggcaagcagggcaacuucaagaaccugcgcgaguucguguuuaagaacaucgacggcuacuucaagaucuacagcaagcacaccccuaucaaccucgugcgggaucugccucagggcuucucugcucuggaaccccugguggaucugcccaucggcaucaacaucacccgguuucagacacugcuggcccugcacagaagcuaccugacaccuggcgauagcagcagcggauggacagcuggugccgccgcuuacuaugugggcuaccugcagccuagaaccuuccugcugaaguacaacgagaacggcaccaucaccgacgccguggauugugcucuggauccucugagcgagacaaagugcacccugaaguccuucaccguggaaaagggcaucuaccagaccagcaacuuccgggugcagcccaccgaauccaucgugcgguuccccaauaucaccaaucugugccccuucggcgagguguucaaugccaccagauucgccucuguguacgccuggaaccggaagcggaucagcaauugcguggccgacuacuccgugcuguacaacuccgccagcuucagcaccuucaagugcuacggcguguccccuaccaagcugaacgaccugugcuucacaaacguguacgccgacagcuucgugauccggggagaugaagugcggcagauugccccuggacagacaggcaagaucgccgacuacaacuacaagcugcccgacgacuucaccggcugugugauugccuggaacagcaacaaccuggacuccaaagucggcggcaacuacaauuaccuguaccggcuguuccggaaguccaaucugaagcccuucgagcgggacaucuccaccgagaucuaucaggccggcagcaccccuuguaacggcguggaaggcuucaacugcuacuucccacugcaguccuacggcuuucagcccacauacggcgugggcuaucagcccuacagagugguggugcugagcuucgaacugcugcaugccccugccacagugugcggcccuaagaaaagcaccaaucucgugaagaacaaaugcgugaacuucaacuucaacggccugaccggcaccggcgugcugacagagagcaacaagaaguuccugccauuccagcaguuuggccgggauaucgacgauaccacagacgccguuagagauccccagacacuggaaauccuggacaucaccccuugcagcuucggcggagugucugugaucaccccuggcaccaacaccagcaaucagguggcagugcuguaccagggcgugaacuguaccgaagugcccguggccauucacgccgaucagcugacaccuacauggcggguguacuccaccggcagcaauguguuucagaccagagccggcugucugaucggagccgagcacgugaacaauagcuacgagugcgacauccccaucggcgcuggaaucugcgccagcuaccagacacagacaaacagccaccggagagccagaagcguggccagccagagcaucauugccuacacaaugucucugggcgccgagaacagcguggccuacuccaacaacucuaucgcuauccccaucaacuucaccaucagcgugaccacagagauccugccuguguccaugaccaagaccagcguggacugcaccauguacaucugcggcgauuccaccgagugcuccaaccugcugcugcaguacggcagcuucugcacccagcugaauagagcccugacagggaucgccguggaacaggacaagaacacccaagagguguucgcccaagugaagcagaucuacaagaccccuccuaucaaggacuucggcggcuucaauuucagccagauucugcccgauccuagcaagcccagcaagcggagcuucaucgaggaccugcuguucaacaaagugacacuggccgacgccggcuucaucaagcaguauggcgauugucugggcgacauugccgccagggaucugauuugcgcccagaaguuuaacggacugacagugcugccuccucugcugaccgaugagaugaucgcccaguacacaucugcccugcuggccggcacaaucacaagcggcuggacauuuggagcaggcgccgcucugcagauccccuuugcuaugcagauggccuaccgguucaacggcaucggagugacccagaaugugcuguacgagaaccagaagcugaucgccaaccaguucaacagcgccaucggcaagauccaggacagccugagcagcacagcaagcgcccugggaaagcugcaggacguggucaaccagaaugcccaggcacugaacacccuggucaagcagcuguccuccaacuucggcgccaucagcucugugcugaacgauauccuggccagacuggacaaggucgaggccgaggugcagaucgacagacugaucacaggcagacugcagagccuccagacauacgugacccagcagcugaucagagccgccgagauuagagccucugccaaucuggccgccaccaagaugucugagugugugcugggccagagcaagagaguggacuuuugcggcaagggcuaccaccugaugagcuucccucagucugccccucacggcgugguguuucugcacgugacauaugugcccgcucaagagaagaauuucaccaccgcuccagccaucugccacgacggcaaagcccacuuuccuagagaaggcguguucguguccaacggcacccauugguucgugacacagcggaacuucuacgagccccagaucaucaccacccacaacaccuucgugucuggcaacugcgacgucgugaucggcauugugaacaauaccguguacgacccucugcagcccgagcuggacagcuucaaagaggaacuggacaaguacuuuaagaaccacacaagccccgacguggaccugggcgauaucagcggaaucaaugccagcgucgugaacauccagaaagagaucgaccggcugaacgagguggccaagaaucugaacgagagccugaucgaccugcaagaacuggggaaguacgagcaguacaucaaguggcccugguacaucuggcugggcuuuaucgccggacugauugccaucgugauggucacaaucaugcuguguugcaugaccagcugcuguagcugccugaagggcuguuguagcuguggcagcugcugcaaguucgacgaggacgauucugagcccgugcugaagggcgugaaacugcacuacacaugauaauaggcuggagccucgguggccuagcuucuugccccuugggccuccccccagccccuccuccccuuccugcacccguacccccguggucuuugaauaaagucugagugggcggcaaaaaaaaaaaaaaaaaaaaaaaaaaaaaaaaaaaaaaaaaaaaaaaaaaaaaaaaaaaaaaaaaaaaaaaaaaaaaaaaaaaaaaaaaaaaaaaaaaaa

SEQ ID NO: 26152 - RNA, 4095 nt, Artificial Sequence
  SARS-CoV-2/Wuhan/WIV05/2019__EPI_ISL_402128 spike protein mRNA gc mod (1-1273)(K417N_E484K_N501Y_D614G)
gggaaauaagagagaaaagaagaguaagaagaaauauaagaccccggcgccgccaccauguucguguuccuggugcugcugccucugguguccagccagugugugaaccugaccaccagaacacagcugccuccagccuacaccaacagcuuuaccagaggcguguacuaccccgacaagguguucagauccagcgugcugcacucuacccaggaccuguuccugccuuucuucagcaacgugaccugguuccacgccauccacguguccggcaccaauggcaccaagagauucgacaaccccgugcugcccuucaacgacgggguguacuuugccagcaccgagaaguccaacaucaucagaggcuggaucuucggcaccacacuggacagcaagacccagagccugcugaucgugaacaacgccaccaacguggucaucaaagugugcgaguuccaguucugcaacgaccccuuccugggcgucuacuaccacaagaacaacaagagcuggauggaaagcgaguuccggguguacagcagcgccaacaacugcaccuucgaguacgugucccagccuuuccugauggaccuggaaggcaagcagggcaacuucaagaaccugcgcgaguucguguuuaagaacaucgacggcuacuucaagaucuacagcaagcacaccccuaucaaccucgugcgggaucugccucagggcuucucugcucuggaaccccugguggaucugcccaucggcaucaacaucacccgguuucagacacugcuggcccugcacagaagcuaccugacaccuggcgauagcagcagcggauggacagcuggugccgccgcuuacuaugugggcuaccugcagccuagaaccuuccugcugaaguacaacgagaacggcaccaucaccgacgccguggauugugcucuggauccucugagcgagacaaagugcacccugaaguccuucaccguggaaaagggcaucuaccagaccagcaacuuccgggugcagcccaccgaauccaucgugcgguuccccaauaucaccaaucugugccccuucggcgagguguucaaugccaccagauucgccucuguguacgccuggaaccggaagcggaucagcaauugcguggccgacuacuccgugcuguacaacuccgccagcuucagcaccuucaagugcuacggcguguccccuaccaagcugaacgaccugugcuucacaaacguguacgccgacagcuucgugauccggggagaugaagugcggcagauugccccuggacagacaggcaacaucgccgacuacaacuacaagcugcccgacgacuucaccggcugugugauugccuggaacagcaacaaccuggacuccaaagucggcggcaacuacaauuaccuguaccggcuguuccggaaguccaaucugaagcccuucgagcgggacaucuccaccgagaucuaucaggccggcagcaccccuuguaacggcgugaagggcuucaacugcuacuucccacugcaguccuacggcuuucagcccacauacggcgugggcuaucagcccuacagagugguggugcugagcuucgaacugcugcaugccccugccacagugugcggcccuaagaaaagcaccaaucucgugaagaacaaaugcgugaacuucaacuucaacggccugaccggcaccggcgugcugacagagagcaacaagaaguuccugccauuccagcaguuuggccgggauaucgccgauaccacagacgccguuagagauccccagacacuggaaauccuggacaucaccccuugcagcuucggcggagugucugugaucaccccuggcaccaacaccagcaaucagguggcagugcuguaccagggcgugaacuguaccgaagugcccguggccauucacgccgaucagcugacaccuacauggcggguguacuccaccggcagcaauguguuucagaccagagccggcugucugaucggagccgagcacgugaacaauagcuacgagugcgacauccccaucggcgcuggaaucugcgccagcuaccagacacagacaaacagcccucggagagccagaagcguggccagccagagcaucauugccuacacaaugucucugggcgccgagaacagcguggccuacuccaacaacucuaucgcuauccccaccaacuucaccaucagcgugaccacagagauccugccuguguccaugaccaagaccagcguggacugcaccauguacaucugcggcgauuccaccgagugcuccaaccugcugcugcaguacggcagcuucugcacccagcugaauagagcccugacagggaucgccguggaacaggacaagaacacccaagagguguucgcccaagugaagcagaucuacaagaccccuccuaucaaggacuucggcggcuucaauuucagccagauucugcccgauccuagcaagcccagcaagcggagcuucaucgaggaccugcuguucaacaaagugacacuggccgacgccggcuucaucaagcaguauggcgauugucugggcgacauugccgccagggaucugauuugcgcccagaaguuuaacggacugacagugcugccuccucugcugaccgaugagaugaucgcccaguacacaucugcccugcuggccggcacaaucacaagcggcuggacauuuggagcaggcgccgcucugcagauccccuuugcuaugcagauggccuaccgguucaacggcaucggagugacccagaaugugcuguacgagaaccagaagcugaucgccaaccaguucaacagcgccaucggcaagauccaggacagccugagcagcacagcaagcgcccugggaaagcugcaggacguggucaaccagaaugcccaggcacugaacacccuggucaagcagcuguccuccaacuucggcgccaucagcucugugcugaacgauauccugagcagacuggacaaggucgaggccgaggugcagaucgacagacugaucacaggcagacugcagagccuccagacauacgugacccagcagcugaucagagccgccgagauuagagccucugccaaucuggccgccaccaagaugucugagugugugcugggccagagcaagagaguggacuuuugcggcaagggcuaccaccugaugagcuucccucagucugccccucacggcgugguguuucugcacgugacauaugugcccgcucaagagaagaauuucaccaccgcuccagccaucugccacgacggcaaagcccacuuuccuagagaaggcguguucguguccaacggcacccauugguucgugacacagcggaacuucuacgagccccagaucaucaccaccgacaacaccuucgugucuggcaacugcgacgucgugaucggcauugugaacaauaccguguacgacccucugcagcccgagcuggacagcuucaaagaggaacuggacaaguacuuuaagaaccacacaagccccgacguggaccugggcgauaucagcggaaucaaugccagcgucgugaacauccagaaagagaucgaccggcugaacgagguggccaagaaucugaacgagagccugaucgaccugcaagaacuggggaaguacgagcaguacaucaaguggcccugguacaucuggcugggcuuuaucgccggacugauugccaucgugauggucacaaucaugcuguguugcaugaccagcugcuguagcugccugaagggcuguuguagcuguggcagcugcugcaaguucgacgaggacgauucugagcccgugcugaagggcgugaaacugcacuacacaugauaauaggcuggagccucgguggccuagcuucuugccccuugggccuccccccagccccuccuccccuuccugcacccguacccccguggucuuugaauaaagucugagugggcggcaaaaaaaaaaaaaaaaaaaaaaaaaaaaaaaaaaaaaaaaaaaaaaaaaaaaaaaaaaaaaaaaaaaaaaaaaaaaaaaaaaaaaaaaaaaaaaaaaaaa

SEQ ID NO: 26153 - RNA, 4086 nt, Artificial Sequence
  SARS-CoV-2/Wuhan/WIV05/2019__EPI_ISL_402128 spike protein mRNA gc mod (1-1273)(L18F_D80A_D215G_L242del_A243del_L244del_R246I_K417N_E484 K_N501Y_D614G_A701V)
gggaaauaagagagaaaagaagaguaagaagaaauauaagaccccggcgccgccaccauguucguguuccuggugcugcugccucugguguccagccagugugugaacuucaccaccagaacacagcugccuccagccuacaccaacagcuuuaccagaggcguguacuaccccgacaagguguucagauccagcgugcugcacucuacccaggaccuguuccugccuuucuucagcaacgugaccugguuccacgccauccacguguccggcaccaauggcaccaagagauucgccaaccccgugcugcccuucaacgacgggguguacuuugccagcaccgagaaguccaacaucaucagaggcuggaucuucggcaccacacuggacagcaagacccagagccugcugaucgugaacaacgccaccaacguggucaucaaagugugcgaguuccaguucugcaacgaccccuuccugggcgucuacuaccacaagaacaacaagagcuggauggaaagcgaguuccggguguacagcagcgccaacaacugcaccuucgaguacgugucccagccuuuccugauggaccuggaaggcaagcagggcaacuucaagaaccugcgcgaguucguguuuaagaacaucgacggcuacuucaagaucuacagcaagcacaccccuaucaaccucgugcggggccugccucagggcuucucugcucuggaaccccugguggaucugcccaucggcaucaacaucacccgguuucagacacugcacaucagcuaccugacaccuggcgauagcagcagcggauggacagcuggugccgccgcuuacuaugugggcuaccugcagccuagaaccuuccugcugaaguacaacgagaacggcaccaucaccgacgccguggauugugcucuggauccucugagcgagacaaagugcacccugaaguccuucaccguggaaaagggcaucuaccagaccagcaacuuccgggugcagcccaccgaauccaucgugcgguuccccaauaucaccaaucugugccccuucggcgagguguucaaugccaccagauucgccucuguguacgccuggaaccggaagcggaucagcaauugcguggccgacuacuccgugcuguacaacuccgccagcuucagcaccuucaagugcuacggcguguccccuaccaagcugaacgaccugugcuucacaaacguguacgccgacagcuucgugauccggggagaugaagugcggcagauugccccuggacagacaggcaacaucgccgacuacaacuacaagcugcccgacgacuucaccggcugugugauugccuggaacagcaacaaccuggacuccaaagucggcggcaacuacaauuaccuguaccggcuguuccggaaguccaaucugaagcccuucgagcgggacaucuccaccgagaucuaucaggccggcagcaccccuuguaacggcgugaagggcuucaacugcuacuucccacugcaguccuacggcuuucagcccacauacggcgugggcuaucagcccuacagagugguggugcugagcuucgaacugcugcaugccccugccacagugugcggcccuaagaaaagcaccaaucucgugaagaacaaaugcgugaacuucaacuucaacggccugaccggcaccggcgugcugacagagagcaacaagaaguuccugccauuccagcaguuuggccgggauaucgccgauaccacagacgccguuagagauccccagacacuggaaauccuggacaucaccccuugcagcuucggcggagugucugugaucaccccuggcaccaacaccagcaaucagguggcagugcuguaccagggcgugaacuguaccgaagugcccguggccauucacgccgaucagcugacaccuacauggcggguguacuccaccggcagcaauguguuucagaccagagccggcugucugaucggagccgagcacgugaacaauagcuacgagugcgacauccccaucggcgcuggaaucugcgccagcuaccagacacagacaaacagcccucggagagccagaagcguggccagccagagcaucauugccuacacaaugucucugggcguggagaacagcguggccuacuccaacaacucuaucgcuauccccaccaacuucaccaucagcgugaccacagagauccugccuguguccaugaccaagaccagcguggacugcaccauguacaucugcggcgauuccaccgagugcuccaaccugcugcugcaguacggcagcuucugcacccagcugaauagagcccugacagggaucgccguggaacaggacaagaacacccaagagguguucgcccaagugaagcagaucuacaagaccccuccuaucaaggacuucggcggcuucaauuucagccagauucugcccgauccuagcaagcccagcaagcggagcuucaucgaggaccugcuguucaacaaagugacacuggccgacgccggcuucaucaagcaguauggcgauugucugggcgacauugccgccagggaucugauuugcgcccagaaguuuaacggacugacagugcugccuccucugcugaccgaugagaugaucgcccaguacacaucugcccugcuggccggcacaaucacaagcggcuggacauuuggagcaggcgccgcucugcagauccccuuugcuaugcagauggccuaccgguucaacggcaucggagugacccagaaugugcuguacgagaaccagaagcugaucgccaaccaguucaacagcgccaucggcaagauccaggacagccugagcagcacagcaagcgcccugggaaagcugcaggacguggucaaccagaaugcccaggcacugaacacccuggucaagcagcuguccuccaacuucggcgccaucagcucugugcugaacgauauccugagcagacuggacaaggucgaggccgaggugcagaucgacagacugaucacaggcagacugcagagccuccagacauacgugacccagcagcugaucagagccgccgagauuagagccucugccaaucuggccgccaccaagaugucugagugugugcugggccagagcaagagaguggacuuuugcggcaagggcuaccaccugaugagcuucccucagucugccccucacggcgugguguuucugcacgugacauaugugcccgcucaagagaagaauuucaccaccgcuccagccaucugccacgacggcaaagcccacuuuccuagagaaggcguguucguguccaacggcacccauugguucgugacacagcggaacuucuacgagccccagaucaucaccaccgacaacaccuucgugucuggcaacugcgacgucgugaucggcauugugaacaauaccguguacgacccucugcagcccgagcuggacagcuucaaagaggaacuggacaaguacuuuaagaaccacacaagccccgacguggaccugggcgauaucagcggaaucaaugccagcgucgugaacauccagaaagagaucgaccggcugaacgagguggccaagaaucugaacgagagccugaucgaccugcaagaacuggggaaguacgagcaguacaucaaguggcccugguacaucuggcugggcuuuaucgccggacugauugccaucgugauggucacaaucaugcuguguugcaugaccagcugcuguagcugccugaagggcuguuguagcuguggcagcugcugcaaguucgacgaggacgauucugagcccgugcugaagggcgugaaacugcacuacacaugauaauaggcuggagccucgguggccuagcuucuugccccuugggccuccccccagccccuccuccccuuccugcacccguacccccguggucuuugaauaaagucugagugggcggcaaaaaaaaaaaaaaaaaaaaaaaaaaaaaaaaaaaaaaaaaaaaaaaaaaaaaaaaaaaaaaaaaaaaaaaaaaaaaaaaaaaaaaaaaaaaaaaaaaaa

SEQ ID NO: 26154 - RNA, 4095 nt, Artificial Sequence
  SARS-CoV-2/Wuhan/WIV05/2019__EPI_ISL_402128 spike protein mRNA gc mod (1-1273)(E484K_D614G)
gggaaauaagagagaaaagaagaguaagaagaaauauaagaccccggcgccgccaccauguucguguuccuggugcugcugccucugguguccagccagugugugaaccugaccaccagaacacagcugccuccagccuacaccaacagcuuuaccagaggcguguacuaccccgacaagguguucagauccagcgugcugcacucuacccaggaccuguuccugccuuucuucagcaacgugaccugguuccacgccauccacguguccggcaccaauggcaccaagagauucgacaaccccgugcugcccuucaacgacgggguguacuuugccagcaccgagaaguccaacaucaucagaggcuggaucuucggcaccacacuggacagcaagacccagagccugcugaucgugaacaacgccaccaacguggucaucaaagugugcgaguuccaguucugcaacgaccccuuccugggcgucuacuaccacaagaacaacaagagcuggauggaaagcgaguuccggguguacagcagcgccaacaacugcaccuucgaguacgugucccagccuuuccugauggaccuggaaggcaagcagggcaacuucaagaaccugcgcgaguucguguuuaagaacaucgacggcuacuucaagaucuacagcaagcacaccccuaucaaccucgugcgggaucugccucagggcuucucugcucuggaaccccugguggaucugcccaucggcaucaacaucacccgguuucagacacugcuggcccugcacagaagcuaccugacaccuggcgauagcagcagcggauggacagcuggugccgccgcuuacuaugugggcuaccugcagccuagaaccuuccugcugaaguacaacgagaacggcaccaucaccgacgccguggauugugcucuggauccucugagcgagacaaagugcacccugaaguccuucaccguggaaaagggcaucuaccagaccagcaacuuccgggugcagcccaccgaauccaucgugcgguuccccaauaucaccaaucugugccccuucggcgagguguucaaugccaccagauucgccucuguguacgccuggaaccggaagcggaucagcaauugcguggccgacuacuccgugcuguacaacuccgccagcuucagcaccuucaagugcuacggcguguccccuaccaagcugaacgaccugugcuucacaaacguguacgccgacagcuucgugauccggggagaugaagugcggcagauugccccuggacagacaggcaagaucgccgacuacaacuacaagcugcccgacgacuucaccggcugugugauugccuggaacagcaacaaccuggacuccaaagucggcggcaacuacaauuaccuguaccggcuguuccggaaguccaaucugaagcccuucgagcgggacaucuccaccgagaucuaucaggccggcagcaccccuuguaacggcgugaagggcuucaacugcuacuucccacugcaguccuacggcuuucagcccacaaauggcgugggcuaucagcccuacagagugguggugcugagcuucgaacugcugcaugccccugccacagugugcggcccuaagaaaagcaccaaucucgugaagaacaaaugcgugaacuucaacuucaacggccugaccggcaccggcgugcugacagagagcaacaagaaguuccugccauuccagcaguuuggccgggauaucgccgauaccacagacgccguuagagauccccagacacuggaaauccuggacaucaccccuugcagcuucggcggagugucugugaucaccccuggcaccaacaccagcaaucagguggcagugcuguaccagggcgugaacuguaccgaagugcccguggccauucacgccgaucagcugacaccuacauggcggguguacuccaccggcagcaauguguuucagaccagagccggcugucugaucggagccgagcacgugaacaauagcuacgagugcgacauccccaucggcgcuggaaucugcgccagcuaccagacacagacaaacagcccucggagagccagaagcguggccagccagagcaucauugccuacacaaugucucugggcgccgagaacagcguggccuacuccaacaacucuaucgcuauccccaccaacuucaccaucagcgugaccacagagauccugccuguguccaugaccaagaccagcguggacugcaccauguacaucugcggcgauuccaccgagugcuccaaccugcugcugcaguacggcagcuucugcacccagcugaauagagcccugacagggaucgccguggaacaggacaagaacacccaagagguguucgcccaagugaagcagaucuacaagaccccuccuaucaaggacuucggcggcuucaauuucagccagauucugcccgauccuagcaagcccagcaagcggagcuucaucgaggaccugcuguucaacaaagugacacuggccgacgccggcuucaucaagcaguauggcgauugucugggcgacauugccgccagggaucugauuugcgcccagaaguuuaacggacugacagugcugccuccucugcugaccgaugagaugaucgcccaguacacaucugcccugcuggccggcacaaucacaagcggcuggacauuuggagcaggcgccgcucugcagauccccuuugcuaugcagauggccuaccgguucaacggcaucggagugacccagaaugugcuguacgagaaccagaagcugaucgccaaccaguucaacagcgccaucggcaagauccaggacagccugagcagcacagcaagcgcccugggaaagcugcaggacguggucaaccagaaugcccaggcacugaacacccuggucaagcagcuguccuccaacuucggcgccaucagcucugugcugaacgauauccugagcagacuggacaaggucgaggccgaggugcagaucgacagacugaucacaggcagacugcagagccuccagacauacgugacccagcagcugaucagagccgccgagauuagagccucugccaaucuggccgccaccaagaugucugagugugugcugggccagagcaagagaguggacuuuugcggcaagggcuaccaccugaugagcuucccucagucugccccucacggcgugguguuucugcacgugacauaugugcccgcucaagagaagaauuucaccaccgcuccagccaucugccacgacggcaaagcccacuuuccuagagaaggcguguucguguccaacggcacccauugguucgugacacagcggaacuucuacgagccccagaucaucaccaccgacaacaccuucgugucuggcaacugcgacgucgugaucggcauugugaacaauaccguguacgacccucugcagcccgagcuggacagcuucaaagaggaacuggacaaguacuuuaagaaccacacaagccccgacguggaccugggcgauaucagcggaaucaaugccagcgucgugaacauccagaaagagaucgaccggcugaacgagguggccaagaaucugaacgagagccugaucgaccugcaagaacuggggaaguacgagcaguacaucaaguggcccugguacaucuggcugggcuuuaucgccggacugauugccaucgugauggucacaaucaugcuguguugcaugaccagcugcuguagcugccugaagggcuguuguagcuguggcagcugcugcaaguucgacgaggacgauucugagcccgugcugaagggcgugaaacugcacuacacaugauaauaggcuggagccucgguggccuagcuucuugccccuugggccuccccccagccccuccuccccuuccugcacccguacccccguggucuuugaauaaagucugagugggcggcaaaaaaaaaaaaaaaaaaaaaaaaaaaaaaaaaaaaaaaaaaaaaaaaaaaaaaaaaaaaaaaaaaaaaaaaaaaaaaaaaaaaaaaaaaaaaaaaaaaa

SEQ ID NO: 26155 - RNA, 4095 nt, Artificial Sequence
  SARS-CoV-2/Wuhan/WIV05/2019__EPI_ISL_402128 spike protein mRNA gc mod (1-1273)(L18F_T20N_P26S_D138Y_R190S_K417T_E484K_N501Y_D614G_H655Y _T1027I)
gggaaauaagagagaaaagaagaguaagaagaaauauaagaccccggcgccgccaccauguucguguuccuggugcugcugccucugguguccagccagugugugaacuucaccaacagaacacagcugccuagcgccuacaccaacagcuuuaccagaggcguguacuaccccgacaagguguucagauccagcgugcugcacucuacccaggaccuguuccugccuuucuucagcaacgugaccugguuccacgccauccacguguccggcaccaauggcaccaagagauucgacaaccccgugcugcccuucaacgacgggguguacuuugccagcaccgagaaguccaacaucaucagaggcuggaucuucggcaccacacuggacagcaagacccagagccugcugaucgugaacaacgccaccaacguggucaucaaagugugcgaguuccaguucugcaacuaccccuuccugggcgucuacuaccacaagaacaacaagagcuggauggaaagcgaguuccggguguacagcagcgccaacaacugcaccuucgaguacgugucccagccuuuccugauggaccuggaaggcaagcagggcaacuucaagaaccugagcgaguucguguuuaagaacaucgacggcuacuucaagaucuacagcaagcacaccccuaucaaccucgugcgggaucugccucagggcuucucugcucuggaaccccugguggaucugcccaucggcaucaacaucacccgguuucagacacugcuggcccugcacagaagcuaccugacaccuggcgauagcagcagcggauggacagcuggugccgccgcuuacuaugugggcuaccugcagccuagaaccuuccugcugaaguacaacgagaacggcaccaucaccgacgccguggauugugcucuggauccucugagcgagacaaagugcacccugaaguccuucaccguggaaaagggcaucuaccagaccagcaacuuccgggugcagcccaccgaauccaucgugcgguuccccaauaucaccaaucugugccccuucggcgagguguucaaugccaccagauucgccucuguguacgccuggaaccggaagcggaucagcaauugcguggccgacuacuccgugcuguacaacuccgccagcuucagcaccuucaagugcuacggcguguccccuaccaagcugaacgaccugugcuucacaaacguguacgccgacagcuucgugauccggggagaugaagugcggcagauugccccuggacagacaggcaccaucgccgacuacaacuacaagcugcccgacgacuucaccggcugugugauugccuggaacagcaacaaccuggacuccaaagucggcggcaacuacaauuaccuguaccggcuguuccggaaguccaaucugaagcccuucgagcgggacaucuccaccgagaucuaucaggccggcagcaccccuuguaacggcgugaagggcuucaacugcuacuucccacugcaguccuacggcuuucagcccacauacggcgugggcuaucagcccuacagagugguggugcugagcuucgaacugcugcaugccccugccacagugugcggcccuaagaaaagcaccaaucucgugaagaacaaaugcgugaacuucaacuucaacggccugaccggcaccggcgugcugacagagagcaacaagaaguuccugccauuccagcaguuuggccgggauaucgccgauaccacagacgccguuagagauccccagacacuggaaauccuggacaucaccccuugcagcuucggcggagugucugugaucaccccuggcaccaacaccagcaaucagguggcagugcuguaccagggcgugaacuguaccgaagugcccguggccauucacgccgaucagcugacaccuacauggcggguguacuccaccggcagcaauguguuucagaccagagccggcugucugaucggagccgaguacgugaacaauagcuacgagugcgacauccccaucggcgcuggaaucugcgccagcuaccagacacagacaaacagcccucggagagccagaagcguggccagccagagcaucauugccuacacaaugucucugggcgccgagaacagcguggccuacuccaacaacucuaucgcuauccccaccaacuucaccaucagcgugaccacagagauccugccuguguccaugaccaagaccagcguggacugcaccauguacaucugcggcgauuccaccgagugcuccaaccugcugcugcaguacggcagcuucugcacccagcugaauagagcccugacagggaucgccguggaacaggacaagaacacccaagagguguucgcccaagugaagcagaucuacaagaccccuccuaucaaggacuucggcggcuucaauuucagccagauucugcccgauccuagcaagcccagcaagcggagcuucaucgaggaccugcuguucaacaaagugacacuggccgacgccggcuucaucaagcaguauggcgauugucugggcgacauugccgccagggaucugauuugcgcccagaaguuuaacggacugacagugcugccuccucugcugaccgaugagaugaucgcccaguacacaucugcccugcuggccggcacaaucacaagcggcuggacauuuggagcaggcgccgcucugcagauccccuuugcuaugcagauggccuaccgguucaacggcaucggagugacccagaaugugcuguacgagaaccagaagcugaucgccaaccaguucaacagcgccaucggcaagauccaggacagccugagcagcacagcaagcgcccugggaaagcugcaggacguggucaaccagaaugcccaggcacugaacacccuggucaagcagcuguccuccaacuucggcgccaucagcucugugcugaacgauauccugagcagacuggacaaggucgaggccgaggugcagaucgacagacugaucacaggcagacugcagagccuccagacauacgugacccagcagcugaucagagccgccgagauuagagccucugccaaucuggccgccaucaagaugucugagugugugcugggccagagcaagagaguggacuuuugcggcaagggcuaccaccugaugagcuucccucagucugccccucacggcgugguguuucugcacgugacauaugugcccgcucaagagaagaauuucaccaccgcuccagccaucugccacgacggcaaagcccacuuuccuagagaaggcguguucguguccaacggcacccauugguucgugacacagcggaacuucuacgagccccagaucaucaccaccgacaacaccuucgugucuggcaacugcgacgucgugaucggcauugugaacaauaccguguacgacccucugcagcccgagcuggacagcuucaaagaggaacuggacaaguacuuuaagaaccacacaagccccgacguggaccugggcgauaucagcggaaucaaugccagcgucgugaacauccagaaagagaucgaccggcugaacgagguggccaagaaucugaacgagagccugaucgaccugcaagaacuggggaaguacgagcaguacaucaaguggcccugguacaucuggcugggcuuuaucgccggacugauugccaucgugauggucacaaucaugcuguguugcaugaccagcugcuguagcugccugaagggcuguuguagcuguggcagcugcugcaaguucgacgaggacgauucugagcccgugcugaagggcgugaaacugcacuacacaugauaauaggcuggagccucgguggccuagcuucuugccccuugggccuccccccagccccuccuccccuuccugcacccguacccccguggucuuugaauaaagucugagugggcggcaaaaaaaaaaaaaaaaaaaaaaaaaaaaaaaaaaaaaaaaaaaaaaaaaaaaaaaaaaaaaaaaaaaaaaaaaaaaaaaaaaaaaaaaaaaaaaaaaaaa

SEQ ID NO: 26156 - RNA, 4095 nt, Artificial Sequence
  SARS-CoV-2/Wuhan/WIV05/2019__EPI_ISL_402128 spike protein mRNA gc mod (1-1273)(S13I_W152C_L452R_D614G)
gggaaauaagagagaaaagaagaguaagaagaaauauaagaccccggcgccgccaccauguucguguuccuggugcugcugccucugguguccauccagugugugaaccugaccaccagaacacagcugccuccagccuacaccaacagcuuuaccagaggcguguacuaccccgacaagguguucagauccagcgugcugcacucuacccaggaccuguuccugccuuucuucagcaacgugaccugguuccacgccauccacguguccggcaccaauggcaccaagagauucgacaaccccgugcugcccuucaacgacgggguguacuuugccagcaccgagaaguccaacaucaucagaggcuggaucuucggcaccacacuggacagcaagacccagagccugcugaucgugaacaacgccaccaacguggucaucaaagugugcgaguuccaguucugcaacgaccccuuccugggcgucuacuaccacaagaacaacaagagcugcauggaaagcgaguuccggguguacagcagcgccaacaacugcaccuucgaguacgugucccagccuuuccugauggaccuggaaggcaagcagggcaacuucaagaaccugcgcgaguucguguuuaagaacaucgacggcuacuucaagaucuacagcaagcacaccccuaucaaccucgugcgggaucugccucagggcuucucugcucuggaaccccugguggaucugcccaucggcaucaacaucacccgguuucagacacugcuggcccugcacagaagcuaccugacaccuggcgauagcagcagcggauggacagcuggugccgccgcuuacuaugugggcuaccugcagccuagaaccuuccugcugaaguacaacgagaacggcaccaucaccgacgccguggauugugcucuggauccucugagcgagacaaagugcacccugaaguccuucaccguggaaaagggcaucuaccagaccagcaacuuccgggugcagcccaccgaauccaucgugcgguuccccaauaucaccaaucugugccccuucggcgagguguucaaugccaccagauucgccucuguguacgccuggaaccggaagcggaucagcaauugcguggccgacuacuccgugcuguacaacuccgccagcuucagcaccuucaagugcuacggcguguccccuaccaagcugaacgaccugugcuucacaaacguguacgccgacagcuucgugauccggggagaugaagugcggcagauugccccuggacagacaggcaagaucgccgacuacaacuacaagcugcccgacgacuucaccggcugugugauugccuggaacagcaacaaccuggacuccaaagucggcggcaacuacaauuaccgcuaccggcuguuccggaaguccaaucugaagcccuucgagcgggacaucuccaccgagaucuaucaggccggcagcaccccuuguaacggcguggaaggcuucaacugcuacuucccacugcaguccuacggcuuucagcccacaaauggcgugggcuaucagcccuacagagugguggugcugagcuucgaacugcugcaugccccugccacagugugcggcccuaagaaaagcaccaaucucgugaagaacaaaugcgugaacuucaacuucaacggccugaccggcaccggcgugcugacagagagcaacaagaaguuccugccauuccagcaguuuggccgggauaucgccgauaccacagacgccguuagagauccccagacacuggaaauccuggacaucaccccuugcagcuucggcggagugucugugaucaccccuggcaccaacaccagcaaucagguggcagugcuguaccagggcgugaacuguaccgaagugcccguggccauucacgccgaucagcugacaccuacauggcggguguacuccaccggcagcaauguguuucagaccagagccggcugucugaucggagccgagcacgugaacaauagcuacgagugcgacauccccaucggcgcuggaaucugcgccagcuaccagacacagacaaacagcccucggagagccagaagcguggccagccagagcaucauugccuacacaaugucucugggcgccgagaacagcguggccuacuccaacaacucuaucgcuauccccaccaacuucaccaucagcgugaccacagagauccugccuguguccaugaccaagaccagcguggacugcaccauguacaucugcggcgauuccaccgagugcuccaaccugcugcugcaguacggcagcuucugcacccagcugaauagagcccugacagggaucgccguggaacaggacaagaacacccaagagguguucgcccaagugaagcagaucuacaagaccccuccuaucaaggacuucggcggcuucaauuucagccagauucugcccgauccuagcaagcccagcaagcggagcuucaucgaggaccugcuguucaacaaagugacacuggccgacgccggcuucaucaagcaguauggcgauugucugggcgacauugccgccagggaucugauuugcgcccagaaguuuaacggacugacagugcugccuccucugcugaccgaugagaugaucgcccaguacacaucugcccugcuggccggcacaaucacaagcggcuggacauuuggagcaggcgccgcucugcagauccccuuugcuaugcagauggccuaccgguucaacggcaucggagugacccagaaugugcuguacgagaaccagaagcugaucgccaaccaguucaacagcgccaucggcaagauccaggacagccugagcagcacagcaagcgcccugggaaagcugcaggacguggucaaccagaaugcccaggcacugaacacccuggucaagcagcuguccuccaacuucggcgccaucagcucugugcugaacgauauccugagcagacuggacaaggucgaggccgaggugcagaucgacagacugaucacaggcagacugcagagccuccagacauacgugacccagcagcugaucagagccgccgagauuagagccucugccaaucuggccgccaccaagaugucugagugugugcugggccagagcaagagaguggacuuuugcggcaagggcuaccaccugaugagcuucccucagucugccccucacggcgugguguuucugcacgugacauaugugcccgcucaagagaagaauuucaccaccgcuccagccaucugccacgacggcaaagcccacuuuccuagagaaggcguguucguguccaacggcacccauugguucgugacacagcggaacuucuacgagccccagaucaucaccaccgacaacaccuucgugucuggcaacugcgacgucgugaucggcauugugaacaauaccguguacgacccucugcagcccgagcuggacagcuucaaagaggaacuggacaaguacuuuaagaaccacacaagccccgacguggaccugggcgauaucagcggaaucaaugccagcgucgugaacauccagaaagagaucgaccggcugaacgagguggccaagaaucugaacgagagccugaucgaccugcaagaacuggggaaguacgagcaguacaucaaguggcccugguacaucuggcugggcuuuaucgccggacugauugccaucgugauggucacaaucaugcuguguugcaugaccagcugcuguagcugccugaagggcuguuguagcuguggcagcugcugcaaguucgacgaggacgauucugagcccgugcugaagggcgugaaacugcacuacacaugauaauaggcuggagccucgguggccuagcuucuugccccuugggccuccccccagccccuccuccccuuccugcacccguacccccguggucuuugaauaaagucugagugggcggcaaaaaaaaaaaaaaaaaaaaaaaaaaaaaaaaaaaaaaaaaaaaaaaaaaaaaaaaaaaaaaaaaaaaaaaaaaaaaaaaaaaaaaaaaaaaaaaaaaaa

SEQ ID NO: 26157 - RNA, 4095 nt, Artificial Sequence
  SARS-CoV-2/Wuhan/WIV05/2019__EPI_ISL_402128 spike protein mRNA gc (1-1273)(K986P_V987P)
gggaaauaagagagaaaagaagaguaagaagaaauauaagaccccggcgccgccaccauguucguguuccugguccuccugccccuggugagcucccagugcgugaaccucaccacccgcacgcagcugccgcccgccuacaccaacagcuucacccggggcgucuacuaccccgacaagguguuccgcuccagcgugcugcacuccacccaggaccucuuccugcccuucuucagcaacgucacgugguuccacgccauccacguguccgggaccaacggcaccaagcgguucgacaacccggugcugcccuucaacgacggggucuacuucgcgagcaccgagaaguccaacaucauccgcggcuggaucuucgggacgacccucgacagcaagacccagucccugcugaucgugaacaacgccaccaacguggucaucaaggugugcgaguuccaguucugcaacgaccccuuccucggcguguacuaccacaagaacaacaagagcuggauggaguccgaguuccgggucuacagcuccgccaacaacugcacguucgaguacgugagccagcccuuccugauggaccuggagggcaagcaggggaacuucaagaaccuccgcgaguucguguucaagaacaucgacggcuacuucaagaucuacuccaagcacaccccgaucaaccugguccgggaccugccccagggguucagcgcccucgagccccugguggaccugcccaucggcaucaacaucacccgcuuccagacccuccuggcccugcaccgguccuaccucacgccgggggacagcagcuccggcuggaccgcgggcgccgccgccuacuacgugggguaccugcagccccgcaccuuccugcucaaguacaacgagaacggcaccaucacggacgcggucgacugcgcccuggacccccugagcgagaccaagugcacccucaaguccuucaccguggagaaggggaucuaccagacgagcaacuuccgggugcagcccaccgaguccaucguccgcuucccgaacaucaccaaccugugccccuucggcgagguguucaacgccacccgguucgccagcgucuacgccuggaaccgcaagcggaucuccaacugcguggcggacuacagcgugcuguacaacuccgccagcuucuccacguucaagugcuacggcgucagccccaccaagcucaacgaccugugcuucaccaacguguacgccgacuccuucgugauccgcggggacgagguccggcagaucgcccccggccagaccgggaagaucgccgacuacaacuacaagcugccggacgacuucacgggcugcgugaucgcguggaacagcaacaaccucgacuccaaggucgggggcaacuacaacuaccuguaccgccuguuccgcaagagcaaccucaagcccuucgagcgggacaucuccaccgagaucuaccaggccggcagcacccccugcaacgggguggagggcuucaacugcuacuucccccugcaguccuacggguuccagccgaccaacggcgugggguaccagcccuaccggguggucgugcugagcuucgagcuccugcacgcccccgccacggugugcggccccaagaaguccaccaaccuggucaagaacaagugcgugaacuucaacuucaacggccucaccgggaccggcgugcugaccgagagcaacaagaaguuccugccguuccagcaguucgggcgcgacaucgccgacacgaccgacgcgguccgcgacccccagacccuggagauccucgacaucacccccugcagcuucggcgggguguccgugaucacgccgggcaccaacaccagcaaccaggucgccgugcuguaccaggacgugaacugcaccgagguccccguggccauccacgccgaccagcugacgcccaccuggcggguguacuccaccggcagcaacgucuuccagacccgcgccgggugccucaucggcgcggagcacgugaacaacuccuacgagugcgacauccccaucggggccggcaucugcgccagcuaccagacgcagaccaacuccccgcggcgcgcccggagcguggcgucccagagcaucaucgccuacaccaugucccugggcgccgagaacagcgucgccuacuccaacaacagcaucgccauccccaccaacuucacgaucuccgugaccaccgagauccugcccgugagcaugaccaagacgagcgucgacugcaccauguacaucugcggggacuccaccgagugcagcaaccuccugcugcaguacggcuccuucugcacccagcucaaccgcgcgcugacggggaucgccguggagcaggacaagaacacccaggagguguucgcccaggucaagcagaucuacaagacgcccccgaucaaggacuucggcggguucaacuucagccagauccugcccgaccccuccaagcccagcaagcgguccuucaucgaggaccuccuguucaacaaggugacccuggccgacgccggcuucaucaagcaguacggcgacugccucggggacaucgcggcccgcgaccugaucugcgcccagaaguucaacggccugaccgugcucccgccccugcugaccgacgagaugaucgcccaguacaccagcgcccuccuggcggggaccaucacguccggcuggaccuucggggccggcgccgcccugcagauccccuucgcgaugcagauggccuaccgguucaacggcaucggggucacccagaacgugcucuacgagaaccagaagcugaucgccaaccaguucaacagcgccaucggcaagauccaggacucccugagcuccaccgccagcgcgcucgggaagcugcaggacguggucaaccagaacgcccaggcccugaacacgcucgugaagcagcuguccagcaacuucggcgccaucuccagcgugcugaacgacauccucucccgccuggacccgcccgaggccgaggugcagaucgaccggcugaucaccgggcgccuccagagccugcagaccuacgugacccagcagcugauccgggcggccgagauccgcgccagcgccaaccucgccgcgaccaagauguccgagugcguccugggccagagcaagcggguggacuucugcggcaagggguaccaccugauguccuucccccagagcgccccgcacggcguggucuuccuccacgugacguacguccccgcccaggagaagaacuucaccaccgcccccgcgaucugccacgacgggaaggcccacuucccccgcgagggcguguucguguccaacgggacccacugguucgucacgcagcggaacuucuacgagccgcagaucaucaccaccgacaacaccuucgugagcggcaacugcgacguggucaucggcaucgugaacaacacgguguacgacccccugcagcccgagcuggacuccuucaaggaggagcucgacaaguacuucaagaaccacaccagccccgacgucgaccugggggacaucuccggcaucaacgccagcguggugaacauccagaaggagaucgaccgccugaacgaggucgccaagaaccucaacgagucccugaucgaccugcaggagcucgggaaguacgagcaguacaucaaguggccgugguacaucuggcugggcuucaucgccggccugaucgcgaucgugauggugaccaucaugcucugcugcaugaccagcugcugcuccugccugaaggggugcugcagcugcggcuccugcugcaaguucgacgaggacgacagcgagcccguccugaagggggugaagcuccacuacacgugauaauaggcuggagccucgguggccuagcuucuugccccuugggccuccccccagccccuccuccccuuccugcacccguacccccguggucuuugaauaaagucugagugggcggcaaaaaaaaaaaaaaaaaaaaaaaaaaaaaaaaaaaaaaaaaaaaaaaaaaaaaaaaaaaaaaaaaaaaaaaaaaaaaaaaaaaaaaaaaaaaaaaaaaaa

SEQ ID NO: 26158 - RNA, 4095 nt, Artificial Sequence
  SARS-CoV-2/Wuhan/WIV05/2019__EPI_ISL_402128 spike protein mRNA gc (1-1273)(K986P_V987P_ D614G)
gggaaauaagagagaaaagaagaguaagaagaaauauaagaccccggcgccgccaccauguucguguuccugguccuccugccccuggugagcucccagugcgugaaccucaccacccgcacgcagcugccgcccgccuacaccaacagcuucacccggggcgucuacuaccccgacaagguguuccgcuccagcgugcugcacuccacccaggaccucuuccugcccuucuucagcaacgucacgugguuccacgccauccacguguccgggaccaacggcaccaagcgguucgacaacccggugcugcccuucaacgacggggucuacuucgcgagcaccgagaaguccaacaucauccgcggcuggaucuucgggacgacccucgacagcaagacccagucccugcugaucgugaacaacgccaccaacguggucaucaaggugugcgaguuccaguucugcaacgaccccuuccucggcguguacuaccacaagaacaacaagagcuggauggaguccgaguuccgggucuacagcuccgccaacaacugcacguucgaguacgugagccagcccuuccugauggaccuggagggcaagcaggggaacuucaagaaccuccgcgaguucguguucaagaacaucgacggcuacuucaagaucuacuccaagcacaccccgaucaaccugguccgggaccugccccagggguucagcgcccucgagccccugguggaccugcccaucggcaucaacaucacccgcuuccagacccuccuggcccugcaccgguccuaccucacgccgggggacagcagcuccggcuggaccgcgggcgccgccgccuacuacgugggguaccugcagccccgcaccuuccugcucaaguacaacgagaacggcaccaucacggacgcggucgacugcgcccuggacccccugagcgagaccaagugcacccucaaguccuucaccguggagaaggggaucuaccagacgagcaacuuccgggugcagcccaccgaguccaucguccgcuucccgaacaucaccaaccugugccccuucggcgagguguucaacgccacccgguucgccagcgucuacgccuggaaccgcaagcggaucuccaacugcguggcggacuacagcgugcuguacaacuccgccagcuucuccacguucaagugcuacggcgucagccccaccaagcucaacgaccugugcuucaccaacguguacgccgacuccuucgugauccgcggggacgagguccggcagaucgcccccggccagaccgggaagaucgccgacuacaacuacaagcugccggacgacuucacgggcugcgugaucgcguggaacagcaacaaccucgacuccaaggucgggggcaacuacaacuaccuguaccgccuguuccgcaagagcaaccucaagcccuucgagcgggacaucuccaccgagaucuaccaggccggcagcacccccugcaacgggguggagggcuucaacugcuacuucccccugcaguccuacggguuccagccgaccaacggcgugggguaccagcccuaccggguggucgugcugagcuucgagcuccugcacgcccccgccacggugugcggccccaagaaguccaccaaccuggucaagaacaagugcgugaacuucaacuucaacggccucaccgggaccggcgugcugaccgagagcaacaagaaguuccugccguuccagcaguucgggcgcgacaucgccgacacgaccgacgcgguccgcgacccccagacccuggagauccucgacaucacccccugcagcuucggcgggguguccgugaucacgccgggcaccaacaccagcaaccaggucgccgugcuguaccagggcgugaacugcaccgagguccccguggccauccacgccgaccagcugacgcccaccuggcggguguacuccaccggcagcaacgucuuccagacccgcgccgggugccucaucggcgcggagcacgugaacaacuccuacgagugcgacauccccaucggggccggcaucugcgccagcuaccagacgcagaccaacuccccgcggcgcgcccggagcguggcgucccagagcaucaucgccuacaccaugucccugggcgccgagaacagcgucgccuacuccaacaacagcaucgccauccccaccaacuucacgaucuccgugaccaccgagauccugcccgugagcaugaccaagacgagcgucgacugcaccauguacaucugcggggacuccaccgagugcagcaaccuccugcugcaguacggcuccuucugcacccagcucaaccgcgcgcugacggggaucgccguggagcaggacaagaacacccaggagguguucgcccaggucaagcagaucuacaagacgcccccgaucaaggacuucggcggguucaacuucagccagauccugcccgaccccuccaagcccagcaagcgguccuucaucgaggaccuccuguucaacaaggugacccuggccgacgccggcuucaucaagcaguacggcgacugccucggggacaucgcggcccgcgaccugaucugcgcccagaaguucaacggccugaccgugcucccgccccugcugaccgacgagaugaucgcccaguacaccagcgcccuccuggcggggaccaucacguccggcuggaccuucggggccggcgccgcccugcagauccccuucgcgaugcagauggccuaccgguucaacggcaucggggucacccagaacgugcucuacgagaaccagaagcugaucgccaaccaguucaacagcgccaucggcaagauccaggacucccugagcuccaccgccagcgcgcucgggaagcugcaggacguggucaaccagaacgcccaggcccugaacacgcucgugaagcagcuguccagcaacuucggcgccaucuccagcgugcugaacgacauccucucccgccuggacccgcccgaggccgaggugcagaucgaccggcugaucaccgggcgccuccagagccugcagaccuacgugacccagcagcugauccgggcggccgagauccgcgccagcgccaaccucgccgcgaccaagauguccgagugcguccugggccagagcaagcggguggacuucugcggcaagggguaccaccugauguccuucccccagagcgccccgcacggcguggucuuccuccacgugacguacguccccgcccaggagaagaacuucaccaccgcccccgcgaucugccacgacgggaaggcccacuucccccgcgagggcguguucguguccaacgggacccacugguucgucacgcagcggaacuucuacgagccgcagaucaucaccaccgacaacaccuucgugagcggcaacugcgacguggucaucggcaucgugaacaacacgguguacgacccccugcagcccgagcuggacuccuucaaggaggagcucgacaaguacuucaagaaccacaccagccccgacgucgaccugggggacaucuccggcaucaacgccagcguggugaacauccagaaggagaucgaccgccugaacgaggucgccaagaaccucaacgagucccugaucgaccugcaggagcucgggaaguacgagcaguacaucaaguggccgugguacaucuggcugggcuucaucgccggccugaucgcgaucgugauggugaccaucaugcucugcugcaugaccagcugcugcuccugccugaaggggugcugcagcugcggcuccugcugcaaguucgacgaggacgacagcgagcccguccugaagggggugaagcuccacuacacgugauaauaggcuggagccucgguggccuagcuucuugccccuugggccuccccccagccccuccuccccuuccugcacccguacccccguggucuuugaauaaagucugagugggcggcaaaaaaaaaaaaaaaaaaaaaaaaaaaaaaaaaaaaaaaaaaaaaaaaaaaaaaaaaaaaaaaaaaaaaaaaaaaaaaaaaaaaaaaaaaaaaaaaaaaa

SEQ ID NO: 26159 - RNA, 4095 nt, Artificial Sequence
  SARS-CoV-2/Wuhan/WIV05/2019__EPI_ISL_402128 spike protein mRNA gc (1-1273)(K986P_V987P_A222V_D614G)
gggaaauaagagagaaaagaagaguaagaagaaauauaagaccccggcgccgccaccauguucguguuccugguccuccugccccuggugagcucccagugcgugaaccucaccacccgcacgcagcugccgcccgccuacaccaacagcuucacccggggcgucuacuaccccgacaagguguuccgcuccagcgugcugcacuccacccaggaccucuuccugcccuucuucagcaacgucacgugguuccacgccauccacguguccgggaccaacggcaccaagcgguucgacaacccggugcugcccuucaacgacggggucuacuucgcgagcaccgagaaguccaacaucauccgcggcuggaucuucgggacgacccucgacagcaagacccagucccugcugaucgugaacaacgccaccaacguggucaucaaggugugcgaguuccaguucugcaacgaccccuuccucggcguguacuaccacaagaacaacaagagcuggauggaguccgaguuccgggucuacagcuccgccaacaacugcacguucgaguacgugagccagcccuuccugauggaccuggagggcaagcaggggaacuucaagaaccuccgcgaguucguguucaagaacaucgacggcuacuucaagaucuacuccaagcacaccccgaucaaccugguccgggaccugccccagggguucagcguccucgagccccugguggaccugcccaucggcaucaacaucacccgcuuccagacccuccuggcccugcaccgguccuaccucacgccgggggacagcagcuccggcuggaccgcgggcgccgccgccuacuacgugggguaccugcagccccgcaccuuccugcucaaguacaacgagaacggcaccaucacggacgcggucgacugcgcccuggacccccugagcgagaccaagugcacccucaaguccuucaccguggagaaggggaucuaccagacgagcaacuuccgggugcagcccaccgaguccaucguccgcuucccgaacaucaccaaccugugccccuucggcgagguguucaacgccacccgguucgccagcgucuacgccuggaaccgcaagcggaucuccaacugcguggcggacuacagcgugcuguacaacuccgccagcuucuccacguucaagugcuacggcgucagccccaccaagcucaacgaccugugcuucaccaacguguacgccgacuccuucgugauccgcggggacgagguccggcagaucgcccccggccagaccgggaagaucgccgacuacaacuacaagcugccggacgacuucacgggcugcgugaucgcguggaacagcaacaaccucgacuccaaggucgggggcaacuacaacuaccuguaccgccuguuccgcaagagcaaccucaagcccuucgagcgggacaucuccaccgagaucuaccaggccggcagcacccccugcaacgggguggagggcuucaacugcuacuucccccugcaguccuacggguuccagccgaccaacggcgugggguaccagcccuaccggguggucgugcugagcuucgagcuccugcacgcccccgccacggugugcggccccaagaaguccaccaaccuggucaagaacaagugcgugaacuucaacuucaacggccucaccgggaccggcgugcugaccgagagcaacaagaaguuccugccguuccagcaguucgggcgcgacaucgccgacacgaccgacgcgguccgcgacccccagacccuggagauccucgacaucacccccugcagcuucggcgggguguccgugaucacgccgggcaccaacaccagcaaccaggucgccgugcuguaccagggcgugaacugcaccgagguccccguggccauccacgccgaccagcugacgcccaccuggcggguguacuccaccggcagcaacgucuuccagacccgcgccgggugccucaucggcgcggagcacgugaacaacuccuacgagugcgacauccccaucggggccggcaucugcgccagcuaccagacgcagaccaacuccccgcggcgcgcccggagcguggcgucccagagcaucaucgccuacaccaugucccugggcgccgagaacagcgucgccuacuccaacaacagcaucgccauccccaccaacuucacgaucuccgugaccaccgagauccugcccgugagcaugaccaagacgagcgucgacugcaccauguacaucugcggggacuccaccgagugcagcaaccuccugcugcaguacggcuccuucugcacccagcucaaccgcgcgcugacggggaucgccguggagcaggacaagaacacccaggagguguucgcccaggucaagcagaucuacaagacgcccccgaucaaggacuucggcggguucaacuucagccagauccugcccgaccccuccaagcccagcaagcgguccuucaucgaggaccuccuguucaacaaggugacccuggccgacgccggcuucaucaagcaguacggcgacugccucggggacaucgcggcccgcgaccugaucugcgcccagaaguucaacggccugaccgugcucccgccccugcugaccgacgagaugaucgcccaguacaccagcgcccuccuggcggggaccaucacguccggcuggaccuucggggccggcgccgcccugcagauccccuucgcgaugcagauggccuaccgguucaacggcaucggggucacccagaacgugcucuacgagaaccagaagcugaucgccaaccaguucaacagcgccaucggcaagauccaggacucccugagcuccaccgccagcgcgcucgggaagcugcaggacguggucaaccagaacgcccaggcccugaacacgcucgugaagcagcuguccagcaacuucggcgccaucuccagcgugcugaacgacauccucucccgccuggacccgcccgaggccgaggugcagaucgaccggcugaucaccgggcgccuccagagccugcagaccuacgugacccagcagcugauccgggcggccgagauccgcgccagcgccaaccucgccgcgaccaagauguccgagugcguccugggccagagcaagcggguggacuucugcggcaagggguaccaccugauguccuucccccagagcgccccgcacggcguggucuuccuccacgugacguacguccccgcccaggagaagaacuucaccaccgcccccgcgaucugccacgacgggaaggcccacuucccccgcgagggcguguucguguccaacgggacccacugguucgucacgcagcggaacuucuacgagccgcagaucaucaccaccgacaacaccuucgugagcggcaacugcgacguggucaucggcaucgugaacaacacgguguacgacccccugcagcccgagcuggacuccuucaaggaggagcucgacaaguacuucaagaaccacaccagccccgacgucgaccugggggacaucuccggcaucaacgccagcguggugaacauccagaaggagaucgaccgccugaacgaggucgccaagaaccucaacgagucccugaucgaccugcaggagcucgggaaguacgagcaguacaucaaguggccgugguacaucuggcugggcuucaucgccggccugaucgcgaucgugauggugaccaucaugcucugcugcaugaccagcugcugcuccugccugaaggggugcugcagcugcggcuccugcugcaaguucgacgaggacgacagcgagcccguccugaagggggugaagcuccacuacacgugauaauaggcuggagccucgguggccuagcuucuugccccuugggccuccccccagccccuccuccccuuccugcacccguacccccguggucuuugaauaaagucugagugggcggcaaaaaaaaaaaaaaaaaaaaaaaaaaaaaaaaaaaaaaaaaaaaaaaaaaaaaaaaaaaaaaaaaaaaaaaaaaaaaaaaaaaaaaaaaaaaaaaaaaaa

SEQ ID NO: 26160 - RNA, 4095 nt, Artificial Sequence
  SARS-CoV-2/Wuhan/WIV05/2019__EPI_ISL_402128 spike protein mRNA gc (1-1273)(K986P_V987P_N439K_D614G)
gggaaauaagagagaaaagaagaguaagaagaaauauaagaccccggcgccgccaccauguucguguuccugguccuccugccccuggugagcucccagugcgugaaccucaccacccgcacgcagcugccgcccgccuacaccaacagcuucacccggggcgucuacuaccccgacaagguguuccgcuccagcgugcugcacuccacccaggaccucuuccugcccuucuucagcaacgucacgugguuccacgccauccacguguccgggaccaacggcaccaagcgguucgacaacccggugcugcccuucaacgacggggucuacuucgcgagcaccgagaaguccaacaucauccgcggcuggaucuucgggacgacccucgacagcaagacccagucccugcugaucgugaacaacgccaccaacguggucaucaaggugugcgaguuccaguucugcaacgaccccuuccucggcguguacuaccacaagaacaacaagagcuggauggaguccgaguuccgggucuacagcuccgccaacaacugcacguucgaguacgugagccagcccuuccugauggaccuggagggcaagcaggggaacuucaagaaccuccgcgaguucguguucaagaacaucgacggcuacuucaagaucuacuccaagcacaccccgaucaaccugguccgggaccugccccagggguucagcgcccucgagccccugguggaccugcccaucggcaucaacaucacccgcuuccagacccuccuggcccugcaccgguccuaccucacgccgggggacagcagcuccggcuggaccgcgggcgccgccgccuacuacgugggguaccugcagccccgcaccuuccugcucaaguacaacgagaacggcaccaucacggacgcggucgacugcgcccuggacccccugagcgagaccaagugcacccucaaguccuucaccguggagaaggggaucuaccagacgagcaacuuccgggugcagcccaccgaguccaucguccgcuucccgaacaucaccaaccugugccccuucggcgagguguucaacgccacccgguucgccagcgucuacgccuggaaccgcaagcggaucuccaacugcguggcggacuacagcgugcuguacaacuccgccagcuucuccacguucaagugcuacggcgucagccccaccaagcucaacgaccugugcuucaccaacguguacgccgacuccuucgugauccgcggggacgagguccggcagaucgcccccggccagaccgggaagaucgccgacuacaacuacaagcugccggacgacuucacgggcugcgugaucgcguggaacagcaagaaccucgacuccaaggucgggggcaacuacaacuaccuguaccgccuguuccgcaagagcaaccucaagcccuucgagcgggacaucuccaccgagaucuaccaggccggcagcacccccugcaacgggguggagggcuucaacugcuacuucccccugcaguccuacggguuccagccgaccaacggcgugggguaccagcccuaccggguggucgugcugagcuucgagcuccugcacgcccccgccacggugugcggccccaagaaguccaccaaccuggucaagaacaagugcgugaacuucaacuucaacggccucaccgggaccggcgugcugaccgagagcaacaagaaguuccugccguuccagcaguucgggcgcgacaucgccgacacgaccgacgcgguccgcgacccccagacccuggagauccucgacaucacccccugcagcuucggcgggguguccgugaucacgccgggcaccaacaccagcaaccaggucgccgugcuguaccagggcgugaacugcaccgagguccccguggccauccacgccgaccagcugacgcccaccuggcggguguacuccaccggcagcaacgucuuccagacccgcgccgggugccucaucggcgcggagcacgugaacaacuccuacgagugcgacauccccaucggggccggcaucugcgccagcuaccagacgcagaccaacuccccgcggcgcgcccggagcguggcgucccagagcaucaucgccuacaccaugucccugggcgccgagaacagcgucgccuacuccaacaacagcaucgccauccccaccaacuucacgaucuccgugaccaccgagauccugcccgugagcaugaccaagacgagcgucgacugcaccauguacaucugcggggacuccaccgagugcagcaaccuccugcugcaguacggcuccuucugcacccagcucaaccgcgcgcugacggggaucgccguggagcaggacaagaacacccaggagguguucgcccaggucaagcagaucuacaagacgcccccgaucaaggacuucggcggguucaacuucagccagauccugcccgaccccuccaagcccagcaagcgguccuucaucgaggaccuccuguucaacaaggugacccuggccgacgccggcuucaucaagcaguacggcgacugccucggggacaucgcggcccgcgaccugaucugcgcccagaaguucaacggccugaccgugcucccgccccugcugaccgacgagaugaucgcccaguacaccagcgcccuccuggcggggaccaucacguccggcuggaccuucggggccggcgccgcccugcagauccccuucgcgaugcagauggccuaccgguucaacggcaucggggucacccagaacgugcucuacgagaaccagaagcugaucgccaaccaguucaacagcgccaucggcaagauccaggacucccugagcuccaccgccagcgcgcucgggaagcugcaggacguggucaaccagaacgcccaggcccugaacacgcucgugaagcagcuguccagcaacuucggcgccaucuccagcgugcugaacgacauccucucccgccuggacccgcccgaggccgaggugcagaucgaccggcugaucaccgggcgccuccagagccugcagaccuacgugacccagcagcugauccgggcggccgagauccgcgccagcgccaaccucgccgcgaccaagauguccgagugcguccugggccagagcaagcggguggacuucugcggcaagggguaccaccugauguccuucccccagagcgccccgcacggcguggucuuccuccacgugacguacguccccgcccaggagaagaacuucaccaccgcccccgcgaucugccacgacgggaaggcccacuucccccgcgagggcguguucguguccaacgggacccacugguucgucacgcagcggaacuucuacgagccgcagaucaucaccaccgacaacaccuucgugagcggcaacugcgacguggucaucggcaucgugaacaacacgguguacgacccccugcagcccgagcuggacuccuucaaggaggagcucgacaaguacuucaagaaccacaccagccccgacgucgaccugggggacaucuccggcaucaacgccagcguggugaacauccagaaggagaucgaccgccugaacgaggucgccaagaaccucaacgagucccugaucgaccugcaggagcucgggaaguacgagcaguacaucaaguggccgugguacaucuggcugggcuucaucgccggccugaucgcgaucgugauggugaccaucaugcucugcugcaugaccagcugcugcuccugccugaaggggugcugcagcugcggcuccugcugcaaguucgacgaggacgacagcgagcccguccugaagggggugaagcuccacuacacgugauaauaggcuggagccucgguggccuagcuucuugccccuugggccuccccccagccccuccuccccuuccugcacccguacccccguggucuuugaauaaagucugagugggcggcaaaaaaaaaaaaaaaaaaaaaaaaaaaaaaaaaaaaaaaaaaaaaaaaaaaaaaaaaaaaaaaaaaaaaaaaaaaaaaaaaaaaaaaaaaaaaaaaaaaa

SEQ ID NO: 26161 - RNA, 4095 nt, Artificial Sequence
  SARS-CoV-2/Wuhan/WIV05/2019__EPI_ISL_402128 spike protein mRNA gc (1-1273)(K986P_V987P_S477N_D614G)
gggaaauaagagagaaaagaagaguaagaagaaauauaagaccccggcgccgccaccauguucguguuccugguccuccugccccuggugagcucccagugcgugaaccucaccacccgcacgcagcugccgcccgccuacaccaacagcuucacccggggcgucuacuaccccgacaagguguuccgcuccagcgugcugcacuccacccaggaccucuuccugcccuucuucagcaacgucacgugguuccacgccauccacguguccgggaccaacggcaccaagcgguucgacaacccggugcugcccuucaacgacggggucuacuucgcgagcaccgagaaguccaacaucauccgcggcuggaucuucgggacgacccucgacagcaagacccagucccugcugaucgugaacaacgccaccaacguggucaucaaggugugcgaguuccaguucugcaacgaccccuuccucggcguguacuaccacaagaacaacaagagcuggauggaguccgaguuccgggucuacagcuccgccaacaacugcacguucgaguacgugagccagcccuuccugauggaccuggagggcaagcaggggaacuucaagaaccuccgcgaguucguguucaagaacaucgacggcuacuucaagaucuacuccaagcacaccccgaucaaccugguccgggaccugccccagggguucagcgcccucgagccccugguggaccugcccaucggcaucaacaucacccgcuuccagacccuccuggcccugcaccgguccuaccucacgccgggggacagcagcuccggcuggaccgcgggcgccgccgccuacuacgugggguaccugcagccccgcaccuuccugcucaaguacaacgagaacggcaccaucacggacgcggucgacugcgcccuggacccccugagcgagaccaagugcacccucaaguccuucaccguggagaaggggaucuaccagacgagcaacuuccgggugcagcccaccgaguccaucguccgcuucccgaacaucaccaaccugugccccuucggcgagguguucaacgccacccgguucgccagcgucuacgccuggaaccgcaagcggaucuccaacugcguggcggacuacagcgugcuguacaacuccgccagcuucuccacguucaagugcuacggcgucagccccaccaagcucaacgaccugugcuucaccaacguguacgccgacuccuucgugauccgcggggacgagguccggcagaucgcccccggccagaccgggaagaucgccgacuacaacuacaagcugccggacgacuucacgggcugcgugaucgcguggaacagcaacaaccucgacuccaaggucgggggcaacuacaacuaccuguaccgccuguuccgcaagagcaaccucaagcccuucgagcgggacaucuccaccgagaucuaccaggccggcaacacccccugcaacgggguggagggcuucaacugcuacuucccccugcaguccuacggguuccagccgaccaacggcgugggguaccagcccuaccggguggucgugcugagcuucgagcuccugcacgcccccgccacggugugcggccccaagaaguccaccaaccuggucaagaacaagugcgugaacuucaacuucaacggccucaccgggaccggcgugcugaccgagagcaacaagaaguuccugccguuccagcaguucgggcgcgacaucgccgacacgaccgacgcgguccgcgacccccagacccuggagauccucgacaucacccccugcagcuucggcgggguguccgugaucacgccgggcaccaacaccagcaaccaggucgccgugcuguaccagggcgugaacugcaccgagguccccguggccauccacgccgaccagcugacgcccaccuggcggguguacuccaccggcagcaacgucuuccagacccgcgccgggugccucaucggcgcggagcacgugaacaacuccuacgagugcgacauccccaucggggccggcaucugcgccagcuaccagacgcagaccaacuccccgcggcgcgcccggagcguggcgucccagagcaucaucgccuacaccaugucccugggcgccgagaacagcgucgccuacuccaacaacagcaucgccauccccaccaacuucacgaucuccgugaccaccgagauccugcccgugagcaugaccaagacgagcgucgacugcaccauguacaucugcggggacuccaccgagugcagcaaccuccugcugcaguacggcuccuucugcacccagcucaaccgcgcgcugacggggaucgccguggagcaggacaagaacacccaggagguguucgcccaggucaagcagaucuacaagacgcccccgaucaaggacuucggcggguucaacuucagccagauccugcccgaccccuccaagcccagcaagcgguccuucaucgaggaccuccuguucaacaaggugacccuggccgacgccggcuucaucaagcaguacggcgacugccucggggacaucgcggcccgcgaccugaucugcgcccagaaguucaacggccugaccgugcucccgccccugcugaccgacgagaugaucgcccaguacaccagcgcccuccuggcggggaccaucacguccggcuggaccuucggggccggcgccgcccugcagauccccuucgcgaugcagauggccuaccgguucaacggcaucggggucacccagaacgugcucuacgagaaccagaagcugaucgccaaccaguucaacagcgccaucggcaagauccaggacucccugagcuccaccgccagcgcgcucgggaagcugcaggacguggucaaccagaacgcccaggcccugaacacgcucgugaagcagcuguccagcaacuucggcgccaucuccagcgugcugaacgacauccucucccgccuggacccgcccgaggccgaggugcagaucgaccggcugaucaccgggcgccuccagagccugcagaccuacgugacccagcagcugauccgggcggccgagauccgcgccagcgccaaccucgccgcgaccaagauguccgagugcguccugggccagagcaagcggguggacuucugcggcaagggguaccaccugauguccuucccccagagcgccccgcacggcguggucuuccuccacgugacguacguccccgcccaggagaagaacuucaccaccgcccccgcgaucugccacgacgggaaggcccacuucccccgcgagggcguguucguguccaacgggacccacugguucgucacgcagcggaacuucuacgagccgcagaucaucaccaccgacaacaccuucgugagcggcaacugcgacguggucaucggcaucgugaacaacacgguguacgacccccugcagcccgagcuggacuccuucaaggaggagcucgacaaguacuucaagaaccacaccagccccgacgucgaccugggggacaucuccggcaucaacgccagcguggugaacauccagaaggagaucgaccgccugaacgaggucgccaagaaccucaacgagucccugaucgaccugcaggagcucgggaaguacgagcaguacaucaaguggccgugguacaucuggcugggcuucaucgccggccugaucgcgaucgugauggugaccaucaugcucugcugcaugaccagcugcugcuccugccugaaggggugcugcagcugcggcuccugcugcaaguucgacgaggacgacagcgagcccguccugaagggggugaagcuccacuacacgugauaauaggcuggagccucgguggccuagcuucuugccccuugggccuccccccagccccuccuccccuuccugcacccguacccccguggucuuugaauaaagucugagugggcggcaaaaaaaaaaaaaaaaaaaaaaaaaaaaaaaaaaaaaaaaaaaaaaaaaaaaaaaaaaaaaaaaaaaaaaaaaaaaaaaaaaaaaaaaaaaaaaaaaaaa

SEQ ID NO: 26162 - RNA, 4095 nt, Artificial Sequence
  SARS-CoV-2/Wuhan/WIV05/2019__EPI_ISL_402128 spike protein mRNA gc (1-1273)(K986P_V987P_N501Y_D614G)
gggaaauaagagagaaaagaagaguaagaagaaauauaagaccccggcgccgccaccauguucguguuccugguccuccugccccuggugagcucccagugcgugaaccucaccacccgcacgcagcugccgcccgccuacaccaacagcuucacccggggcgucuacuaccccgacaagguguuccgcuccagcgugcugcacuccacccaggaccucuuccugcccuucuucagcaacgucacgugguuccacgccauccacguguccgggaccaacggcaccaagcgguucgacaacccggugcugcccuucaacgacggggucuacuucgcgagcaccgagaaguccaacaucauccgcggcuggaucuucgggacgacccucgacagcaagacccagucccugcugaucgugaacaacgccaccaacguggucaucaaggugugcgaguuccaguucugcaacgaccccuuccucggcguguacuaccacaagaacaacaagagcuggauggaguccgaguuccgggucuacagcuccgccaacaacugcacguucgaguacgugagccagcccuuccugauggaccuggagggcaagcaggggaacuucaagaaccuccgcgaguucguguucaagaacaucgacggcuacuucaagaucuacuccaagcacaccccgaucaaccugguccgggaccugccccagggguucagcgcccucgagccccugguggaccugcccaucggcaucaacaucacccgcuuccagacccuccuggcccugcaccgguccuaccucacgccgggggacagcagcuccggcuggaccgcgggcgccgccgccuacuacgugggguaccugcagccccgcaccuuccugcucaaguacaacgagaacggcaccaucacggacgcggucgacugcgcccuggacccccugagcgagaccaagugcacccucaaguccuucaccguggagaaggggaucuaccagacgagcaacuuccgggugcagcccaccgaguccaucguccgcuucccgaacaucaccaaccugugccccuucggcgagguguucaacgccacccgguucgccagcgucuacgccuggaaccgcaagcggaucuccaacugcguggcggacuacagcgugcuguacaacuccgccagcuucuccacguucaagugcuacggcgucagccccaccaagcucaacgaccugugcuucaccaacguguacgccgacuccuucgugauccgcggggacgagguccggcagaucgcccccggccagaccgggaagaucgccgacuacaacuacaagcugccggacgacuucacgggcugcgugaucgcguggaacagcaacaaccucgacuccaaggucgggggcaacuacaacuaccuguaccgccuguuccgcaagagcaaccucaagcccuucgagcgggacaucuccaccgagaucuaccaggccggcagcacccccugcaacgggguggagggcuucaacugcuacuucccccugcaguccuacggguuccagccgaccuacggcgugggguaccagcccuaccggguggucgugcugagcuucgagcuccugcacgcccccgccacggugugcggccccaagaaguccaccaaccuggucaagaacaagugcgugaacuucaacuucaacggccucaccgggaccggcgugcugaccgagagcaacaagaaguuccugccguuccagcaguucgggcgcgacaucgccgacacgaccgacgcgguccgcgacccccagacccuggagauccucgacaucacccccugcagcuucggcgggguguccgugaucacgccgggcaccaacaccagcaaccaggucgccgugcuguaccagggcgugaacugcaccgagguccccguggccauccacgccgaccagcugacgcccaccuggcggguguacuccaccggcagcaacgucuuccagacccgcgccgggugccucaucggcgcggagcacgugaacaacuccuacgagugcgacauccccaucggggccggcaucugcgccagcuaccagacgcagaccaacuccccgcggcgcgcccggagcguggcgucccagagcaucaucgccuacaccaugucccugggcgccgagaacagcgucgccuacuccaacaacagcaucgccauccccaccaacuucacgaucuccgugaccaccgagauccugcccgugagcaugaccaagacgagcgucgacugcaccauguacaucugcggggacuccaccgagugcagcaaccuccugcugcaguacggcuccuucugcacccagcucaaccgcgcgcugacggggaucgccguggagcaggacaagaacacccaggagguguucgcccaggucaagcagaucuacaagacgcccccgaucaaggacuucggcggguucaacuucagccagauccugcccgaccccuccaagcccagcaagcgguccuucaucgaggaccuccuguucaacaaggugacccuggccgacgccggcuucaucaagcaguacggcgacugccucggggacaucgcggcccgcgaccugaucugcgcccagaaguucaacggccugaccgugcucccgccccugcugaccgacgagaugaucgcccaguacaccagcgcccuccuggcggggaccaucacguccggcuggaccuucggggccggcgccgcccugcagauccccuucgcgaugcagauggccuaccgguucaacggcaucggggucacccagaacgugcucuacgagaaccagaagcugaucgccaaccaguucaacagcgccaucggcaagauccaggacucccugagcuccaccgccagcgcgcucgggaagcugcaggacguggucaaccagaacgcccaggcccugaacacgcucgugaagcagcuguccagcaacuucggcgccaucuccagcgugcugaacgacauccucucccgccuggacccgcccgaggccgaggugcagaucgaccggcugaucaccgggcgccuccagagccugcagaccuacgugacccagcagcugauccgggcggccgagauccgcgccagcgccaaccucgccgcgaccaagauguccgagugcguccugggccagagcaagcggguggacuucugcggcaagggguaccaccugauguccuucccccagagcgccccgcacggcguggucuuccuccacgugacguacguccccgcccaggagaagaacuucaccaccgcccccgcgaucugccacgacgggaaggcccacuucccccgcgagggcguguucguguccaacgggacccacugguucgucacgcagcggaacuucuacgagccgcagaucaucaccaccgacaacaccuucgugagcggcaacugcgacguggucaucggcaucgugaacaacacgguguacgacccccugcagcccgagcuggacuccuucaaggaggagcucgacaaguacuucaagaaccacaccagccccgacgucgaccugggggacaucuccggcaucaacgccagcguggugaacauccagaaggagaucgaccgccugaacgaggucgccaagaaccucaacgagucccugaucgaccugcaggagcucgggaaguacgagcaguacaucaaguggccgugguacaucuggcugggcuucaucgccggccugaucgcgaucgugauggugaccaucaugcucugcugcaugaccagcugcugcuccugccugaaggggugcugcagcugcggcuccugcugcaaguucgacgaggacgacagcgagcccguccugaagggggugaagcuccacuacacgugauaauaggcuggagccucgguggccuagcuucuugccccuugggccuccccccagccccuccuccccuuccugcacccguacccccguggucuuugaauaaagucugagugggcggcaaaaaaaaaaaaaaaaaaaaaaaaaaaaaaaaaaaaaaaaaaaaaaaaaaaaaaaaaaaaaaaaaaaaaaaaaaaaaaaaaaaaaaaaaaaaaaaaaaaa

SEQ ID NO: 26163 - RNA, 4089 nt, Artificial Sequence
  SARS-CoV-2/Wuhan/WIV05/2019__EPI_ISL_402128 spike protein mRNA gc (1-1273)(K986P_V987P_H69del_V70del_D614G)
gggaaauaagagagaaaagaagaguaagaagaaauauaagaccccggcgccgccaccauguucguguuccugguccuccugccccuggugagcucccagugcgugaaccucaccacccgcacgcagcugccgcccgccuacaccaacagcuucacccggggcgucuacuaccccgacaagguguuccgcuccagcgugcugcacuccacccaggaccucuuccugcccuucuucagcaacgucacgugguuccacgccaucuccgggaccaacggcaccaagcgguucgacaacccggugcugcccuucaacgacggggucuacuucgcgagcaccgagaaguccaacaucauccgcggcuggaucuucgggacgacccucgacagcaagacccagucccugcugaucgugaacaacgccaccaacguggucaucaaggugugcgaguuccaguucugcaacgaccccuuccucggcguguacuaccacaagaacaacaagagcuggauggaguccgaguuccgggucuacagcuccgccaacaacugcacguucgaguacgugagccagcccuuccugauggaccuggagggcaagcaggggaacuucaagaaccuccgcgaguucguguucaagaacaucgacggcuacuucaagaucuacuccaagcacaccccgaucaaccugguccgggaccugccccagggguucagcgcccucgagccccugguggaccugcccaucggcaucaacaucacccgcuuccagacccuccuggcccugcaccgguccuaccucacgccgggggacagcagcuccggcuggaccgcgggcgccgccgccuacuacgugggguaccugcagccccgcaccuuccugcucaaguacaacgagaacggcaccaucacggacgcggucgacugcgcccuggacccccugagcgagaccaagugcacccucaaguccuucaccguggagaaggggaucuaccagacgagcaacuuccgggugcagcccaccgaguccaucguccgcuucccgaacaucaccaaccugugccccuucggcgagguguucaacgccacccgguucgccagcgucuacgccuggaaccgcaagcggaucuccaacugcguggcggacuacagcgugcuguacaacuccgccagcuucuccacguucaagugcuacggcgucagccccaccaagcucaacgaccugugcuucaccaacguguacgccgacuccuucgugauccgcggggacgagguccggcagaucgcccccggccagaccgggaagaucgccgacuacaacuacaagcugccggacgacuucacgggcugcgugaucgcguggaacagcaacaaccucgacuccaaggucgggggcaacuacaacuaccuguaccgccuguuccgcaagagcaaccucaagcccuucgagcgggacaucuccaccgagaucuaccaggccggcagcacccccugcaacgggguggagggcuucaacugcuacuucccccugcaguccuacggguuccagccgaccaacggcgugggguaccagcccuaccggguggucgugcugagcuucgagcuccugcacgcccccgccacggugugcggccccaagaaguccaccaaccuggucaagaacaagugcgugaacuucaacuucaacggccucaccgggaccggcgugcugaccgagagcaacaagaaguuccugccguuccagcaguucgggcgcgacaucgccgacacgaccgacgcgguccgcgacccccagacccuggagauccucgacaucacccccugcagcuucggcgggguguccgugaucacgccgggcaccaacaccagcaaccaggucgccgugcuguaccagggcgugaacugcaccgagguccccguggccauccacgccgaccagcugacgcccaccuggcggguguacuccaccggcagcaacgucuuccagacccgcgccgggugccucaucggcgcggagcacgugaacaacuccuacgagugcgacauccccaucggggccggcaucugcgccagcuaccagacgcagaccaacuccccgcggcgcgcccggagcguggcgucccagagcaucaucgccuacaccaugucccugggcgccgagaacagcgucgccuacuccaacaacagcaucgccauccccaccaacuucacgaucuccgugaccaccgagauccugcccgugagcaugaccaagacgagcgucgacugcaccauguacaucugcggggacuccaccgagugcagcaaccuccugcugcaguacggcuccuucugcacccagcucaaccgcgcgcugacggggaucgccguggagcaggacaagaacacccaggagguguucgcccaggucaagcagaucuacaagacgcccccgaucaaggacuucggcggguucaacuucagccagauccugcccgaccccuccaagcccagcaagcgguccuucaucgaggaccuccuguucaacaaggugacccuggccgacgccggcuucaucaagcaguacggcgacugccucggggacaucgcggcccgcgaccugaucugcgcccagaaguucaacggccugaccgugcucccgccccugcugaccgacgagaugaucgcccaguacaccagcgcccuccuggcggggaccaucacguccggcuggaccuucggggccggcgccgcccugcagauccccuucgcgaugcagauggccuaccgguucaacggcaucggggucacccagaacgugcucuacgagaaccagaagcugaucgccaaccaguucaacagcgccaucggcaagauccaggacucccugagcuccaccgccagcgcgcucgggaagcugcaggacguggucaaccagaacgcccaggcccugaacacgcucgugaagcagcuguccagcaacuucggcgccaucuccagcgugcugaacgacauccucucccgccuggacccgcccgaggccgaggugcagaucgaccggcugaucaccgggcgccuccagagccugcagaccuacgugacccagcagcugauccgggcggccgagauccgcgccagcgccaaccucgccgcgaccaagauguccgagugcguccugggccagagcaagcggguggacuucugcggcaagggguaccaccugauguccuucccccagagcgccccgcacggcguggucuuccuccacgugacguacguccccgcccaggagaagaacuucaccaccgcccccgcgaucugccacgacgggaaggcccacuucccccgcgagggcguguucguguccaacgggacccacugguucgucacgcagcggaacuucuacgagccgcagaucaucaccaccgacaacaccuucgugagcggcaacugcgacguggucaucggcaucgugaacaacacgguguacgacccccugcagcccgagcuggacuccuucaaggaggagcucgacaaguacuucaagaaccacaccagccccgacgucgaccugggggacaucuccggcaucaacgccagcguggugaacauccagaaggagaucgaccgccugaacgaggucgccaagaaccucaacgagucccugaucgaccugcaggagcucgggaaguacgagcaguacaucaaguggccgugguacaucuggcugggcuucaucgccggccugaucgcgaucgugauggugaccaucaugcucugcugcaugaccagcugcugcuccugccugaaggggugcugcagcugcggcuccugcugcaaguucgacgaggacgacagcgagcccguccugaagggggugaagcuccacuacacgugauaauaggcuggagccucgguggccuagcuucuugccccuugggccuccccccagccccuccuccccuuccugcacccguacccccguggucuuugaauaaagucugagugggcggcaaaaaaaaaaaaaaaaaaaaaaaaaaaaaaaaaaaaaaaaaaaaaaaaaaaaaaaaaaaaaaaaaaaaaaaaaaaaaaaaaaaaaaaaaaaaaaaaaaaa

SEQ ID NO: 26164 - RNA, 4095 nt, Artificial Sequence
  SARS-CoV-2/Wuhan/WIV05/2019__EPI_ISL_402128 spike protein mRNA gc (1-1273)(K986P_V987P_Y453F_D614G)
gggaaauaagagagaaaagaagaguaagaagaaauauaagaccccggcgccgccaccauguucguguuccugguccuccugccccuggugagcucccagugcgugaaccucaccacccgcacgcagcugccgcccgccuacaccaacagcuucacccggggcgucuacuaccccgacaagguguuccgcuccagcgugcugcacuccacccaggaccucuuccugcccuucuucagcaacgucacgugguuccacgccauccacguguccgggaccaacggcaccaagcgguucgacaacccggugcugcccuucaacgacggggucuacuucgcgagcaccgagaaguccaacaucauccgcggcuggaucuucgggacgacccucgacagcaagacccagucccugcugaucgugaacaacgccaccaacguggucaucaaggugugcgaguuccaguucugcaacgaccccuuccucggcguguacuaccacaagaacaacaagagcuggauggaguccgaguuccgggucuacagcuccgccaacaacugcacguucgaguacgugagccagcccuuccugauggaccuggagggcaagcaggggaacuucaagaaccuccgcgaguucguguucaagaacaucgacggcuacuucaagaucuacuccaagcacaccccgaucaaccugguccgggaccugccccagggguucagcgcccucgagccccugguggaccugcccaucggcaucaacaucacccgcuuccagacccuccuggcccugcaccgguccuaccucacgccgggggacagcagcuccggcuggaccgcgggcgccgccgccuacuacgugggguaccugcagccccgcaccuuccugcucaaguacaacgagaacggcaccaucacggacgcggucgacugcgcccuggacccccugagcgagaccaagugcacccucaaguccuucaccguggagaaggggaucuaccagacgagcaacuuccgggugcagcccaccgaguccaucguccgcuucccgaacaucaccaaccugugccccuucggcgagguguucaacgccacccgguucgccagcgucuacgccuggaaccgcaagcggaucuccaacugcguggcggacuacagcgugcuguacaacuccgccagcuucuccacguucaagugcuacggcgucagccccaccaagcucaacgaccugugcuucaccaacguguacgccgacuccuucgugauccgcggggacgagguccggcagaucgcccccggccagaccgggaagaucgccgacuacaacuacaagcugccggacgacuucacgggcugcgugaucgcguggaacagcaacaaccucgacuccaaggucgggggcaacuacaacuaccuguuccgccuguuccgcaagagcaaccucaagcccuucgagcgggacaucuccaccgagaucuaccaggccggcagcacccccugcaacgggguggagggcuucaacugcuacuucccccugcaguccuacggguuccagccgaccaacggcgugggguaccagcccuaccggguggucgugcugagcuucgagcuccugcacgcccccgccacggugugcggccccaagaaguccaccaaccuggucaagaacaagugcgugaacuucaacuucaacggccucaccgggaccggcgugcugaccgagagcaacaagaaguuccugccguuccagcaguucgggcgcgacaucgccgacacgaccgacgcgguccgcgacccccagacccuggagauccucgacaucacccccugcagcuucggcgggguguccgugaucacgccgggcaccaacaccagcaaccaggucgccgugcuguaccagggcgugaacugcaccgagguccccguggccauccacgccgaccagcugacgcccaccuggcggguguacuccaccggcagcaacgucuuccagacccgcgccgggugccucaucggcgcggagcacgugaacaacuccuacgagugcgacauccccaucggggccggcaucugcgccagcuaccagacgcagaccaacuccccgcggcgcgcccggagcguggcgucccagagcaucaucgccuacaccaugucccugggcgccgagaacagcgucgccuacuccaacaacagcaucgccauccccaccaacuucacgaucuccgugaccaccgagauccugcccgugagcaugaccaagacgagcgucgacugcaccauguacaucugcggggacuccaccgagugcagcaaccuccugcugcaguacggcuccuucugcacccagcucaaccgcgcgcugacggggaucgccguggagcaggacaagaacacccaggagguguucgcccaggucaagcagaucuacaagacgcccccgaucaaggacuucggcggguucaacuucagccagauccugcccgaccccuccaagcccagcaagcgguccuucaucgaggaccuccuguucaacaaggugacccuggccgacgccggcuucaucaagcaguacggcgacugccucggggacaucgcggcccgcgaccugaucugcgcccagaaguucaacggccugaccgugcucccgccccugcugaccgacgagaugaucgcccaguacaccagcgcccuccuggcggggaccaucacguccggcuggaccuucggggccggcgccgcccugcagauccccuucgcgaugcagauggccuaccgguucaacggcaucggggucacccagaacgugcucuacgagaaccagaagcugaucgccaaccaguucaacagcgccaucggcaagauccaggacucccugagcuccaccgccagcgcgcucgggaagcugcaggacguggucaaccagaacgcccaggcccugaacacgcucgugaagcagcuguccagcaacuucggcgccaucuccagcgugcugaacgacauccucucccgccuggacccgcccgaggccgaggugcagaucgaccggcugaucaccgggcgccuccagagccugcagaccuacgugacccagcagcugauccgggcggccgagauccgcgccagcgccaaccucgccgcgaccaagauguccgagugcguccugggccagagcaagcggguggacuucugcggcaagggguaccaccugauguccuucccccagagcgccccgcacggcguggucuuccuccacgugacguacguccccgcccaggagaagaacuucaccaccgcccccgcgaucugccacgacgggaaggcccacuucccccgcgagggcguguucguguccaacgggacccacugguucgucacgcagcggaacuucuacgagccgcagaucaucaccaccgacaacaccuucgugagcggcaacugcgacguggucaucggcaucgugaacaacacgguguacgacccccugcagcccgagcuggacuccuucaaggaggagcucgacaaguacuucaagaaccacaccagccccgacgucgaccugggggacaucuccggcaucaacgccagcguggugaacauccagaaggagaucgaccgccugaacgaggucgccaagaaccucaacgagucccugaucgaccugcaggagcucgggaaguacgagcaguacaucaaguggccgugguacaucuggcugggcuucaucgccggccugaucgcgaucgugauggugaccaucaugcucugcugcaugaccagcugcugcuccugccugaaggggugcugcagcugcggcuccugcugcaaguucgacgaggacgacagcgagcccguccugaagggggugaagcuccacuacacgugauaauaggcuggagccucgguggccuagcuucuugccccuugggccuccccccagccccuccuccccuuccugcacccguacccccguggucuuugaauaaagucugagugggcggcaaaaaaaaaaaaaaaaaaaaaaaaaaaaaaaaaaaaaaaaaaaaaaaaaaaaaaaaaaaaaaaaaaaaaaaaaaaaaaaaaaaaaaaaaaaaaaaaaaaa

SEQ ID NO: 26165 - RNA, 4095 nt, Artificial Sequence
  SARS-CoV-2/Wuhan/WIV05/2019__EPI_ISL_402128 spike protein mRNA gc (1-1273)(K986P_V987P_D614G_I692V)
gggaaauaagagagaaaagaagaguaagaagaaauauaagaccccggcgccgccaccauguucguguuccugguccuccugccccuggugagcucccagugcgugaaccucaccacccgcacgcagcugccgcccgccuacaccaacagcuucacccggggcgucuacuaccccgacaagguguuccgcuccagcgugcugcacuccacccaggaccucuuccugcccuucuucagcaacgucacgugguuccacgccauccacguguccgggaccaacggcaccaagcgguucgacaacccggugcugcccuucaacgacggggucuacuucgcgagcaccgagaaguccaacaucauccgcggcuggaucuucgggacgacccucgacagcaagacccagucccugcugaucgugaacaacgccaccaacguggucaucaaggugugcgaguuccaguucugcaacgaccccuuccucggcguguacuaccacaagaacaacaagagcuggauggaguccgaguuccgggucuacagcuccgccaacaacugcacguucgaguacgugagccagcccuuccugauggaccuggagggcaagcaggggaacuucaagaaccuccgcgaguucguguucaagaacaucgacggcuacuucaagaucuacuccaagcacaccccgaucaaccugguccgggaccugccccagggguucagcgcccucgagccccugguggaccugcccaucggcaucaacaucacccgcuuccagacccuccuggcccugcaccgguccuaccucacgccgggggacagcagcuccggcuggaccgcgggcgccgccgccuacuacgugggguaccugcagccccgcaccuuccugcucaaguacaacgagaacggcaccaucacggacgcggucgacugcgcccuggacccccugagcgagaccaagugcacccucaaguccuucaccguggagaaggggaucuaccagacgagcaacuuccgggugcagcccaccgaguccaucguccgcuucccgaacaucaccaaccugugccccuucggcgagguguucaacgccacccgguucgccagcgucuacgccuggaaccgcaagcggaucuccaacugcguggcggacuacagcgugcuguacaacuccgccagcuucuccacguucaagugcuacggcgucagccccaccaagcucaacgaccugugcuucaccaacguguacgccgacuccuucgugauccgcggggacgagguccggcagaucgcccccggccagaccgggaagaucgccgacuacaacuacaagcugccggacgacuucacgggcugcgugaucgcguggaacagcaacaaccucgacuccaaggucgggggcaacuacaacuaccuguaccgccuguuccgcaagagcaaccucaagcccuucgagcgggacaucuccaccgagaucuaccaggccggcagcacccccugcaacgggguggagggcuucaacugcuacuucccccugcaguccuacggguuccagccgaccaacggcgugggguaccagcccuaccggguggucgugcugagcuucgagcuccugcacgcccccgccacggugugcggccccaagaaguccaccaaccuggucaagaacaagugcgugaacuucaacuucaacggccucaccgggaccggcgugcugaccgagagcaacaagaaguuccugccguuccagcaguucgggcgcgacaucgccgacacgaccgacgcgguccgcgacccccagacccuggagauccucgacaucacccccugcagcuucggcgggguguccgugaucacgccgggcaccaacaccagcaaccaggucgccgugcuguaccagggcgugaacugcaccgagguccccguggccauccacgccgaccagcugacgcccaccuggcggguguacuccaccggcagcaacgucuuccagacccgcgccgggugccucaucggcgcggagcacgugaacaacuccuacgagugcgacauccccaucggggccggcaucugcgccagcuaccagacgcagaccaacuccccgcggcgcgcccggagcguggcgucccagagcgucaucgccuacaccaugucccugggcgccgagaacagcgucgccuacuccaacaacagcaucgccauccccaccaacuucacgaucuccgugaccaccgagauccugcccgugagcaugaccaagacgagcgucgacugcaccauguacaucugcggggacuccaccgagugcagcaaccuccugcugcaguacggcuccuucugcacccagcucaaccgcgcgcugacggggaucgccguggagcaggacaagaacacccaggagguguucgcccaggucaagcagaucuacaagacgcccccgaucaaggacuucggcggguucaacuucagccagauccugcccgaccccuccaagcccagcaagcgguccuucaucgaggaccuccuguucaacaaggugacccuggccgacgccggcuucaucaagcaguacggcgacugccucggggacaucgcggcccgcgaccugaucugcgcccagaaguucaacggccugaccgugcucccgccccugcugaccgacgagaugaucgcccaguacaccagcgcccuccuggcggggaccaucacguccggcuggaccuucggggccggcgccgcccugcagauccccuucgcgaugcagauggccuaccgguucaacggcaucggggucacccagaacgugcucuacgagaaccagaagcugaucgccaaccaguucaacagcgccaucggcaagauccaggacucccugagcuccaccgccagcgcgcucgggaagcugcaggacguggucaaccagaacgcccaggcccugaacacgcucgugaagcagcuguccagcaacuucggcgccaucuccagcgugcugaacgacauccucucccgccuggacccgcccgaggccgaggugcagaucgaccggcugaucaccgggcgccuccagagccugcagaccuacgugacccagcagcugauccgggcggccgagauccgcgccagcgccaaccucgccgcgaccaagauguccgagugcguccugggccagagcaagcggguggacuucugcggcaagggguaccaccugauguccuucccccagagcgccccgcacggcguggucuuccuccacgugacguacguccccgcccaggagaagaacuucaccaccgcccccgcgaucugccacgacgggaaggcccacuucccccgcgagggcguguucguguccaacgggacccacugguucgucacgcagcggaacuucuacgagccgcagaucaucaccaccgacaacaccuucgugagcggcaacugcgacguggucaucggcaucgugaacaacacgguguacgacccccugcagcccgagcuggacuccuucaaggaggagcucgacaaguacuucaagaaccacaccagccccgacgucgaccugggggacaucuccggcaucaacgccagcguggugaacauccagaaggagaucgaccgccugaacgaggucgccaagaaccucaacgagucccugaucgaccugcaggagcucgggaaguacgagcaguacaucaaguggccgugguacaucuggcugggcuucaucgccggccugaucgcgaucgugauggugaccaucaugcucugcugcaugaccagcugcugcuccugccugaaggggugcugcagcugcggcuccugcugcaaguucgacgaggacgacagcgagcccguccugaagggggugaagcuccacuacacgugauaauaggcuggagccucgguggccuagcuucuugccccuugggccuccccccagccccuccuccccuuccugcacccguacccccguggucuuugaauaaagucugagugggcggcaaaaaaaaaaaaaaaaaaaaaaaaaaaaaaaaaaaaaaaaaaaaaaaaaaaaaaaaaaaaaaaaaaaaaaaaaaaaaaaaaaaaaaaaaaaaaaaaaaaa

SEQ ID NO: 26166 - RNA, 4095 nt, Artificial Sequence
  SARS-CoV-2/Wuhan/WIV05/2019__EPI_ISL_402128 spike protein mRNA gc (1-1273)(K986P_V987P_D614G_M1229I)
gggaaauaagagagaaaagaagaguaagaagaaauauaagaccccggcgccgccaccauguucguguuccugguccuccugccccuggugagcucccagugcgugaaccucaccacccgcacgcagcugccgcccgccuacaccaacagcuucacccggggcgucuacuaccccgacaagguguuccgcuccagcgugcugcacuccacccaggaccucuuccugcccuucuucagcaacgucacgugguuccacgccauccacguguccgggaccaacggcaccaagcgguucgacaacccggugcugcccuucaacgacggggucuacuucgcgagcaccgagaaguccaacaucauccgcggcuggaucuucgggacgacccucgacagcaagacccagucccugcugaucgugaacaacgccaccaacguggucaucaaggugugcgaguuccaguucugcaacgaccccuuccucggcguguacuaccacaagaacaacaagagcuggauggaguccgaguuccgggucuacagcuccgccaacaacugcacguucgaguacgugagccagcccuuccugauggaccuggagggcaagcaggggaacuucaagaaccuccgcgaguucguguucaagaacaucgacggcuacuucaagaucuacuccaagcacaccccgaucaaccugguccgggaccugccccagggguucagcgcccucgagccccugguggaccugcccaucggcaucaacaucacccgcuuccagacccuccuggcccugcaccgguccuaccucacgccgggggacagcagcuccggcuggaccgcgggcgccgccgccuacuacgugggguaccugcagccccgcaccuuccugcucaaguacaacgagaacggcaccaucacggacgcggucgacugcgcccuggacccccugagcgagaccaagugcacccucaaguccuucaccguggagaaggggaucuaccagacgagcaacuuccgggugcagcccaccgaguccaucguccgcuucccgaacaucaccaaccugugccccuucggcgagguguucaacgccacccgguucgccagcgucuacgccuggaaccgcaagcggaucuccaacugcguggcggacuacagcgugcuguacaacuccgccagcuucuccacguucaagugcuacggcgucagccccaccaagcucaacgaccugugcuucaccaacguguacgccgacuccuucgugauccgcggggacgagguccggcagaucgcccccggccagaccgggaagaucgccgacuacaacuacaagcugccggacgacuucacgggcugcgugaucgcguggaacagcaacaaccucgacuccaaggucgggggcaacuacaacuaccuguaccgccuguuccgcaagagcaaccucaagcccuucgagcgggacaucuccaccgagaucuaccaggccggcagcacccccugcaacgggguggagggcuucaacugcuacuucccccugcaguccuacggguuccagccgaccaacggcgugggguaccagcccuaccggguggucgugcugagcuucgagcuccugcacgcccccgccacggugugcggccccaagaaguccaccaaccuggucaagaacaagugcgugaacuucaacuucaacggccucaccgggaccggcgugcugaccgagagcaacaagaaguuccugccguuccagcaguucgggcgcgacaucgccgacacgaccgacgcgguccgcgacccccagacccuggagauccucgacaucacccccugcagcuucggcgggguguccgugaucacgccgggcaccaacaccagcaaccaggucgccgugcuguaccagggcgugaacugcaccgagguccccguggccauccacgccgaccagcugacgcccaccuggcggguguacuccaccggcagcaacgucuuccagacccgcgccgggugccucaucggcgcggagcacgugaacaacuccuacgagugcgacauccccaucggggccggcaucugcgccagcuaccagacgcagaccaacuccccgcggcgcgcccggagcguggcgucccagagcaucaucgccuacaccaugucccugggcgccgagaacagcgucgccuacuccaacaacagcaucgccauccccaccaacuucacgaucuccgugaccaccgagauccugcccgugagcaugaccaagacgagcgucgacugcaccauguacaucugcggggacuccaccgagugcagcaaccuccugcugcaguacggcuccuucugcacccagcucaaccgcgcgcugacggggaucgccguggagcaggacaagaacacccaggagguguucgcccaggucaagcagaucuacaagacgcccccgaucaaggacuucggcggguucaacuucagccagauccugcccgaccccuccaagcccagcaagcgguccuucaucgaggaccuccuguucaacaaggugacccuggccgacgccggcuucaucaagcaguacggcgacugccucggggacaucgcggcccgcgaccugaucugcgcccagaaguucaacggccugaccgugcucccgccccugcugaccgacgagaugaucgcccaguacaccagcgcccuccuggcggggaccaucacguccggcuggaccuucggggccggcgccgcccugcagauccccuucgcgaugcagauggccuaccgguucaacggcaucggggucacccagaacgugcucuacgagaaccagaagcugaucgccaaccaguucaacagcgccaucggcaagauccaggacucccugagcuccaccgccagcgcgcucgggaagcugcaggacguggucaaccagaacgcccaggcccugaacacgcucgugaagcagcuguccagcaacuucggcgccaucuccagcgugcugaacgacauccucucccgccuggacccgcccgaggccgaggugcagaucgaccggcugaucaccgggcgccuccagagccugcagaccuacgugacccagcagcugauccgggcggccgagauccgcgccagcgccaaccucgccgcgaccaagauguccgagugcguccugggccagagcaagcggguggacuucugcggcaagggguaccaccugauguccuucccccagagcgccccgcacggcguggucuuccuccacgugacguacguccccgcccaggagaagaacuucaccaccgcccccgcgaucugccacgacgggaaggcccacuucccccgcgagggcguguucguguccaacgggacccacugguucgucacgcagcggaacuucuacgagccgcagaucaucaccaccgacaacaccuucgugagcggcaacugcgacguggucaucggcaucgugaacaacacgguguacgacccccugcagcccgagcuggacuccuucaaggaggagcucgacaaguacuucaagaaccacaccagccccgacgucgaccugggggacaucuccggcaucaacgccagcguggugaacauccagaaggagaucgaccgccugaacgaggucgccaagaaccucaacgagucccugaucgaccugcaggagcucgggaaguacgagcaguacaucaaguggccgugguacaucuggcugggcuucaucgccggccugaucgcgaucgugaucgugaccaucaugcucugcugcaugaccagcugcugcuccugccugaaggggugcugcagcugcggcuccugcugcaaguucgacgaggacgacagcgagcccguccugaagggggugaagcuccacuacacgugauaauaggcuggagccucgguggccuagcuucuugccccuugggccuccccccagccccuccuccccuuccugcacccguacccccguggucuuugaauaaagucugagugggcggcaaaaaaaaaaaaaaaaaaaaaaaaaaaaaaaaaaaaaaaaaaaaaaaaaaaaaaaaaaaaaaaaaaaaaaaaaaaaaaaaaaaaaaaaaaaaaaaaaaaa

SEQ ID NO: 26167 - RNA, 4089 nt, Artificial Sequence
  SARS-CoV-2/Wuhan/WIV05/2019__EPI_ISL_402128 spike protein mRNA gc (1-1273)(K986P_V987P_H69del_V70del_A222V_Y453F_S477N_D614G_I692V)
gggaaauaagagagaaaagaagaguaagaagaaauauaagaccccggcgccgccaccauguucguguuccugguccuccugccccuggugagcucccagugcgugaaccucaccacccgcacgcagcugccgcccgccuacaccaacagcuucacccggggcgucuacuaccccgacaagguguuccgcuccagcgugcugcacuccacccaggaccucuuccugcccuucuucagcaacgucacgugguuccacgccaucuccgggaccaacggcaccaagcgguucgacaacccggugcugcccuucaacgacggggucuacuucgcgagcaccgagaaguccaacaucauccgcggcuggaucuucgggacgacccucgacagcaagacccagucccugcugaucgugaacaacgccaccaacguggucaucaaggugugcgaguuccaguucugcaacgaccccuuccucggcguguacuaccacaagaacaacaagagcuggauggaguccgaguuccgggucuacagcuccgccaacaacugcacguucgaguacgugagccagcccuuccugauggaccuggagggcaagcaggggaacuucaagaaccuccgcgaguucguguucaagaacaucgacggcuacuucaagaucuacuccaagcacaccccgaucaaccugguccgggaccugccccagggguucagcguccucgagccccugguggaccugcccaucggcaucaacaucacccgcuuccagacccuccuggcccugcaccgguccuaccucacgccgggggacagcagcuccggcuggaccgcgggcgccgccgccuacuacgugggguaccugcagccccgcaccuuccugcucaaguacaacgagaacggcaccaucacggacgcggucgacugcgcccuggacccccugagcgagaccaagugcacccucaaguccuucaccguggagaaggggaucuaccagacgagcaacuuccgggugcagcccaccgaguccaucguccgcuucccgaacaucaccaaccugugccccuucggcgagguguucaacgccacccgguucgccagcgucuacgccuggaaccgcaagcggaucuccaacugcguggcggacuacagcgugcuguacaacuccgccagcuucuccacguucaagugcuacggcgucagccccaccaagcucaacgaccugugcuucaccaacguguacgccgacuccuucgugauccgcggggacgagguccggcagaucgcccccggccagaccgggaagaucgccgacuacaacuacaagcugccggacgacuucacgggcugcgugaucgcguggaacagcaacaaccucgacuccaaggucgggggcaacuacaacuaccuguuccgccuguuccgcaagagcaaccucaagcccuucgagcgggacaucuccaccgagaucuaccaggccggcaacacccccugcaacgggguggagggcuucaacugcuacuucccccugcaguccuacggguuccagccgaccaacggcgugggguaccagcccuaccggguggucgugcugagcuucgagcuccugcacgcccccgccacggugugcggccccaagaaguccaccaaccuggucaagaacaagugcgugaacuucaacuucaacggccucaccgggaccggcgugcugaccgagagcaacaagaaguuccugccguuccagcaguucgggcgcgacaucgccgacacgaccgacgcgguccgcgacccccagacccuggagauccucgacaucacccccugcagcuucggcgggguguccgugaucacgccgggcaccaacaccagcaaccaggucgccgugcuguaccagggcgugaacugcaccgagguccccguggccauccacgccgaccagcugacgcccaccuggcggguguacuccaccggcagcaacgucuuccagacccgcgccgggugccucaucggcgcggagcacgugaacaacuccuacgagugcgacauccccaucggggccggcaucugcgccagcuaccagacgcagaccaacuccccgcggcgcgcccggagcguggcgucccagagcgucaucgccuacaccaugucccugggcgccgagaacagcgucgccuacuccaacaacagcaucgccauccccaccaacuucacgaucuccgugaccaccgagauccugcccgugagcaugaccaagacgagcgucgacugcaccauguacaucugcggggacuccaccgagugcagcaaccuccugcugcaguacggcuccuucugcacccagcucaaccgcgcgcugacggggaucgccguggagcaggacaagaacacccaggagguguucgcccaggucaagcagaucuacaagacgcccccgaucaaggacuucggcggguucaacuucagccagauccugcccgaccccuccaagcccagcaagcgguccuucaucgaggaccuccuguucaacaaggugacccuggccgacgccggcuucaucaagcaguacggcgacugccucggggacaucgcggcccgcgaccugaucugcgcccagaaguucaacggccugaccgugcucccgccccugcugaccgacgagaugaucgcccaguacaccagcgcccuccuggcggggaccaucacguccggcuggaccuucggggccggcgccgcccugcagauccccuucgcgaugcagauggccuaccgguucaacggcaucggggucacccagaacgugcucuacgagaaccagaagcugaucgccaaccaguucaacagcgccaucggcaagauccaggacucccugagcuccaccgccagcgcgcucgggaagcugcaggacguggucaaccagaacgcccaggcccugaacacgcucgugaagcagcuguccagcaacuucggcgccaucuccagcgugcugaacgacauccucucccgccuggacccgcccgaggccgaggugcagaucgaccggcugaucaccgggcgccuccagagccugcagaccuacgugacccagcagcugauccgggcggccgagauccgcgccagcgccaaccucgccgcgaccaagauguccgagugcguccugggccagagcaagcggguggacuucugcggcaagggguaccaccugauguccuucccccagagcgccccgcacggcguggucuuccuccacgugacguacguccccgcccaggagaagaacuucaccaccgcccccgcgaucugccacgacgggaaggcccacuucccccgcgagggcguguucguguccaacgggacccacugguucgucacgcagcggaacuucuacgagccgcagaucaucaccaccgacaacaccuucgugagcggcaacugcgacguggucaucggcaucgugaacaacacgguguacgacccccugcagcccgagcuggacuccuucaaggaggagcucgacaaguacuucaagaaccacaccagccccgacgucgaccugggggacaucuccggcaucaacgccagcguggugaacauccagaaggagaucgaccgccugaacgaggucgccaagaaccucaacgagucccugaucgaccugcaggagcucgggaaguacgagcaguacaucaaguggccgugguacaucuggcugggcuucaucgccggccugaucgcgaucgugauggugaccaucaugcucugcugcaugaccagcugcugcuccugccugaaggggugcugcagcugcggcuccugcugcaaguucgacgaggacgacagcgagcccguccugaagggggugaagcuccacuacacgugauaauaggcuggagccucgguggccuagcuucuugccccuugggccuccccccagccccuccuccccuuccugcacccguacccccguggucuuugaauaaagucugagugggcggcaaaaaaaaaaaaaaaaaaaaaaaaaaaaaaaaaaaaaaaaaaaaaaaaaaaaaaaaaaaaaaaaaaaaaaaaaaaaaaaaaaaaaaaaaaaaaaaaaaaa

SEQ ID NO: 26168 - RNA, 4089 nt, Artificial Sequence
  SARS-CoV-2/Wuhan/WIV05/2019__EPI_ISL_402128 spike protein mRNA gc (1-1273)(K986P_V987P_H69del_V70del_Y453F_D614G_I692V_M1229I)
gggaaauaagagagaaaagaagaguaagaagaaauauaagaccccggcgccgccaccauguucguguuccugguccuccugccccuggugagcucccagugcgugaaccucaccacccgcacgcagcugccgcccgccuacaccaacagcuucacccggggcgucuacuaccccgacaagguguuccgcuccagcgugcugcacuccacccaggaccucuuccugcccuucuucagcaacgucacgugguuccacgccaucuccgggaccaacggcaccaagcgguucgacaacccggugcugcccuucaacgacggggucuacuucgcgagcaccgagaaguccaacaucauccgcggcuggaucuucgggacgacccucgacagcaagacccagucccugcugaucgugaacaacgccaccaacguggucaucaaggugugcgaguuccaguucugcaacgaccccuuccucggcguguacuaccacaagaacaacaagagcuggauggaguccgaguuccgggucuacagcuccgccaacaacugcacguucgaguacgugagccagcccuuccugauggaccuggagggcaagcaggggaacuucaagaaccuccgcgaguucguguucaagaacaucgacggcuacuucaagaucuacuccaagcacaccccgaucaaccugguccgggaccugccccagggguucagcgcccucgagccccugguggaccugcccaucggcaucaacaucacccgcuuccagacccuccuggcccugcaccgguccuaccucacgccgggggacagcagcuccggcuggaccgcgggcgccgccgccuacuacgugggguaccugcagccccgcaccuuccugcucaaguacaacgagaacggcaccaucacggacgcggucgacugcgcccuggacccccugagcgagaccaagugcacccucaaguccuucaccguggagaaggggaucuaccagacgagcaacuuccgggugcagcccaccgaguccaucguccgcuucccgaacaucaccaaccugugccccuucggcgagguguucaacgccacccgguucgccagcgucuacgccuggaaccgcaagcggaucuccaacugcguggcggacuacagcgugcuguacaacuccgccagcuucuccacguucaagugcuacggcgucagccccaccaagcucaacgaccugugcuucaccaacguguacgccgacuccuucgugauccgcggggacgagguccggcagaucgcccccggccagaccgggaagaucgccgacuacaacuacaagcugccggacgacuucacgggcugcgugaucgcguggaacagcaacaaccucgacuccaaggucgggggcaacuacaacuaccuguuccgccuguuccgcaagagcaaccucaagcccuucgagcgggacaucuccaccgagaucuaccaggccggcagcacccccugcaacgggguggagggcuucaacugcuacuucccccugcaguccuacggguuccagccgaccaacggcgugggguaccagcccuaccggguggucgugcugagcuucgagcuccugcacgcccccgccacggugugcggccccaagaaguccaccaaccuggucaagaacaagugcgugaacuucaacuucaacggccucaccgggaccggcgugcugaccgagagcaacaagaaguuccugccguuccagcaguucgggcgcgacaucgccgacacgaccgacgcgguccgcgacccccagacccuggagauccucgacaucacccccugcagcuucggcgggguguccgugaucacgccgggcaccaacaccagcaaccaggucgccgugcuguaccagggcgugaacugcaccgagguccccguggccauccacgccgaccagcugacgcccaccuggcggguguacuccaccggcagcaacgucuuccagacccgcgccgggugccucaucggcgcggagcacgugaacaacuccuacgagugcgacauccccaucggggccggcaucugcgccagcuaccagacgcagaccaacuccccgcggcgcgcccggagcguggcgucccagagcgugaucgccuacaccaugucccugggcgccgagaacagcgucgccuacuccaacaacagcaucgccauccccaccaacuucacgaucuccgugaccaccgagauccugcccgugagcaugaccaagacgagcgucgacugcaccauguacaucugcggggacuccaccgagugcagcaaccuccugcugcaguacggcuccuucugcacccagcucaaccgcgcgcugacggggaucgccguggagcaggacaagaacacccaggagguguucgcccaggucaagcagaucuacaagacgcccccgaucaaggacuucggcggguucaacuucagccagauccugcccgaccccuccaagcccagcaagcgguccuucaucgaggaccuccuguucaacaaggugacccuggccgacgccggcuucaucaagcaguacggcgacugccucggggacaucgcggcccgcgaccugaucugcgcccagaaguucaacggccugaccgugcucccgccccugcugaccgacgagaugaucgcccaguacaccagcgcccuccuggcggggaccaucacguccggcuggaccuucggggccggcgccgcccugcagauccccuucgcgaugcagauggccuaccgguucaacggcaucggggucacccagaacgugcucuacgagaaccagaagcugaucgccaaccaguucaacagcgccaucggcaagauccaggacucccugagcuccaccgccagcgcgcucgggaagcugcaggacguggucaaccagaacgcccaggcccugaacacgcucgugaagcagcuguccagcaacuucggcgccaucuccagcgugcugaacgacauccucucccgccuggacccgcccgaggccgaggugcagaucgaccggcugaucaccgggcgccuccagagccugcagaccuacgugacccagcagcugauccgggcggccgagauccgcgccagcgccaaccucgccgcgaccaagauguccgagugcguccugggccagagcaagcggguggacuucugcggcaagggguaccaccugauguccuucccccagagcgccccgcacggcguggucuuccuccacgugacguacguccccgcccaggagaagaacuucaccaccgcccccgcgaucugccacgacgggaaggcccacuucccccgcgagggcguguucguguccaacgggacccacugguucgucacgcagcggaacuucuacgagccgcagaucaucaccaccgacaacaccuucgugagcggcaacugcgacguggucaucggcaucgugaacaacacgguguacgacccccugcagcccgagcuggacuccuucaaggaggagcucgacaaguacuucaagaaccacaccagccccgacgucgaccugggggacaucuccggcaucaacgccagcguggugaacauccagaaggagaucgaccgccugaacgaggucgccaagaaccucaacgagucccugaucgaccugcaggagcucgggaaguacgagcaguacaucaaguggccgugguacaucuggcugggcuucaucgccggccugaucgcgaucgugaucgugaccaucaugcucugcugcaugaccagcugcugcuccugccugaaggggugcugcagcugcggcuccugcugcaaguucgacgaggacgacagcgagcccguccugaagggggugaagcuccacuacacgugauaauaggcuggagccucgguggccuagcuucuugccccuugggccuccccccagccccuccuccccuuccugcacccguacccccguggucuuugaauaaagucugagugggcggcaaaaaaaaaaaaaaaaaaaaaaaaaaaaaaaaaaaaaaaaaaaaaaaaaaaaaaaaaaaaaaaaaaaaaaaaaaaaaaaaaaaaaaaaaaaaaaaaaaaa

SEQ ID NO: 26169 - RNA, 4086 nt, Artificial Sequence
  SARS-CoV-2/Wuhan/WIV05/2019__EPI_ISL_402128 spike protein mRNA gc (1-1273)(K986P_V987P_K986P_V987P_H69del_V70del_Y144del_N501Y_A570 D_D614G_P681H_T716I_S982A_D1118H)
gggaaauaagagagaaaagaagaguaagaagaaauauaagaccccggcgccgccaccauguucguguuccugguccuccugccccuggugagcucccagugcgugaaccucaccacccgcacgcagcugccgcccgccuacaccaacagcuucacccggggcgucuacuaccccgacaagguguuccgcuccagcgugcugcacuccacccaggaccucuuccugcccuucuucagcaacgucacgugguuccacgccaucuccgggaccaacggcaccaagcgguucgacaacccggugcugcccuucaacgacggggucuacuucgcgagcaccgagaaguccaacaucauccgcggcuggaucuucgggacgacccucgacagcaagacccagucccugcugaucgugaacaacgccaccaacguggucaucaaggugugcgaguuccaguucugcaacgaccccuuccucggcguguaccacaagaacaacaagagcuggauggaguccgaguuccgggucuacagcuccgccaacaacugcacguucgaguacgugagccagcccuuccugauggaccuggagggcaagcaggggaacuucaagaaccuccgcgaguucguguucaagaacaucgacggcuacuucaagaucuacuccaagcacaccccgaucaaccugguccgggaccugccccagggguucagcgcccucgagccccugguggaccugcccaucggcaucaacaucacccgcuuccagacccuccuggcccugcaccgguccuaccucacgccgggggacagcagcuccggcuggaccgcgggcgccgccgccuacuacgugggguaccugcagccccgcaccuuccugcucaaguacaacgagaacggcaccaucacggacgcggucgacugcgcccuggacccccugagcgagaccaagugcacccucaaguccuucaccguggagaaggggaucuaccagacgagcaacuuccgggugcagcccaccgaguccaucguccgcuucccgaacaucaccaaccugugccccuucggcgagguguucaacgccacccgguucgccagcgucuacgccuggaaccgcaagcggaucuccaacugcguggcggacuacagcgugcuguacaacuccgccagcuucuccacguucaagugcuacggcgucagccccaccaagcucaacgaccugugcuucaccaacguguacgccgacuccuucgugauccgcggggacgagguccggcagaucgcccccggccagaccgggaagaucgccgacuacaacuacaagcugccggacgacuucacgggcugcgugaucgcguggaacagcaacaaccucgacuccaaggucgggggcaacuacaacuaccuguaccgccuguuccgcaagagcaaccucaagcccuucgagcgggacaucuccaccgagaucuaccaggccggcagcacccccugcaacgggguggagggcuucaacugcuacuucccccugcaguccuacggguuccagccgaccuacggcgugggguaccagcccuaccggguggucgugcugagcuucgagcuccugcacgcccccgccacggugugcggccccaagaaguccaccaaccuggucaagaacaagugcgugaacuucaacuucaacggccucaccgggaccggcgugcugaccgagagcaacaagaaguuccugccguuccagcaguucgggcgcgacaucgacgacacgaccgacgcgguccgcgacccccagacccuggagauccucgacaucacccccugcagcuucggcgggguguccgugaucacgccgggcaccaacaccagcaaccaggucgccgugcuguaccagggcgugaacugcaccgagguccccguggccauccacgccgaccagcugacgcccaccuggcggguguacuccaccggcagcaacgucuuccagacccgcgccgggugccucaucggcgcggagcacgugaacaacuccuacgagugcgacauccccaucggggccggcaucugcgccagcuaccagacgcagaccaacucccaccggcgcgcccggagcguggcgucccagagcaucaucgccuacaccaugucccugggcgccgagaacagcgucgccuacuccaacaacagcaucgccauccccaucaacuucacgaucuccgugaccaccgagauccugcccgugagcaugaccaagacgagcgucgacugcaccauguacaucugcggggacuccaccgagugcagcaaccuccugcugcaguacggcuccuucugcacccagcucaaccgcgcgcugacggggaucgccguggagcaggacaagaacacccaggagguguucgcccaggucaagcagaucuacaagacgcccccgaucaaggacuucggcggguucaacuucagccagauccugcccgaccccuccaagcccagcaagcgguccuucaucgaggaccuccuguucaacaaggugacccuggccgacgccggcuucaucaagcaguacggcgacugccucggggacaucgcggcccgcgaccugaucugcgcccagaaguucaacggccugaccgugcucccgccccugcugaccgacgagaugaucgcccaguacaccagcgcccuccuggcggggaccaucacguccggcuggaccuucggggccggcgccgcccugcagauccccuucgcgaugcagauggccuaccgguucaacggcaucggggucacccagaacgugcucuacgagaaccagaagcugaucgccaaccaguucaacagcgccaucggcaagauccaggacucccugagcuccaccgccagcgcgcucgggaagcugcaggacguggucaaccagaacgcccaggcccugaacacgcucgugaagcagcuguccagcaacuucggcgccaucuccagcgugcugaacgacauccucgcccgccuggacccgcccgaggccgaggugcagaucgaccggcugaucaccgggcgccuccagagccugcagaccuacgugacccagcagcugauccgggcggccgagauccgcgccagcgccaaccucgccgcgaccaagauguccgagugcguccugggccagagcaagcggguggacuucugcggcaagggguaccaccugauguccuucccccagagcgccccgcacggcguggucuuccuccacgugacguacguccccgcccaggagaagaacuucaccaccgcccccgcgaucugccacgacgggaaggcccacuucccccgcgagggcguguucguguccaacgggacccacugguucgucacgcagcggaacuucuacgagccgcagaucaucaccacccacaacaccuucgugagcggcaacugcgacguggucaucggcaucgugaacaacacgguguacgacccccugcagcccgagcuggacuccuucaaggaggagcucgacaaguacuucaagaaccacaccagccccgacgucgaccugggggacaucuccggcaucaacgccagcguggugaacauccagaaggagaucgaccgccugaacgaggucgccaagaaccucaacgagucccugaucgaccugcaggagcucgggaaguacgagcaguacaucaaguggccgugguacaucuggcugggcuucaucgccggccugaucgcgaucgugauggugaccaucaugcucugcugcaugaccagcugcugcuccugccugaaggggugcugcagcugcggcuccugcugcaaguucgacgaggacgacagcgagcccguccugaagggggugaagcuccacuacacgugauaauaggcuggagccucgguggccuagcuucuugccccuugggccuccccccagccccuccuccccuuccugcacccguacccccguggucuuugaauaaagucugagugggcggcaaaaaaaaaaaaaaaaaaaaaaaaaaaaaaaaaaaaaaaaaaaaaaaaaaaaaaaaaaaaaaaaaaaaaaaaaaaaaaaaaaaaaaaaaaaaaaaaaaaa

SEQ ID NO: 26170 - RNA, 4095 nt, Artificial Sequence
  SARS-CoV-2/Wuhan/WIV05/2019__EPI_ISL_402128 spike protein mRNA gc (1-1273)(K986P_V987P_K986P_V987P_K417N_E484K_N501Y_D614G)
gggaaauaagagagaaaagaagaguaagaagaaauauaagaccccggcgccgccaccauguucguguuccugguccuccugccccuggugagcucccagugcgugaaccucaccacccgcacgcagcugccgcccgccuacaccaacagcuucacccggggcgucuacuaccccgacaagguguuccgcuccagcgugcugcacuccacccaggaccucuuccugcccuucuucagcaacgucacgugguuccacgccauccacguguccgggaccaacggcaccaagcgguucgacaacccggugcugcccuucaacgacggggucuacuucgcgagcaccgagaaguccaacaucauccgcggcuggaucuucgggacgacccucgacagcaagacccagucccugcugaucgugaacaacgccaccaacguggucaucaaggugugcgaguuccaguucugcaacgaccccuuccucggcguguacuaccacaagaacaacaagagcuggauggaguccgaguuccgggucuacagcuccgccaacaacugcacguucgaguacgugagccagcccuuccugauggaccuggagggcaagcaggggaacuucaagaaccuccgcgaguucguguucaagaacaucgacggcuacuucaagaucuacuccaagcacaccccgaucaaccugguccgggaccugccccagggguucagcgcccucgagccccugguggaccugcccaucggcaucaacaucacccgcuuccagacccuccuggcccugcaccgguccuaccucacgccgggggacagcagcuccggcuggaccgcgggcgccgccgccuacuacgugggguaccugcagccccgcaccuuccugcucaaguacaacgagaacggcaccaucacggacgcggucgacugcgcccuggacccccugagcgagaccaagugcacccucaaguccuucaccguggagaaggggaucuaccagacgagcaacuuccgggugcagcccaccgaguccaucguccgcuucccgaacaucaccaaccugugccccuucggcgagguguucaacgccacccgguucgccagcgucuacgccuggaaccgcaagcggaucuccaacugcguggcggacuacagcgugcuguacaacuccgccagcuucuccacguucaagugcuacggcgucagccccaccaagcucaacgaccugugcuucaccaacguguacgccgacuccuucgugauccgcggggacgagguccggcagaucgcccccggccagaccgggaacaucgccgacuacaacuacaagcugccggacgacuucacgggcugcgugaucgcguggaacagcaacaaccucgacuccaaggucgggggcaacuacaacuaccuguaccgccuguuccgcaagagcaaccucaagcccuucgagcgggacaucuccaccgagaucuaccaggccggcagcacccccugcaacggggugaagggcuucaacugcuacuucccccugcaguccuacggguuccagccgaccuacggcgugggguaccagcccuaccggguggucgugcugagcuucgagcuccugcacgcccccgccacggugugcggccccaagaaguccaccaaccuggucaagaacaagugcgugaacuucaacuucaacggccucaccgggaccggcgugcugaccgagagcaacaagaaguuccugccguuccagcaguucgggcgcgacaucgccgacacgaccgacgcgguccgcgacccccagacccuggagauccucgacaucacccccugcagcuucggcgggguguccgugaucacgccgggcaccaacaccagcaaccaggucgccgugcuguaccagggcgugaacugcaccgagguccccguggccauccacgccgaccagcugacgcccaccuggcggguguacuccaccggcagcaacgucuuccagacccgcgccgggugccucaucggcgcggagcacgugaacaacuccuacgagugcgacauccccaucggggccggcaucugcgccagcuaccagacgcagaccaacuccccgcggcgcgcccggagcguggcgucccagagcaucaucgccuacaccaugucccugggcgccgagaacagcgucgccuacuccaacaacagcaucgccauccccaccaacuucacgaucuccgugaccaccgagauccugcccgugagcaugaccaagacgagcgucgacugcaccauguacaucugcggggacuccaccgagugcagcaaccuccugcugcaguacggcuccuucugcacccagcucaaccgcgcgcugacggggaucgccguggagcaggacaagaacacccaggagguguucgcccaggucaagcagaucuacaagacgcccccgaucaaggacuucggcggguucaacuucagccagauccugcccgaccccuccaagcccagcaagcgguccuucaucgaggaccuccuguucaacaaggugacccuggccgacgccggcuucaucaagcaguacggcgacugccucggggacaucgcggcccgcgaccugaucugcgcccagaaguucaacggccugaccgugcucccgccccugcugaccgacgagaugaucgcccaguacaccagcgcccuccuggcggggaccaucacguccggcuggaccuucggggccggcgccgcccugcagauccccuucgcgaugcagauggccuaccgguucaacggcaucggggucacccagaacgugcucuacgagaaccagaagcugaucgccaaccaguucaacagcgccaucggcaagauccaggacucccugagcuccaccgccagcgcgcucgggaagcugcaggacguggucaaccagaacgcccaggcccugaacacgcucgugaagcagcuguccagcaacuucggcgccaucuccagcgugcugaacgacauccucucccgccuggacccgcccgaggccgaggugcagaucgaccggcugaucaccgggcgccuccagagccugcagaccuacgugacccagcagcugauccgggcggccgagauccgcgccagcgccaaccucgccgcgaccaagauguccgagugcguccugggccagagcaagcggguggacuucugcggcaagggguaccaccugauguccuucccccagagcgccccgcacggcguggucuuccuccacgugacguacguccccgcccaggagaagaacuucaccaccgcccccgcgaucugccacgacgggaaggcccacuucccccgcgagggcguguucguguccaacgggacccacugguucgucacgcagcggaacuucuacgagccgcagaucaucaccaccgacaacaccuucgugagcggcaacugcgacguggucaucggcaucgugaacaacacgguguacgacccccugcagcccgagcuggacuccuucaaggaggagcucgacaaguacuucaagaaccacaccagccccgacgucgaccugggggacaucuccggcaucaacgccagcguggugaacauccagaaggagaucgaccgccugaacgaggucgccaagaaccucaacgagucccugaucgaccugcaggagcucgggaaguacgagcaguacaucaaguggccgugguacaucuggcugggcuucaucgccggccugaucgcgaucgugauggugaccaucaugcucugcugcaugaccagcugcugcuccugccugaaggggugcugcagcugcggcuccugcugcaaguucgacgaggacgacagcgagcccguccugaagggggugaagcuccacuacacgugauaauaggcuggagccucgguggccuagcuucuugccccuugggccuccccccagccccuccuccccuuccugcacccguacccccguggucuuugaauaaagucugagugggcggcaaaaaaaaaaaaaaaaaaaaaaaaaaaaaaaaaaaaaaaaaaaaaaaaaaaaaaaaaaaaaaaaaaaaaaaaaaaaaaaaaaaaaaaaaaaaaaaaaaaa

SEQ ID NO: 26171 - RNA, 4086 nt, Artificial Sequence
  SARS-CoV-2/Wuhan/WIV05/2019__EPI_ISL_402128 spike protein mRNA gc (1-1273)(K986P_V987P_K986P_V987P_L18F_D80A_D215G_L242del_A243del_ L244del_R246I_K417N_E484K_N501Y_D614G_A701V)
gggaaauaagagagaaaagaagaguaagaagaaauauaagaccccggcgccgccaccauguucguguuccugguccuccugccccuggugagcucccagugcgugaacuucaccacccgcacgcagcugccgcccgccuacaccaacagcuucacccggggcgucuacuaccccgacaagguguuccgcuccagcgugcugcacuccacccaggaccucuuccugcccuucuucagcaacgucacgugguuccacgccauccacguguccgggaccaacggcaccaagcgguucgccaacccggugcugcccuucaacgacggggucuacuucgcgagcaccgagaaguccaacaucauccgcggcuggaucuucgggacgacccucgacagcaagacccagucccugcugaucgugaacaacgccaccaacguggucaucaaggugugcgaguuccaguucugcaacgaccccuuccucggcguguacuaccacaagaacaacaagagcuggauggaguccgaguuccgggucuacagcuccgccaacaacugcacguucgaguacgugagccagcccuuccugauggaccuggagggcaagcaggggaacuucaagaaccuccgcgaguucguguucaagaacaucgacggcuacuucaagaucuacuccaagcacaccccgaucaaccugguccggggccugccccagggguucagcgcccucgagccccugguggaccugcccaucggcaucaacaucacccgcuuccagacccuccacaucuccuaccucacgccgggggacagcagcuccggcuggaccgcgggcgccgccgccuacuacgugggguaccugcagccccgcaccuuccugcucaaguacaacgagaacggcaccaucacggacgcggucgacugcgcccuggacccccugagcgagaccaagugcacccucaaguccuucaccguggagaaggggaucuaccagacgagcaacuuccgggugcagcccaccgaguccaucguccgcuucccgaacaucaccaaccugugccccuucggcgagguguucaacgccacccgguucgccagcgucuacgccuggaaccgcaagcggaucuccaacugcguggcggacuacagcgugcuguacaacuccgccagcuucuccacguucaagugcuacggcgucagccccaccaagcucaacgaccugugcuucaccaacguguacgccgacuccuucgugauccgcggggacgagguccggcagaucgcccccggccagaccgggaacaucgccgacuacaacuacaagcugccggacgacuucacgggcugcgugaucgcguggaacagcaacaaccucgacuccaaggucgggggcaacuacaacuaccuguaccgccuguuccgcaagagcaaccucaagcccuucgagcgggacaucuccaccgagaucuaccaggccggcagcacccccugcaacggggugaagggcuucaacugcuacuucccccugcaguccuacggguuccagccgaccuacggcgugggguaccagcccuaccggguggucgugcugagcuucgagcuccugcacgcccccgccacggugugcggccccaagaaguccaccaaccuggucaagaacaagugcgugaacuucaacuucaacggccucaccgggaccggcgugcugaccgagagcaacaagaaguuccugccguuccagcaguucgggcgcgacaucgccgacacgaccgacgcgguccgcgacccccagacccuggagauccucgacaucacccccugcagcuucggcgggguguccgugaucacgccgggcaccaacaccagcaaccaggucgccgugcuguaccagggcgugaacugcaccgagguccccguggccauccacgccgaccagcugacgcccaccuggcggguguacuccaccggcagcaacgucuuccagacccgcgccgggugccucaucggcgcggagcacgugaacaacuccuacgagugcgacauccccaucggggccggcaucugcgccagcuaccagacgcagaccaacuccccgcggcgcgcccggagcguggcgucccagagcaucaucgccuacaccaugucccugggcguggagaacagcgucgccuacuccaacaacagcaucgccauccccaccaacuucacgaucuccgugaccaccgagauccugcccgugagcaugaccaagacgagcgucgacugcaccauguacaucugcggggacuccaccgagugcagcaaccuccugcugcaguacggcuccuucugcacccagcucaaccgcgcgcugacggggaucgccguggagcaggacaagaacacccaggagguguucgcccaggucaagcagaucuacaagacgcccccgaucaaggacuucggcggguucaacuucagccagauccugcccgaccccuccaagcccagcaagcgguccuucaucgaggaccuccuguucaacaaggugacccuggccgacgccggcuucaucaagcaguacggcgacugccucggggacaucgcggcccgcgaccugaucugcgcccagaaguucaacggccugaccgugcucccgccccugcugaccgacgagaugaucgcccaguacaccagcgcccuccuggcggggaccaucacguccggcuggaccuucggggccggcgccgcccugcagauccccuucgcgaugcagauggccuaccgguucaacggcaucggggucacccagaacgugcucuacgagaaccagaagcugaucgccaaccaguucaacagcgccaucggcaagauccaggacucccugagcuccaccgccagcgcgcucgggaagcugcaggacguggucaaccagaacgcccaggcccugaacacgcucgugaagcagcuguccagcaacuucggcgccaucuccagcgugcugaacgacauccucucccgccuggacccgcccgaggccgaggugcagaucgaccggcugaucaccgggcgccuccagagccugcagaccuacgugacccagcagcugauccgggcggccgagauccgcgccagcgccaaccucgccgcgaccaagauguccgagugcguccugggccagagcaagcggguggacuucugcggcaagggguaccaccugauguccuucccccagagcgccccgcacggcguggucuuccuccacgugacguacguccccgcccaggagaagaacuucaccaccgcccccgcgaucugccacgacgggaaggcccacuucccccgcgagggcguguucguguccaacgggacccacugguucgucacgcagcggaacuucuacgagccgcagaucaucaccaccgacaacaccuucgugagcggcaacugcgacguggucaucggcaucgugaacaacacgguguacgacccccugcagcccgagcuggacuccuucaaggaggagcucgacaaguacuucaagaaccacaccagccccgacgucgaccugggggacaucuccggcaucaacgccagcguggugaacauccagaaggagaucgaccgccugaacgaggucgccaagaaccucaacgagucccugaucgaccugcaggagcucgggaaguacgagcaguacaucaaguggccgugguacaucuggcugggcuucaucgccggccugaucgcgaucgugauggugaccaucaugcucugcugcaugaccagcugcugcuccugccugaaggggugcugcagcugcggcuccugcugcaaguucgacgaggacgacagcgagcccguccugaagggggugaagcuccacuacacgugauaauaggcuggagccucgguggccuagcuucuugccccuugggccuccccccagccccuccuccccuuccugcacccguacccccguggucuuugaauaaagucugagugggcggcaaaaaaaaaaaaaaaaaaaaaaaaaaaaaaaaaaaaaaaaaaaaaaaaaaaaaaaaaaaaaaaaaaaaaaaaaaaaaaaaaaaaaaaaaaaaaaaaaaaa

SEQ ID NO: 26172 - RNA, 4095 nt, Artificial Sequence
  SARS-CoV-2/Wuhan/WIV05/2019__EPI_ISL_402128 spike protein mRNA gc (1-1273)(K986P_V987P_K986P_V987P_E484K_D614G)
gggaaauaagagagaaaagaagaguaagaagaaauauaagaccccggcgccgccaccauguucguguuccugguccuccugccccuggugagcucccagugcgugaaccucaccacccgcacgcagcugccgcccgccuacaccaacagcuucacccggggcgucuacuaccccgacaagguguuccgcuccagcgugcugcacuccacccaggaccucuuccugcccuucuucagcaacgucacgugguuccacgccauccacguguccgggaccaacggcaccaagcgguucgacaacccggugcugcccuucaacgacggggucuacuucgcgagcaccgagaaguccaacaucauccgcggcuggaucuucgggacgacccucgacagcaagacccagucccugcugaucgugaacaacgccaccaacguggucaucaaggugugcgaguuccaguucugcaacgaccccuuccucggcguguacuaccacaagaacaacaagagcuggauggaguccgaguuccgggucuacagcuccgccaacaacugcacguucgaguacgugagccagcccuuccugauggaccuggagggcaagcaggggaacuucaagaaccuccgcgaguucguguucaagaacaucgacggcuacuucaagaucuacuccaagcacaccccgaucaaccugguccgggaccugccccagggguucagcgcccucgagccccugguggaccugcccaucggcaucaacaucacccgcuuccagacccuccuggcccugcaccgguccuaccucacgccgggggacagcagcuccggcuggaccgcgggcgccgccgccuacuacgugggguaccugcagccccgcaccuuccugcucaaguacaacgagaacggcaccaucacggacgcggucgacugcgcccuggacccccugagcgagaccaagugcacccucaaguccuucaccguggagaaggggaucuaccagacgagcaacuuccgggugcagcccaccgaguccaucguccgcuucccgaacaucaccaaccugugccccuucggcgagguguucaacgccacccgguucgccagcgucuacgccuggaaccgcaagcggaucuccaacugcguggcggacuacagcgugcuguacaacuccgccagcuucuccacguucaagugcuacggcgucagccccaccaagcucaacgaccugugcuucaccaacguguacgccgacuccuucgugauccgcggggacgagguccggcagaucgcccccggccagaccgggaagaucgccgacuacaacuacaagcugccggacgacuucacgggcugcgugaucgcguggaacagcaacaaccucgacuccaaggucgggggcaacuacaacuaccuguaccgccuguuccgcaagagcaaccucaagcccuucgagcgggacaucuccaccgagaucuaccaggccggcagcacccccugcaacggggugaagggcuucaacugcuacuucccccugcaguccuacggguuccagccgaccaacggcgugggguaccagcccuaccggguggucgugcugagcuucgagcuccugcacgcccccgccacggugugcggccccaagaaguccaccaaccuggucaagaacaagugcgugaacuucaacuucaacggccucaccgggaccggcgugcugaccgagagcaacaagaaguuccugccguuccagcaguucgggcgcgacaucgccgacacgaccgacgcgguccgcgacccccagacccuggagauccucgacaucacccccugcagcuucggcgggguguccgugaucacgccgggcaccaacaccagcaaccaggucgccgugcuguaccagggcgugaacugcaccgagguccccguggccauccacgccgaccagcugacgcccaccuggcggguguacuccaccggcagcaacgucuuccagacccgcgccgggugccucaucggcgcggagcacgugaacaacuccuacgagugcgacauccccaucggggccggcaucugcgccagcuaccagacgcagaccaacuccccgcggcgcgcccggagcguggcgucccagagcaucaucgccuacaccaugucccugggcgccgagaacagcgucgccuacuccaacaacagcaucgccauccccaccaacuucacgaucuccgugaccaccgagauccugcccgugagcaugaccaagacgagcgucgacugcaccauguacaucugcggggacuccaccgagugcagcaaccuccugcugcaguacggcuccuucugcacccagcucaaccgcgcgcugacggggaucgccguggagcaggacaagaacacccaggagguguucgcccaggucaagcagaucuacaagacgcccccgaucaaggacuucggcggguucaacuucagccagauccugcccgaccccuccaagcccagcaagcgguccuucaucgaggaccuccuguucaacaaggugacccuggccgacgccggcuucaucaagcaguacggcgacugccucggggacaucgcggcccgcgaccugaucugcgcccagaaguucaacggccugaccgugcucccgccccugcugaccgacgagaugaucgcccaguacaccagcgcccuccuggcggggaccaucacguccggcuggaccuucggggccggcgccgcccugcagauccccuucgcgaugcagauggccuaccgguucaacggcaucggggucacccagaacgugcucuacgagaaccagaagcugaucgccaaccaguucaacagcgccaucggcaagauccaggacucccugagcuccaccgccagcgcgcucgggaagcugcaggacguggucaaccagaacgcccaggcccugaacacgcucgugaagcagcuguccagcaacuucggcgccaucuccagcgugcugaacgacauccucucccgccuggacccgcccgaggccgaggugcagaucgaccggcugaucaccgggcgccuccagagccugcagaccuacgugacccagcagcugauccgggcggccgagauccgcgccagcgccaaccucgccgcgaccaagauguccgagugcguccugggccagagcaagcggguggacuucugcggcaagggguaccaccugauguccuucccccagagcgccccgcacggcguggucuuccuccacgugacguacguccccgcccaggagaagaacuucaccaccgcccccgcgaucugccacgacgggaaggcccacuucccccgcgagggcguguucguguccaacgggacccacugguucgucacgcagcggaacuucuacgagccgcagaucaucaccaccgacaacaccuucgugagcggcaacugcgacguggucaucggcaucgugaacaacacgguguacgacccccugcagcccgagcuggacuccuucaaggaggagcucgacaaguacuucaagaaccacaccagccccgacgucgaccugggggacaucuccggcaucaacgccagcguggugaacauccagaaggagaucgaccgccugaacgaggucgccaagaaccucaacgagucccugaucgaccugcaggagcucgggaaguacgagcaguacaucaaguggccgugguacaucuggcugggcuucaucgccggccugaucgcgaucgugauggugaccaucaugcucugcugcaugaccagcugcugcuccugccugaaggggugcugcagcugcggcuccugcugcaaguucgacgaggacgacagcgagcccguccugaagggggugaagcuccacuacacgugauaauaggcuggagccucgguggccuagcuucuugccccuugggccuccccccagccccuccuccccuuccugcacccguacccccguggucuuugaauaaagucugagugggcggcaaaaaaaaaaaaaaaaaaaaaaaaaaaaaaaaaaaaaaaaaaaaaaaaaaaaaaaaaaaaaaaaaaaaaaaaaaaaaaaaaaaaaaaaaaaaaaaaaaaa

SEQ ID NO: 26173 - RNA, 4095 nt, Artificial Sequence
  SARS-CoV-2/Wuhan/WIV05/2019__EPI_ISL_402128 spike protein mRNA gc (1-1273)(K986P_V987P_K986P_V987P_L18F_T20N_P26S_D138Y_R190S_K417T _E484K_N501Y_D614G_H655Y_T1027I)
gggaaauaagagagaaaagaagaguaagaagaaauauaagaccccggcgccgccaccauguucguguuccugguccuccugccccuggugagcucccagugcgugaacuucaccaaccgcacgcagcugccgagcgccuacaccaacagcuucacccggggcgucuacuaccccgacaagguguuccgcuccagcgugcugcacuccacccaggaccucuuccugcccuucuucagcaacgucacgugguuccacgccauccacguguccgggaccaacggcaccaagcgguucgacaacccggugcugcccuucaacgacggggucuacuucgcgagcaccgagaaguccaacaucauccgcggcuggaucuucgggacgacccucgacagcaagacccagucccugcugaucgugaacaacgccaccaacguggucaucaaggugugcgaguuccaguucugcaacuaccccuuccucggcguguacuaccacaagaacaacaagagcuggauggaguccgaguuccgggucuacagcuccgccaacaacugcacguucgaguacgugagccagcccuuccugauggaccuggagggcaagcaggggaacuucaagaaccucagcgaguucguguucaagaacaucgacggcuacuucaagaucuacuccaagcacaccccgaucaaccugguccgggaccugccccagggguucagcgcccucgagccccugguggaccugcccaucggcaucaacaucacccgcuuccagacccuccuggcccugcaccgguccuaccucacgccgggggacagcagcuccggcuggaccgcgggcgccgccgccuacuacgugggguaccugcagccccgcaccuuccugcucaaguacaacgagaacggcaccaucacggacgcggucgacugcgcccuggacccccugagcgagaccaagugcacccucaaguccuucaccguggagaaggggaucuaccagacgagcaacuuccgggugcagcccaccgaguccaucguccgcuucccgaacaucaccaaccugugccccuucggcgagguguucaacgccacccgguucgccagcgucuacgccuggaaccgcaagcggaucuccaacugcguggcggacuacagcgugcuguacaacuccgccagcuucuccacguucaagugcuacggcgucagccccaccaagcucaacgaccugugcuucaccaacguguacgccgacuccuucgugauccgcggggacgagguccggcagaucgcccccggccagaccgggaccaucgccgacuacaacuacaagcugccggacgacuucacgggcugcgugaucgcguggaacagcaacaaccucgacuccaaggucgggggcaacuacaacuaccuguaccgccuguuccgcaagagcaaccucaagcccuucgagcgggacaucuccaccgagaucuaccaggccggcagcacccccugcaacggggugaagggcuucaacugcuacuucccccugcaguccuacggguuccagccgaccuacggcgugggguaccagcccuaccggguggucgugcugagcuucgagcuccugcacgcccccgccacggugugcggccccaagaaguccaccaaccuggucaagaacaagugcgugaacuucaacuucaacggccucaccgggaccggcgugcugaccgagagcaacaagaaguuccugccguuccagcaguucgggcgcgacaucgccgacacgaccgacgcgguccgcgacccccagacccuggagauccucgacaucacccccugcagcuucggcgggguguccgugaucacgccgggcaccaacaccagcaaccaggucgccgugcuguaccagggcgugaacugcaccgagguccccguggccauccacgccgaccagcugacgcccaccuggcggguguacuccaccggcagcaacgucuuccagacccgcgccgggugccucaucggcgcggaguacgugaacaacuccuacgagugcgacauccccaucggggccggcaucugcgccagcuaccagacgcagaccaacuccccgcggcgcgcccggagcguggcgucccagagcaucaucgccuacaccaugucccugggcgccgagaacagcgucgccuacuccaacaacagcaucgccauccccaccaacuucacgaucuccgugaccaccgagauccugcccgugagcaugaccaagacgagcgucgacugcaccauguacaucugcggggacuccaccgagugcagcaaccuccugcugcaguacggcuccuucugcacccagcucaaccgcgcgcugacggggaucgccguggagcaggacaagaacacccaggagguguucgcccaggucaagcagaucuacaagacgcccccgaucaaggacuucggcggguucaacuucagccagauccugcccgaccccuccaagcccagcaagcgguccuucaucgaggaccuccuguucaacaaggugacccuggccgacgccggcuucaucaagcaguacggcgacugccucggggacaucgcggcccgcgaccugaucugcgcccagaaguucaacggccugaccgugcucccgccccugcugaccgacgagaugaucgcccaguacaccagcgcccuccuggcggggaccaucacguccggcuggaccuucggggccggcgccgcccugcagauccccuucgcgaugcagauggccuaccgguucaacggcaucggggucacccagaacgugcucuacgagaaccagaagcugaucgccaaccaguucaacagcgccaucggcaagauccaggacucccugagcuccaccgccagcgcgcucgggaagcugcaggacguggucaaccagaacgcccaggcccugaacacgcucgugaagcagcuguccagcaacuucggcgccaucuccagcgugcugaacgacauccucucccgccuggacccgcccgaggccgaggugcagaucgaccggcugaucaccgggcgccuccagagccugcagaccuacgugacccagcagcugauccgggcggccgagauccgcgccagcgccaaccucgccgcgaucaagauguccgagugcguccugggccagagcaagcggguggacuucugcggcaagggguaccaccugauguccuucccccagagcgccccgcacggcguggucuuccuccacgugacguacguccccgcccaggagaagaacuucaccaccgcccccgcgaucugccacgacgggaaggcccacuucccccgcgagggcguguucguguccaacgggacccacugguucgucacgcagcggaacuucuacgagccgcagaucaucaccaccgacaacaccuucgugagcggcaacugcgacguggucaucggcaucgugaacaacacgguguacgacccccugcagcccgagcuggacuccuucaaggaggagcucgacaaguacuucaagaaccacaccagccccgacgucgaccugggggacaucuccggcaucaacgccagcguggugaacauccagaaggagaucgaccgccugaacgaggucgccaagaaccucaacgagucccugaucgaccugcaggagcucgggaaguacgagcaguacaucaaguggccgugguacaucuggcugggcuucaucgccggccugaucgcgaucgugauggugaccaucaugcucugcugcaugaccagcugcugcuccugccugaaggggugcugcagcugcggcuccugcugcaaguucgacgaggacgacagcgagcccguccugaagggggugaagcuccacuacacgugauaauaggcuggagccucgguggccuagcuucuugccccuugggccuccccccagccccuccuccccuuccugcacccguacccccguggucuuugaauaaagucugagugggcggcaaaaaaaaaaaaaaaaaaaaaaaaaaaaaaaaaaaaaaaaaaaaaaaaaaaaaaaaaaaaaaaaaaaaaaaaaaaaaaaaaaaaaaaaaaaaaaaaaaaa

SEQ ID NO: 26174 - RNA, 4095 nt, Artificial Sequence
  SARS-CoV-2/Wuhan/WIV05/2019__EPI_ISL_402128 spike protein mRNA gc (1-1273)(K986P_V987P_K986P_V987P_S13I_W152C_L452R_D614G)
gggaaauaagagagaaaagaagaguaagaagaaauauaagaccccggcgccgccaccauguucguguuccugguccuccugccccuggugagcauccagugcgugaaccucaccacccgcacgcagcugccgcccgccuacaccaacagcuucacccggggcgucuacuaccccgacaagguguuccgcuccagcgugcugcacuccacccaggaccucuuccugcccuucuucagcaacgucacgugguuccacgccauccacguguccgggaccaacggcaccaagcgguucgacaacccggugcugcccuucaacgacggggucuacuucgcgagcaccgagaaguccaacaucauccgcggcuggaucuucgggacgacccucgacagcaagacccagucccugcugaucgugaacaacgccaccaacguggucaucaaggugugcgaguuccaguucugcaacgaccccuuccucggcguguacuaccacaagaacaacaagagcugcauggaguccgaguuccgggucuacagcuccgccaacaacugcacguucgaguacgugagccagcccuuccugauggaccuggagggcaagcaggggaacuucaagaaccuccgcgaguucguguucaagaacaucgacggcuacuucaagaucuacuccaagcacaccccgaucaaccugguccgggaccugccccagggguucagcgcccucgagccccugguggaccugcccaucggcaucaacaucacccgcuuccagacccuccuggcccugcaccgguccuaccucacgccgggggacagcagcuccggcuggaccgcgggcgccgccgccuacuacgugggguaccugcagccccgcaccuuccugcucaaguacaacgagaacggcaccaucacggacgcggucgacugcgcccuggacccccugagcgagaccaagugcacccucaaguccuucaccguggagaaggggaucuaccagacgagcaacuuccgggugcagcccaccgaguccaucguccgcuucccgaacaucaccaaccugugccccuucggcgagguguucaacgccacccgguucgccagcgucuacgccuggaaccgcaagcggaucuccaacugcguggcggacuacagcgugcuguacaacuccgccagcuucuccacguucaagugcuacggcgucagccccaccaagcucaacgaccugugcuucaccaacguguacgccgacuccuucgugauccgcggggacgagguccggcagaucgcccccggccagaccgggaagaucgccgacuacaacuacaagcugccggacgacuucacgggcugcgugaucgcguggaacagcaacaaccucgacuccaaggucgggggcaacuacaacuaccgcuaccgccuguuccgcaagagcaaccucaagcccuucgagcgggacaucuccaccgagaucuaccaggccggcagcacccccugcaacgggguggagggcuucaacugcuacuucccccugcaguccuacggguuccagccgaccaacggcgugggguaccagcccuaccggguggucgugcugagcuucgagcuccugcacgcccccgccacggugugcggccccaagaaguccaccaaccuggucaagaacaagugcgugaacuucaacuucaacggccucaccgggaccggcgugcugaccgagagcaacaagaaguuccugccguuccagcaguucgggcgcgacaucgccgacacgaccgacgcgguccgcgacccccagacccuggagauccucgacaucacccccugcagcuucggcgggguguccgugaucacgccgggcaccaacaccagcaaccaggucgccgugcuguaccagggcgugaacugcaccgagguccccguggccauccacgccgaccagcugacgcccaccuggcggguguacuccaccggcagcaacgucuuccagacccgcgccgggugccucaucggcgcggagcacgugaacaacuccuacgagugcgacauccccaucggggccggcaucugcgccagcuaccagacgcagaccaacuccccgcggcgcgcccggagcguggcgucccagagcaucaucgccuacaccaugucccugggcgccgagaacagcgucgccuacuccaacaacagcaucgccauccccaccaacuucacgaucuccgugaccaccgagauccugcccgugagcaugaccaagacgagcgucgacugcaccauguacaucugcggggacuccaccgagugcagcaaccuccugcugcaguacggcuccuucugcacccagcucaaccgcgcgcugacggggaucgccguggagcaggacaagaacacccaggagguguucgcccaggucaagcagaucuacaagacgcccccgaucaaggacuucggcggguucaacuucagccagauccugcccgaccccuccaagcccagcaagcgguccuucaucgaggaccuccuguucaacaaggugacccuggccgacgccggcuucaucaagcaguacggcgacugccucggggacaucgcggcccgcgaccugaucugcgcccagaaguucaacggccugaccgugcucccgccccugcugaccgacgagaugaucgcccaguacaccagcgcccuccuggcggggaccaucacguccggcuggaccuucggggccggcgccgcccugcagauccccuucgcgaugcagauggccuaccgguucaacggcaucggggucacccagaacgugcucuacgagaaccagaagcugaucgccaaccaguucaacagcgccaucggcaagauccaggacucccugagcuccaccgccagcgcgcucgggaagcugcaggacguggucaaccagaacgcccaggcccugaacacgcucgugaagcagcuguccagcaacuucggcgccaucuccagcgugcugaacgacauccucucccgccuggacccgcccgaggccgaggugcagaucgaccggcugaucaccgggcgccuccagagccugcagaccuacgugacccagcagcugauccgggcggccgagauccgcgccagcgccaaccucgccgcgaccaagauguccgagugcguccugggccagagcaagcggguggacuucugcggcaagggguaccaccugauguccuucccccagagcgccccgcacggcguggucuuccuccacgugacguacguccccgcccaggagaagaacuucaccaccgcccccgcgaucugccacgacgggaaggcccacuucccccgcgagggcguguucguguccaacgggacccacugguucgucacgcagcggaacuucuacgagccgcagaucaucaccaccgacaacaccuucgugagcggcaacugcgacguggucaucggcaucgugaacaacacgguguacgacccccugcagcccgagcuggacuccuucaaggaggagcucgacaaguacuucaagaaccacaccagccccgacgucgaccugggggacaucuccggcaucaacgccagcguggugaacauccagaaggagaucgaccgccugaacgaggucgccaagaaccucaacgagucccugaucgaccugcaggagcucgggaaguacgagcaguacaucaaguggccgugguacaucuggcugggcuucaucgccggccugaucgcgaucgugauggugaccaucaugcucugcugcaugaccagcugcugcuccugccugaaggggugcugcagcugcggcuccugcugcaaguucgacgaggacgacagcgagcccguccugaagggggugaagcuccacuacacgugauaauaggcuggagccucgguggccuagcuucuugccccuugggccuccccccagccccuccuccccuuccugcacccguacccccguggucuuugaauaaagucugagugggcggcaaaaaaaaaaaaaaaaaaaaaaaaaaaaaaaaaaaaaaaaaaaaaaaaaaaaaaaaaaaaaaaaaaaaaaaaaaaaaaaaaaaaaaaaaaaaaaaaaaaa

SEQ ID NO: 26175 - RNA, 4095 nt, Artificial Sequence
  SARS-CoV-2/Wuhan/WIV05/2019__EPI_ISL_402128 spike protein mRNA gc (1-1273)(K986P_V987P)
gggaaauaagagagaaaagaagaguaagaagaaauauaagaccccggcgccgccaccauguucguguuccugguccuccugccccuggugagcucccagugcgugaaccucaccacccgcacgcagcugccgcccgccuacaccaacagcuucacccggggcgucuacuaccccgacaagguguuccgcuccagcgugcugcacuccacccaggaccucuuccugcccuucuucagcaacgucacgugguuccacgccauccacguguccgggaccaacggcaccaagcgguucgacaacccggugcugcccuucaacgacggggucuacuucgcgagcaccgagaaguccaacaucauccgcggcuggaucuucgggacgacccucgacagcaagacccagucccugcugaucgugaacaacgccaccaacguggucaucaaggugugcgaguuccaguucugcaacgaccccuuccucggcguguacuaccacaagaacaacaagagcuggauggaguccgaguuccgggucuacagcuccgccaacaacugcacguucgaguacgugagccagcccuuccugauggaccuggagggcaagcaggggaacuucaagaaccuccgcgaguucguguucaagaacaucgacggcuacuucaagaucuacuccaagcacaccccgaucaaccugguccgggaccugccccagggguucagcgcccucgagccccugguggaccugcccaucggcaucaacaucacccgcuuccagacccuccuggcccugcaccgguccuaccucacgccgggggacagcagcuccggcuggaccgcgggcgccgccgccuacuacgugggguaccugcagccccgcaccuuccugcucaaguacaacgagaacggcaccaucacggacgcggucgacugcgcccuggacccccugagcgagaccaagugcacccucaaguccuucaccguggagaaggggaucuaccagacgagcaacuuccgggugcagcccaccgaguccaucguccgcuucccgaacaucaccaaccugugccccuucggcgagguguucaacgccacccgguucgccagcgucuacgccuggaaccgcaagcggaucuccaacugcguggcggacuacagcgugcuguacaacuccgccagcuucuccacguucaagugcuacggcgucagccccaccaagcucaacgaccugugcuucaccaacguguacgccgacuccuucgugauccgcggggacgagguccggcagaucgcccccggccagaccgggaagaucgccgacuacaacuacaagcugccggacgacuucacgggcugcgugaucgcguggaacagcaacaaccucgacuccaaggucgggggcaacuacaacuaccuguaccgccuguuccgcaagagcaaccucaagcccuucgagcgggacaucuccaccgagaucuaccaggccggcagcacccccugcaacgggguggagggcuucaacugcuacuucccccugcaguccuacggguuccagccgaccaacggcgugggguaccagcccuaccggguggucgugcugagcuucgagcuccugcacgcccccgccacggugugcggccccaagaaguccaccaaccuggucaagaacaagugcgugaacuucaacuucaacggccucaccgggaccggcgugcugaccgagagcaacaagaaguuccugccguuccagcaguucgggcgcgacaucgccgacacgaccgacgcgguccgcgacccccagacccuggagauccucgacaucacccccugcagcuucggcgggguguccgugaucacgccgggcaccaacaccagcaaccaggucgccgugcuguaccaggacgugaacugcaccgagguccccguggccauccacgccgaccagcugacgcccaccuggcggguguacuccaccggcagcaacgucuuccagacccgcgccgggugccucaucggcgcggagcacgugaacaacuccuacgagugcgacauccccaucggggccggcaucugcgccagcuaccagacgcagaccaacuccccgcggcgcgcccggagcguggcgucccagagcaucaucgccuacaccaugucccugggcgccgagaacagcgucgccuacuccaacaacagcaucgccauccccaccaacuucacgaucuccgugaccaccgagauccugcccgugagcaugaccaagacgagcgucgacugcaccauguacaucugcggggacuccaccgagugcagcaaccuccugcugcaguacggcuccuucugcacccagcucaaccgcgcgcugacggggaucgccguggagcaggacaagaacacccaggagguguucgcccaggucaagcagaucuacaagacgcccccgaucaaggacuucggcggguucaacuucagccagauccugcccgaccccuccaagcccagcaagcgguccuucaucgaggaccuccuguucaacaaggugacccuggccgacgccggcuucaucaagcaguacggcgacugccucggggacaucgcggcccgcgaccugaucugcgcccagaaguucaacggccugaccgugcucccgccccugcugaccgacgagaugaucgcccaguacaccagcgcccuccuggcggggaccaucacguccggcuggaccuucggggccggcgccgcccugcagauccccuucgcgaugcagauggccuaccgguucaacggcaucggggucacccagaacgugcucuacgagaaccagaagcugaucgccaaccaguucaacagcgccaucggcaagauccaggacucccugagcuccaccgccagcgcgcucgggaagcugcaggacguggucaaccagaacgcccaggcccugaacacgcucgugaagcagcuguccagcaacuucggcgccaucuccagcgugcugaacgacauccucucccgccuggacccgcccgaggccgagguccagaucgaccggcugaucaccgggcgccuccagagccugcagaccuacgugacccagcagcugauccgggcggccgagauccgcgccagcgccaaccucgccgcgaccaagauguccgagugcgugcugggccagagcaagcgggucgacuucugcggcaagggguaccaccugauguccuucccccagagcgcgccccacggcgugguguuccuccacgucacguacgugcccgcccaggagaagaacuucaccaccgccccggccaucugccacgacgggaaggcccacuucccccgcgagggcgucuucguguccaacgggacccacugguucgugacgcagcggaacuucuacgagccccagaucaucaccaccgacaacaccuucgucagcggcaacugcgacguggugaucggcaucgucaacaacacgguguacgacccccugcagccggagcuggacuccuucaaggaggagcucgacaaguacuucaagaaccacaccagccccgacguggaccugggggacaucuccggcaucaacgccagcgucgugaacauccagaaggagaucgaccgccugaacgagguggccaagaaccucaacgagucccugaucgaccugcaggagcucgggaaguacgagcaguacaucaaguggcccugguacaucuggcugggcuucaucgccggccugaucgcgaucgucauggugaccaucaugcucugcugcaugaccagcugcugcuccugccugaaggggugcugcagcugcggcuccugcugcaaguucgacgaggacgacagcgagccggugcugaagggggucaagcuccacuacacgugauaauaggcuggagccucgguggccuagcuucuugccccuugggccuccccccagccccuccuccccuuccugcacccguacccccguggucuuugaauaaagucugagugggcggcaaaaaaaaaaaaaaaaaaaaaaaaaaaaaaaaaaaaaaaaaaaaaaaaaaaaaaaaaaaaaaaaaaaaaaaaaaaaaaaaaaaaaaaaaaaaaaaaaaaa

SEQ ID NO: 26176 - RNA, 4095 nt, Artificial Sequence
  SARS-CoV-2/Wuhan/WIV05/2019__EPI_ISL_402128 spike protein mRNA gc (1-1273)(K986P_V987P_ D614G)
gggaaauaagagagaaaagaagaguaagaagaaauauaagaccccggcgccgccaccauguucguguuccugguccuccugccccuggugagcucccagugcgugaaccucaccacccgcacgcagcugccgcccgccuacaccaacagcuucacccggggcgucuacuaccccgacaagguguuccgcuccagcgugcugcacuccacccaggaccucuuccugcccuucuucagcaacgucacgugguuccacgccauccacguguccgggaccaacggcaccaagcgguucgacaacccggugcugcccuucaacgacggggucuacuucgcgagcaccgagaaguccaacaucauccgcggcuggaucuucgggacgacccucgacagcaagacccagucccugcugaucgugaacaacgccaccaacguggucaucaaggugugcgaguuccaguucugcaacgaccccuuccucggcguguacuaccacaagaacaacaagagcuggauggaguccgaguuccgggucuacagcuccgccaacaacugcacguucgaguacgugagccagcccuuccugauggaccuggagggcaagcaggggaacuucaagaaccuccgcgaguucguguucaagaacaucgacggcuacuucaagaucuacuccaagcacaccccgaucaaccugguccgggaccugccccagggguucagcgcccucgagccccugguggaccugcccaucggcaucaacaucacccgcuuccagacccuccuggcccugcaccgguccuaccucacgccgggggacagcagcuccggcuggaccgcgggcgccgccgccuacuacgugggguaccugcagccccgcaccuuccugcucaaguacaacgagaacggcaccaucacggacgcggucgacugcgcccuggacccccugagcgagaccaagugcacccucaaguccuucaccguggagaaggggaucuaccagacgagcaacuuccgggugcagcccaccgaguccaucguccgcuucccgaacaucaccaaccugugccccuucggcgagguguucaacgccacccgguucgccagcgucuacgccuggaaccgcaagcggaucuccaacugcguggcggacuacagcgugcuguacaacuccgccagcuucuccacguucaagugcuacggcgucagccccaccaagcucaacgaccugugcuucaccaacguguacgccgacuccuucgugauccgcggggacgagguccggcagaucgcccccggccagaccgggaagaucgccgacuacaacuacaagcugccggacgacuucacgggcugcgugaucgcguggaacagcaacaaccucgacuccaaggucgggggcaacuacaacuaccuguaccgccuguuccgcaagagcaaccucaagcccuucgagcgggacaucuccaccgagaucuaccaggccggcagcacccccugcaacgggguggagggcuucaacugcuacuucccccugcaguccuacggguuccagccgaccaacggcgugggguaccagcccuaccggguggucgugcugagcuucgagcuccugcacgcccccgccacggugugcggccccaagaaguccaccaaccuggucaagaacaagugcgugaacuucaacuucaacggccucaccgggaccggcgugcugaccgagagcaacaagaaguuccugccguuccagcaguucgggcgcgacaucgccgacacgaccgacgcgguccgcgacccccagacccuggagauccucgacaucacccccugcagcuucggcgggguguccgugaucacgccgggcaccaacaccagcaaccaggucgccgugcuguaccagggcgugaacugcaccgagguccccguggccauccacgccgaccagcugacgcccaccuggcggguguacuccaccgggagcaacgucuuccagacccgcgccggcugccucaucggggcggagcacgugaacaacuccuacgagugcgacauccccaucggcgccggcaucugcgccagcuaccagacgcagaccaacuccccgcggcgcgcccggagcguggcgucccagagcaucaucgccuacaccaugucccugggggccgagaacagcgucgccuacuccaacaacagcaucgccauccccaccaacuucacgaucuccgugaccaccgagauccugcccgugagcaugaccaagacgagcgucgacugcaccauguacaucugcggcgacuccaccgagugcagcaaccuccugcugcaguacggguccuucugcacccagcucaaccgcgcgcugacgggcaucgccguggagcaggacaagaacacccaggagguguucgcccaggucaagcagaucuacaagacgcccccgaucaaggacuucgggggcuucaacuucagccagauccugcccgaccccuccaagcccagcaagcgguccuucaucgaggaccuccuguucaacaaggugacccuggccgacgccggcuucaucaagcaguacggggacugccucggcgacaucgcggcccgcgaccugaucugcgcccagaaguucaacgggcugaccgugcucccgccccugcugaccgacgagaugaucgcccaguacaccagcgcccuccuggcgggcaccaucacguccggguggaccuucggcgccggcgccgcccugcagauccccuucgcgaugcagauggccuaccgguucaacgggaucggcgucacccagaacgugcucuacgagaaccagaagcugaucgccaaccaguucaacagcgccaucgggaagauccaggacucccugagcuccaccgccagcgcgcucggcaagcugcaggacguggucaaccagaacgcccaggcccugaacacgcucgugaagcagcuguccagcaacuucggggccaucuccagcgugcugaacgacauccucucccgccuggacccgcccgaggccgagguccagaucgaccggcugaucaccggccgccuccagagccugcagaccuacgugacccagcagcugauccgggcggccgagauccgcgccagcgccaaccucgccgcgaccaagauguccgagugcgugcugggccagagcaagcgggucgacuucugcgggaagggcuaccaccugauguccuucccccagagcgcgccccacggggugguguuccuccacgucacguacgugcccgcccaggagaagaacuucaccaccgccccggccaucugccacgacggcaaggcccacuucccccgcgagggggucuucguguccaacggcacccacugguucgugacgcagcggaacuucuacgagccccagaucaucaccaccgacaacaccuucgucagcggcaacugcgacguggugaucgggaucgucaacaacacgguguacgacccccugcagccggagcuggacuccuucaaggaggagcucgacaaguacuucaagaaccacaccagccccgacguggaccugggcgacaucuccgggaucaacgccagcgucgugaacauccagaaggagaucgaccgccugaacgagguggccaagaaccucaacgagucccugaucgaccugcaggagcucggcaaguacgagcaguacaucaaguggcccugguacaucuggcugggcuucaucgccgggcugaucgcgaucgucauggugaccaucaugcucugcugcaugaccagcugcugcuccugccugaagggcugcugcagcugcggguccugcugcaaguucgacgaggacgacagcgagccggugcugaagggcgucaagcuccacuacacgugauaauaggcuggagccucgguggccuagcuucuugccccuugggccuccccccagccccuccuccccuuccugcacccguacccccguggucuuugaauaaagucugagugggcggcaaaaaaaaaaaaaaaaaaaaaaaaaaaaaaaaaaaaaaaaaaaaaaaaaaaaaaaaaaaaaaaaaaaaaaaaaaaaaaaaaaaaaaaaaaaaaaaaaaaa

SEQ ID NO: 26177 - RNA, 4095 nt, Artificial Sequence
  SARS-CoV-2/Wuhan/WIV05/2019__EPI_ISL_402128 spike protein mRNA gc (1-1273)(K986P_V987P_A222V_D614G)
gggaaauaagagagaaaagaagaguaagaagaaauauaagaccccggcgccgccaccauguucguguuccugguccuccugccccuggugagcucccagugcgugaaccucaccacccgcacgcagcugccgcccgccuacaccaacagcuucacccggggcgucuacuaccccgacaagguguuccgcuccagcgugcugcacuccacccaggaccucuuccugcccuucuucagcaacgucacgugguuccacgccauccacguguccgggaccaacggcaccaagcgguucgacaacccggugcugcccuucaacgacggggucuacuucgcgagcaccgagaaguccaacaucauccgcggcuggaucuucgggacgacccucgacagcaagacccagucccugcugaucgugaacaacgccaccaacguggucaucaaggugugcgaguuccaguucugcaacgaccccuuccucggcguguacuaccacaagaacaacaagagcuggauggaguccgaguuccgggucuacagcuccgccaacaacugcacguucgaguacgugagccagcccuuccugauggaccuggagggcaagcaggggaacuucaagaaccuccgcgaguucguguucaagaacaucgacggcuacuucaagaucuacuccaagcacaccccgaucaaccugguccgggaccugccccagggguucagcgugcucgagccccugguggaccugcccaucggcaucaacaucacccgcuuccagacccuccuggcccugcaccgguccuaccucacgccgggggacagcagcuccggcuggaccgccggcgcggccgccuacuacgucggguaccugcagccccgcaccuuccugcucaaguacaacgagaacggcaccaucacggacgccguggacugcgcgcuggacccccugagcgagaccaagugcacccucaaguccuucaccguggagaaggggaucuaccagacgagcaacuuccggguccagcccaccgaguccaucgugcgcuucccgaacaucaccaaccugugccccuucggcgaggucuucaacgccacccgguucgccagcguguacgccuggaaccgcaagcggaucuccaacugcguggccgacuacagcguccuguacaacuccgcgagcuucuccacguucaagugcuacggcgugagccccaccaagcucaacgaccugugcuucaccaacguguacgccgacuccuucgucauccgcggggacgaggugcggcagaucgcccccggccagaccgggaagaucgccgacuacaacuacaagcugccggacgacuucacgggcugcgugaucgccuggaacagcaacaaccucgacuccaaggucgggggcaacuacaacuaccuguaccgccuguuccgcaagagcaaccucaagcccuucgagcgggacaucuccaccgagaucuaccaggcgggcagcacccccugcaacgggguggagggcuucaacugcuacuucccccugcaguccuacggguuccagccgaccaacggcgugggguaccagcccuaccgggucguggugcugagcuucgagcuccugcacgcccccgccacggucugcggccccaagaaguccaccaaccuggugaagaacaagugcgugaacuucaacuucaacggccucaccgggaccggcguccugaccgagagcaacaagaaguuccugccguuccagcaguucgggcgcgacaucgccgacacgaccgacgccgugcgcgacccccagacccuggagauccucgacaucacccccugcagcuucggcgggguguccgucaucacgccgggcaccaacaccagcaaccagguggcggugcuguaccagggcgucaacugcaccgaggugcccguggccauccacgccgaccagcugacgcccaccuggcgggucuacuccaccgggagcaacguguuccagacccgcgccggcugccucaucggggccgagcacgugaacaacuccuacgagugcgacauccccaucggcgcgggcaucugcgccagcuaccagacgcagaccaacuccccgcggcgcgcccggagcgucgccucccagagcaucaucgcguacaccaugucccugggggccgagaacagcguggccuacuccaacaacagcaucgccauccccaccaacuucacgaucuccgugaccaccgagauccugcccgucagcaugaccaagacgagcguggacugcaccauguacaucugcggcgacuccaccgagugcagcaaccuccugcugcaguacggguccuucugcacccagcucaaccgcgcccugacgggcaucgcgguggagcaggacaagaacacccaggaggucuucgcccaggugaagcagaucuacaagacgcccccgaucaaggacuucgggggcuucaacuucagccagauccugcccgaccccuccaagcccagcaagcgguccuucaucgaggaccuccuguucaacaaggugacccuggccgacgccggcuucaucaagcaguacggggacugccucggcgacaucgccgcgcgcgaccugaucugcgcccagaaguucaacgggcugaccguccucccgccccugcugaccgacgagaugaucgcccaguacaccagcgcccuccuggccggcaccaucacguccggguggaccuucggcgcgggcgccgcccugcagauccccuucgccaugcagauggcguaccgguucaacgggaucggcgugacccagaacgugcucuacgagaaccagaagcugaucgccaaccaguucaacagcgccaucgggaagauccaggacucccugagcuccaccgccagcgcccucggcaagcugcaggacgucgugaaccagaacgcgcaggcccugaacacgcucgugaagcagcuguccagcaacuucggggccaucuccagcguccugaacgacauccucucccgccuggacccgcccgaggccgaggugcagaucgaccggcugaucaccggccgccuccagagccugcagaccuacgugacccagcagcugauccgggccgcggagauccgcgccagcgccaaccucgccgccaccaagauguccgagugcguccugggccagagcaagcggguggacuucugcgggaagggcuaccaccugauguccuucccccagagcgcgccccacgggguggucuuccuccacgugacguacguccccgcccaggagaagaacuucaccaccgccccggccaucugccacgacggcaaggcgcacuucccccgcgaggggguguucguguccaacggcacccacugguucgucacgcagcggaacuucuacgagccccagaucaucaccaccgacaacaccuucgugagcggcaacugcgacguggucaucgggaucgugaacaacacgguguacgacccccugcagccggagcuggacuccuucaaggaggagcucgacaaguacuucaagaaccacaccagccccgacgucgaccugggcgacaucuccgggaucaacgccagcguggugaacauccagaaggagaucgaccgccugaacgaggucgccaagaaccucaacgagucccugaucgaccugcaggagcucggcaaguacgagcaguacaucaaguggcccugguacaucuggcugggcuucaucgccgggcugaucgccaucgugauggugaccaucaugcucugcugcaugaccagcugcugcuccugccugaagggcugcugcagcugcggguccugcugcaaguucgacgaggacgacagcgagccgguccugaagggcgugaagcuccacuacacgugauaauaggcuggagccucgguggccuagcuucuugccccuugggccuccccccagccccuccuccccuuccugcacccguacccccguggucuuugaauaaagucugagugggcggcaaaaaaaaaaaaaaaaaaaaaaaaaaaaaaaaaaaaaaaaaaaaaaaaaaaaaaaaaaaaaaaaaaaaaaaaaaaaaaaaaaaaaaaaaaaaaaaaaaaa

SEQ ID NO: 26178 - RNA, 4095 nt, Artificial Sequence
  SARS-CoV-2/Wuhan/WIV05/2019__EPI_ISL_402128 spike protein mRNA gc (1-1273)(K986P_V987P_N439K_D614G)
gggaaauaagagagaaaagaagaguaagaagaaauauaagaccccggcgccgccaccauguucguguuccugguccuccugccccuggugagcucccagugcgugaaccucaccacccgcacgcagcugccgcccgccuacaccaacagcuucacccggggcgucuacuaccccgacaagguguuccgcuccagcgugcugcacuccacccaggaccucuuccugcccuucuucagcaacgucacgugguuccacgccauccacguguccgggaccaacggcaccaagcgguucgacaacccggugcugcccuucaacgacggggucuacuucgcgagcaccgagaaguccaacaucauccgcggcuggaucuucgggacgacccucgacagcaagacccagucccugcugaucgugaacaacgccaccaacguggucaucaaggugugcgaguuccaguucugcaacgaccccuuccucggcguguacuaccacaagaacaacaagagcuggauggaguccgaguuccgggucuacagcuccgccaacaacugcacguucgaguacgugagccagcccuuccugauggaccuggagggcaagcaggggaacuucaagaaccuccgcgaguucguguucaagaacaucgacggcuacuucaagaucuacuccaagcacaccccgaucaaccugguccgggaccugccccagggguucagcgcccucgagccccugguggaccugcccaucggcaucaacaucacccgcuuccagacccuccuggcccugcaccgguccuaccucacgccgggggacagcagcuccggcuggaccgcgggcgccgccgccuacuacgugggguaccugcagccccgcaccuuccugcucaaguacaacgagaacggcaccaucacggacgcggucgacugcgcccuggacccccugagcgagaccaagugcacccucaaguccuucaccguggagaaggggaucuaccagacgagcaacuuccgggugcagcccaccgaguccaucguccgcuucccgaacaucaccaaccugugccccuucggcgagguguucaacgccacccgguucgccagcgucuacgccuggaaccgcaagcggaucuccaacugcguggcggacuacagcgugcuguacaacuccgccagcuucuccacguucaagugcuacggcgucagccccaccaagcucaacgaccugugcuucaccaacguguacgccgacuccuucgugauccgcggggacgagguccggcagaucgcccccggccagaccgggaagaucgccgacuacaacuacaagcugccggacgacuucacgggcugcgugaucgcguggaacagcaagaaccucgacuccaaggucgggggcaacuacaacuaccuguaccgccuguuccgcaagagcaaccucaagcccuucgagcgggacaucuccaccgagaucuaccaggccggcagcacccccugcaacgggguggagggcuucaacugcuacuucccccugcaguccuacggguuccagccgaccaacggcgugggguaccagcccuaccggguggucgugcugagcuucgagcuccugcacgcccccgccacggugugcggccccaagaaguccaccaaccuggucaagaacaagugcgugaacuucaacuucaacggccucaccgggaccggcgugcugaccgagagcaacaagaaguuccugccguuccagcaguucgggcgcgacaucgccgacacgaccgacgcgguccgcgacccccagacccuggagauccucgacaucacccccugcagcuucggcgggguguccgugaucacgccgggcaccaacaccagcaaccaggucgccgugcuguaccagggcgugaacugcaccgagguccccguggccauccacgccgaccagcugacgcccaccuggcggguguacuccaccgggagcaacgucuuccagacccgcgccggcugccucaucggggcggagcacgugaacaacuccuacgagugcgacauccccaucggcgccggcaucugcgccagcuaccagacgcagaccaacuccccgcggcgcgcccggagcguggcgucccagagcaucaucgccuacaccaugucccugggggccgagaacagcgucgccuacuccaacaacagcaucgccauccccaccaacuucacgaucuccgugaccaccgagauccugcccgugagcaugaccaagacgagcgucgacugcaccauguacaucugcggcgacuccaccgagugcagcaaccuccugcugcaguacggguccuucugcacccagcucaaccgcgcgcugacgggcaucgccguggagcaggacaagaacacccaggagguguucgcccaggucaagcagaucuacaagacgcccccgaucaaggacuucgggggcuucaacuucagccagauccugcccgaccccuccaagcccagcaagcgguccuucaucgaggaccuccuguucaacaaggugacccuggccgacgccggcuucaucaagcaguacggggacugccucggcgacaucgcggcccgcgaccugaucugcgcccagaaguucaacgggcugaccgugcucccgccccugcugaccgacgagaugaucgcccaguacaccagcgcccuccuggcgggcaccaucacguccggguggaccuucggcgccggcgccgcccugcagauccccuucgcgaugcagauggccuaccgguucaacgggaucggcgucacccagaacgugcucuacgagaaccagaagcugaucgccaaccaguucaacagcgccaucgggaagauccaggacucccugagcuccaccgccagcgcgcucggcaagcugcaggacguggucaaccagaacgcccaggcccugaacacgcucgugaagcagcuguccagcaacuucggggccaucuccagcgugcugaacgacauccucucccgccuggacccgcccgaggccgagguccagaucgaccggcugaucaccggccgccuccagagccugcagaccuacgugacccagcagcugauccgggcggccgagauccgcgccagcgccaaccucgccgcgaccaagauguccgagugcgugcugggccagagcaagcgggucgacuucugcgggaagggcuaccaccugauguccuucccccagagcgcgccccacggggugguguuccuccacgucacguacgugcccgcccaggagaagaacuucaccaccgccccggccaucugccacgacggcaaggcccacuucccccgcgagggggucuucguguccaacggcacccacugguucgugacgcagcggaacuucuacgagccccagaucaucaccaccgacaacaccuucgucagcggcaacugcgacguggugaucgggaucgucaacaacacgguguacgacccccugcagccggagcuggacuccuucaaggaggagcucgacaaguacuucaagaaccacaccagccccgacguggaccugggcgacaucuccgggaucaacgccagcgucgugaacauccagaaggagaucgaccgccugaacgagguggccaagaaccucaacgagucccugaucgaccugcaggagcucggcaaguacgagcaguacaucaaguggcccugguacaucuggcugggcuucaucgccgggcugaucgcgaucgucauggugaccaucaugcucugcugcaugaccagcugcugcuccugccugaagggcugcugcagcugcggguccugcugcaaguucgacgaggacgacagcgagccggugcugaagggcgucaagcuccacuacacgugauaauaggcuggagccucgguggccuagcuucuugccccuugggccuccccccagccccuccuccccuuccugcacccguacccccguggucuuugaauaaagucugagugggcggcaaaaaaaaaaaaaaaaaaaaaaaaaaaaaaaaaaaaaaaaaaaaaaaaaaaaaaaaaaaaaaaaaaaaaaaaaaaaaaaaaaaaaaaaaaaaaaaaaaaa

SEQ ID NO: 26179 - RNA, 4095 nt, Artificial Sequence
  SARS-CoV-2/Wuhan/WIV05/2019__EPI_ISL_402128 spike protein mRNA gc (1-1273)(K986P_V987P_S477N_D614G)
gggaaauaagagagaaaagaagaguaagaagaaauauaagaccccggcgccgccaccauguucguguuccugguccuccugccccuggugagcucccagugcgugaaccucaccacccgcacgcagcugccgcccgccuacaccaacagcuucacccggggcgucuacuaccccgacaagguguuccgcuccagcgugcugcacuccacccaggaccucuuccugcccuucuucagcaacgucacgugguuccacgccauccacguguccgggaccaacggcaccaagcgguucgacaacccggugcugcccuucaacgacggggucuacuucgcgagcaccgagaaguccaacaucauccgcggcuggaucuucgggacgacccucgacagcaagacccagucccugcugaucgugaacaacgccaccaacguggucaucaaggugugcgaguuccaguucugcaacgaccccuuccucggcguguacuaccacaagaacaacaagagcuggauggaguccgaguuccgggucuacagcuccgccaacaacugcacguucgaguacgugagccagcccuuccugauggaccuggagggcaagcaggggaacuucaagaaccuccgcgaguucguguucaagaacaucgacggcuacuucaagaucuacuccaagcacaccccgaucaaccugguccgggaccugccccagggguucagcgcccucgagccccugguggaccugcccaucggcaucaacaucacccgcuuccagacccuccuggcccugcaccgguccuaccucacgccgggggacagcagcuccggcuggaccgcgggcgccgccgccuacuacgugggguaccugcagccccgcaccuuccugcucaaguacaacgagaacggcaccaucacggacgcggucgacugcgcccuggacccccugagcgagaccaagugcacccucaaguccuucaccguggagaaggggaucuaccagacgagcaacuuccgggugcagcccaccgaguccaucguccgcuucccgaacaucaccaaccugugccccuucggcgagguguucaacgccacccgguucgccagcgucuacgccuggaaccgcaagcggaucuccaacugcguggcggacuacagcgugcuguacaacuccgccagcuucuccacguucaagugcuacggcgucagccccaccaagcucaacgaccugugcuucaccaacguguacgccgacuccuucgugauccgcggggacgagguccggcagaucgcccccggccagaccgggaagaucgccgacuacaacuacaagcugccggacgacuucacgggcugcgugaucgcguggaacagcaacaaccucgacuccaaggucgggggcaacuacaacuaccuguaccgccuguuccgcaagagcaaccucaagcccuucgagcgggacaucuccaccgagaucuaccaggccggcaacacccccugcaacgggguggagggcuucaacugcuacuucccccugcagagcuacggguuccagccgaccaacggcgugggguaccagcccuaccggguggucgugcuguccuucgagcuccugcacgcccccgccacggugugcggccccaagaaguccaccaaccuggucaagaacaagugcgugaacuucaacuucaacggccucaccgggaccggcgugcugaccgagagcaacaagaaguuccugccguuccagcaguucgggcgcgacaucgccgacacgaccgacgcgguccgcgacccccagacccuggagauccucgacaucacccccugcagcuucggcggggugagcgugaucacgccgggcaccaacaccuccaaccaggucgccgugcuguaccagggcgugaacugcaccgagguccccguggccauccacgccgaccagcugacgcccaccuggcggguguacagcaccggguccaacgucuuccagacccgcgccggcugccucaucggggcggagcacgugaacaacagcuacgagugcgacauccccaucggcgccggcaucugcgccuccuaccagacgcagaccaacagcccgcggcgcgcccgguccguggcgagccaguccaucaucgccuacaccaugagccugggggccgagaacuccgucgccuacagcaacaacuccaucgccauccccaccaacuucacgaucagcgugaccaccgagauccugcccguguccaugaccaagacgagcgucgacugcaccauguacaucugcggcgacagcaccgagugcuccaaccuccugcugcaguacgggagcuucugcacccagcucaaccgcgcgcugacgggcaucgccguggagcaggacaagaacacccaggagguguucgcccaggucaagcagaucuacaagacgcccccgaucaaggacuucgggggcuucaacuucucccagauccugcccgaccccagcaagcccuccaagcggagcuucaucgaggaccuccuguucaacaaggugacccuggccgacgccggcuucaucaagcaguacggggacugccucggcgacaucgcggcccgcgaccugaucugcgcccagaaguucaacgggcugaccgugcucccgccccugcugaccgacgagaugaucgcccaguacaccuccgcccuccuggcgggcaccaucacgagcggguggaccuucggcgccggcgccgcccugcagauccccuucgcgaugcagauggccuaccgguucaacgggaucggcgucacccagaacgugcucuacgagaaccagaagcugaucgccaaccaguucaacuccgccaucgggaagauccaggacagccuguccagcaccgccuccgcgcucggcaagcugcaggacguggucaaccagaacgcccaggcccugaacacgcucgugaagcagcugagcuccaacuucggggccaucagcuccgugcugaacgacauccucagccgccuggacccgcccgaggccgagguccagaucgaccggcugaucaccggccgccuccagucccugcagaccuacgugacccagcagcugauccgggcggccgagauccgcgccagcgccaaccucgccgcgaccaagaugagcgagugcgugcugggccaguccaagcgggucgacuucugcgggaagggcuaccaccugaugagcuucccccaguccgcgccccacggggugguguuccuccacgucacguacgugcccgcccaggagaagaacuucaccaccgccccggccaucugccacgacggcaaggcccacuucccccgcgagggggucuucgugagcaacggcacccacugguucgugacgcagcggaacuucuacgagccccagaucaucaccaccgacaacaccuucgucuccggcaacugcgacguggugaucgggaucgucaacaacacgguguacgacccccugcagccggagcuggacagcuucaaggaggagcucgacaaguacuucaagaaccacaccucccccgacguggaccugggcgacaucagcgggaucaacgccuccgucgugaacauccagaaggagaucgaccgccugaacgagguggccaagaaccucaacgagagccugaucgaccugcaggagcucggcaaguacgagcaguacaucaaguggcccugguacaucuggcugggcuucaucgccgggcugaucgcgaucgucauggugaccaucaugcucugcugcaugaccuccugcugcagcugccugaagggcugcugcuccugcgggagcugcugcaaguucgacgaggacgacuccgagccggugcugaagggcgucaagcuccacuacacgugauaauaggcuggagccucgguggccuagcuucuugccccuugggccuccccccagccccuccuccccuuccugcacccguacccccguggucuuugaauaaagucugagugggcggcaaaaaaaaaaaaaaaaaaaaaaaaaaaaaaaaaaaaaaaaaaaaaaaaaaaaaaaaaaaaaaaaaaaaaaaaaaaaaaaaaaaaaaaaaaaaaaaaaaaa

SEQ ID NO: 26180 - RNA, 4095 nt, Artificial Sequence
  SARS-CoV-2/Wuhan/WIV05/2019__EPI_ISL_402128 spike protein mRNA gc (1-1273)(K986P_V987P_N501Y_D614G)
gggaaauaagagagaaaagaagaguaagaagaaauauaagaccccggcgccgccaccauguucguguuccugguccuccugccccuggugagcucccagugcgugaaccucaccacccgcacgcagcugccgcccgccuacaccaacagcuucacccggggcgucuacuaccccgacaagguguuccgcuccagcgugcugcacuccacccaggaccucuuccugcccuucuucagcaacgucacgugguuccacgccauccacguguccgggaccaacggcaccaagcgguucgacaacccggugcugcccuucaacgacggggucuacuucgcgagcaccgagaaguccaacaucauccgcggcuggaucuucgggacgacccucgacagcaagacccagucccugcugaucgugaacaacgccaccaacguggucaucaaggugugcgaguuccaguucugcaacgaccccuuccucggcguguacuaccacaagaacaacaagagcuggauggaguccgaguuccgggucuacagcuccgccaacaacugcacguucgaguacgugagccagcccuuccugauggaccuggagggcaagcaggggaacuucaagaaccuccgcgaguucguguucaagaacaucgacggcuacuucaagaucuacuccaagcacaccccgaucaaccugguccgggaccugccccagggguucagcgcccucgagccccugguggaccugcccaucggcaucaacaucacccgcuuccagacccuccuggcccugcaccgguccuaccucacgccgggggacagcagcuccggcuggaccgcgggcgccgccgccuacuacgugggguaccugcagccccgcaccuuccugcucaaguacaacgagaacggcaccaucacggacgcggucgacugcgcccuggacccccugagcgagaccaagugcacccucaaguccuucaccguggagaaggggaucuaccagacgagcaacuuccgggugcagcccaccgaguccaucguccgcuucccgaacaucaccaaccugugccccuucggcgagguguucaacgccacccgguucgccagcgucuacgccuggaaccgcaagcggaucuccaacugcguggcggacuacagcgugcuguacaacuccgccagcuucuccacguucaagugcuacggcgucagccccaccaagcucaacgaccugugcuucaccaacguguacgccgacuccuucgugauccgcggggacgagguccggcagaucgcccccggccagaccgggaagaucgccgacuacaacuacaagcugccggacgacuucacgggcugcgugaucgcguggaacagcaacaaccucgacuccaaggucgggggcaacuacaacuaccuguaccgccuguuccgcaagagcaaccucaagcccuucgagcgggacaucuccaccgagaucuaccaggccggcagcacccccugcaacgggguggagggcuucaacugcuacuucccccugcaguccuacggguuccagccgaccuacggcgugggguaccagcccuaccggguggucgugcugagcuucgagcuccugcacgcccccgccacggugugcggccccaagaaguccaccaaccuggucaagaacaagugcgugaacuucaacuucaacggccucaccgggaccggcgugcugaccgagagcaacaagaaguuccugccguuccagcaguucgggcgcgacaucgccgacacgaccgacgcgguccgcgacccccagacccuggagauccucgacaucacccccugcagcuucggcgggguguccgugaucacgccgggcaccaacaccagcaaccaggucgccgugcuguaccagggcgugaacugcaccgagguccccguggccauccacgccgaccagcugacgcccaccuggcggguguacuccaccgggagcaacgucuuccagacccgcgccggcugccucaucggggcggagcacgugaacaacuccuacgagugcgacauccccaucggcgccggcaucugcgccagcuaccagacgcagaccaacuccccgcggcgcgcccggagcguggcgucccagagcaucaucgccuacaccaugucccugggggccgagaacagcgucgccuacuccaacaacagcaucgccauccccaccaacuucacgaucuccgugaccaccgagauccugcccgugagcaugaccaagacgagcgucgacugcaccauguacaucugcggcgacuccaccgagugcagcaaccuccugcugcaguacggguccuucugcacccagcucaaccgcgcgcugacgggcaucgccguggagcaggacaagaacacccaggagguguucgcccaggucaagcagaucuacaagacgcccccgaucaaggacuucgggggcuucaacuucagccagauccugcccgaccccuccaagcccagcaagcgguccuucaucgaggaccuccuguucaacaaggugacccuggccgacgccggcuucaucaagcaguacggggacugccucggcgacaucgcggcccgcgaccugaucugcgcccagaaguucaacgggcugaccgugcucccgccccugcugaccgacgagaugaucgcccaguacaccagcgcccuccuggcgggcaccaucacguccggguggaccuucggcgccggcgccgcccugcagauccccuucgcgaugcagauggccuaccgguucaacgggaucggcgucacccagaacgugcucuacgagaaccagaagcugaucgccaaccaguucaacagcgccaucgggaagauccaggacucccugagcuccaccgccagcgcgcucggcaagcugcaggacguggucaaccagaacgcccaggcccugaacacgcucgugaagcagcuguccagcaacuucggggccaucuccagcgugcugaacgacauccucucccgccuggacccgcccgaggccgagguccagaucgaccggcugaucaccggccgccuccagagccugcagaccuacgugacccagcagcugauccgggcggccgagauccgcgccagcgccaaccucgccgcgaccaagauguccgagugcgugcugggccagagcaagcgggucgacuucugcgggaagggcuaccaccugauguccuucccccagagcgcgccccacggggugguguuccuccacgucacguacgugcccgcccaggagaagaacuucaccaccgccccggccaucugccacgacggcaaggcccacuucccccgcgagggggucuucguguccaacggcacccacugguucgugacgcagcggaacuucuacgagccccagaucaucaccaccgacaacaccuucgucagcggcaacugcgacguggugaucgggaucgucaacaacacgguguacgacccccugcagccggagcuggacuccuucaaggaggagcucgacaaguacuucaagaaccacaccagccccgacguggaccugggcgacaucuccgggaucaacgccagcgucgugaacauccagaaggagaucgaccgccugaacgagguggccaagaaccucaacgagucccugaucgaccugcaggagcucggcaaguacgagcaguacaucaaguggcccugguacaucuggcugggcuucaucgccgggcugaucgcgaucgucauggugaccaucaugcucugcugcaugaccagcugcugcuccugccugaagggcugcugcagcugcggguccugcugcaaguucgacgaggacgacagcgagccggugcugaagggcgucaagcuccacuacacgugauaauaggcuggagccucgguggccuagcuucuugccccuugggccuccccccagccccuccuccccuuccugcacccguacccccguggucuuugaauaaagucugagugggcggcaaaaaaaaaaaaaaaaaaaaaaaaaaaaaaaaaaaaaaaaaaaaaaaaaaaaaaaaaaaaaaaaaaaaaaaaaaaaaaaaaaaaaaaaaaaaaaaaaaaa

SEQ ID NO: 26181 - RNA, 4089 nt, Artificial Sequence
  SARS-CoV-2/Wuhan/WIV05/2019__EPI_ISL_402128 spike protein mRNA gc (1-1273)(K986P_V987P_H69del_V70del_D614G)
gggaaauaagagagaaaagaagaguaagaagaaauauaagaccccggcgccgccaccauguucguguuccugguccuccugccccuggugagcucccagugcgugaaccucaccacccgcacgcagcugccgcccgccuacaccaacagcuucacccggggcgucuacuaccccgacaagguguuccgcuccagcgugcugcacuccacccaggaccucuuccugcccuucuucagcaacgucacgugguuccacgccaucuccgggaccaacggcaccaagcgguucgacaacccggugcugcccuucaacgacgggguguacuucgcgagcaccgagaaguccaacaucauccgcggcuggaucuucgggacgacccucgacagcaagacccagucccugcugaucgucaacaacgccaccaacguggugaucaaggucugcgaguuccaguucugcaacgaccccuuccucggcguguacuaccacaagaacaacaagagcuggauggaguccgaguuccggguguacagcuccgccaacaacugcacguucgaguacgucagccagcccuuccugauggaccuggagggcaagcaggggaacuucaagaaccuccgcgaguucguguucaagaacaucgacggcuacuucaagaucuacuccaagcacaccccgaucaaccuggugcgggaccugccccagggguucagcgcccucgagccccuggucgaccugcccaucggcaucaacaucacccgcuuccagacccuccuggcccugcaccgguccuaccucacgccgggggacagcagcuccggcuggaccgcgggcgccgccgccuacuacgugggguaccugcagccccgcaccuuccugcucaaguacaacgagaacggcaccaucacggacgcgguggacugcgcccuggacccccugagcgagaccaagugcacccucaaguccuucaccgucgagaaggggaucuaccagacgagcaacuuccgggugcagcccaccgaguccaucgugcgcuucccgaacaucaccaaccugugccccuucggcgaggucuucaacgccacccgguucgccagcguguacgccuggaaccgcaagcggaucuccaacugcgucgcggacuacagcgugcuguacaacuccgccagcuucuccacguucaagugcuacggcgugagccccaccaagcucaacgaccugugcuucaccaacgucuacgccgacuccuucgugauccgcggggacgaggugcggcagaucgcccccggccagaccgggaagaucgccgacuacaacuacaagcugccggacgacuucacgggcugcgucaucgcguggaacagcaacaaccucgacuccaaggucgggggcaacuacaacuaccuguaccgccuguuccgcaagagcaaccucaagcccuucgagcgggacaucuccaccgagaucuaccaggccggcagcacccccugcaacgggguggagggcuucaacugcuacuucccccugcaguccuacggguuccagccgaccaacggcgugggguaccagcccuaccggguggugguccugagcuucgagcuccugcacgcccccgccacggugugcggccccaagaaguccaccaaccuggugaagaacaagugcgucaacuucaacuucaacggccucaccgggaccggcgugcugaccgagagcaacaagaaguuccugccguuccagcaguucgggcgcgacaucgccgacacgaccgacgcggugcgcgacccccagacccuggagauccucgacaucacccccugcagcuucggcggggucuccgugaucacgccgggcaccaacaccagcaaccagguggccguccuguaccagggcgugaacugcaccgaggugcccgucgccauccacgccgaccagcugacgcccaccuggcggguguacuccaccgggagcaacguguuccagacccgcgccggcugccucaucggggcggagcacgucaacaacuccuacgagugcgacauccccaucggcgccggcaucugcgccagcuaccagacgcagaccaacuccccgcggcgcgcccggagcguggcgucccagagcaucaucgccuacaccaugucccugggggccgagaacagcguggccuacuccaacaacagcaucgccauccccaccaacuucacgaucuccgucaccaccgagauccugcccgugagcaugaccaagacgagcguggacugcaccauguacaucugcggcgacuccaccgagugcagcaaccuccugcugcaguacggguccuucugcacccagcucaaccgcgcgcugacgggcaucgccgucgagcaggacaagaacacccaggagguguucgcccaggugaagcagaucuacaagacgcccccgaucaaggacuucgggggcuucaacuucagccagauccugcccgaccccuccaagcccagcaagcgguccuucaucgaggaccuccuguucaacaaggucacccuggccgacgccggcuucaucaagcaguacggggacugccucggcgacaucgcggcccgcgaccugaucugcgcccagaaguucaacgggcugaccgugcucccgccccugcugaccgacgagaugaucgcccaguacaccagcgcccuccuggcgggcaccaucacguccggguggaccuucggcgccggcgccgcccugcagauccccuucgcgaugcagauggccuaccgguucaacgggaucggcgugacccagaacguccucuacgagaaccagaagcugaucgccaaccaguucaacagcgccaucgggaagauccaggacucccugagcuccaccgccagcgcgcucggcaagcugcaggacguggugaaccagaacgcccaggcccugaacacgcucgucaagcagcuguccagcaacuucggggccaucuccagcgugcugaacgacauccucucccgccuggacccgcccgaggccgaggugcagaucgaccggcugaucaccggccgccuccagagccugcagaccuacgucacccagcagcugauccgggcggccgagauccgcgccagcgccaaccucgccgcgaccaagauguccgagugcgugcugggccagagcaagcggguggacuucugcgggaagggcuaccaccugauguccuucccccagagcgcgccccacggggucguguuccuccacgugacguacguccccgcccaggagaagaacuucaccaccgccccggccaucugccacgacggcaaggcccacuucccccgcgaggggguguucgucuccaacggcacccacugguucgugacgcagcggaacuucuacgagccccagaucaucaccaccgacaacaccuucgugagcggcaacugcgacgucgugaucgggaucgugaacaacacggucuacgacccccugcagccggagcuggacuccuucaaggaggagcucgacaaguacuucaagaaccacaccagccccgacguggaccugggcgacaucuccgggaucaacgccagcguggucaacauccagaaggagaucgaccgccugaacgagguggccaagaaccucaacgagucccugaucgaccugcaggagcucggcaaguacgagcaguacaucaaguggcccugguacaucuggcugggcuucaucgccgggcugaucgcgaucgugauggucaccaucaugcucugcugcaugaccagcugcugcuccugccugaagggcugcugcagcugcggguccugcugcaaguucgacgaggacgacagcgagccggugcugaagggcgugaagcuccacuacacgugauaauaggcuggagccucgguggccuagcuucuugccccuugggccuccccccagccccuccuccccuuccugcacccguacccccguggucuuugaauaaagucugagugggcggcaaaaaaaaaaaaaaaaaaaaaaaaaaaaaaaaaaaaaaaaaaaaaaaaaaaaaaaaaaaaaaaaaaaaaaaaaaaaaaaaaaaaaaaaaaaaaaaaaaaa

SEQ ID NO: 26182 - RNA, 4095 nt, Artificial Sequence
  SARS-CoV-2/Wuhan/WIV05/2019__EPI_ISL_402128 spike protein mRNA gc (1-1273)(K986P_V987P_Y453F_D614G)
gggaaauaagagagaaaagaagaguaagaagaaauauaagaccccggcgccgccaccauguucguguuccugguccuccugccccuggugagcucccagugcgugaaccucaccacccgcacgcagcugccgcccgccuacaccaacagcuucacccggggcgucuacuaccccgacaagguguuccgcuccagcgugcugcacuccacccaggaccucuuccugcccuucuucagcaacgucacgugguuccacgccauccacguguccgggaccaacggcaccaagcgguucgacaacccggugcugcccuucaacgacggggucuacuucgcgagcaccgagaaguccaacaucauccgcggcuggaucuucgggacgacccucgacagcaagacccagucccugcugaucgugaacaacgccaccaacguggucaucaaggugugcgaguuccaguucugcaacgaccccuuccucggcguguacuaccacaagaacaacaagagcuggauggaguccgaguuccgggucuacagcuccgccaacaacugcacguucgaguacgugagccagcccuuccugauggaccuggagggcaagcaggggaacuucaagaaccuccgcgaguucguguucaagaacaucgacggcuacuucaagaucuacuccaagcacaccccgaucaaccugguccgggaccugccccagggguucagcgcccucgagccccugguggaccugcccaucggcaucaacaucacccgcuuccagacccuccuggcccugcaccgguccuaccucacgccgggggacagcagcuccggcuggaccgcgggcgccgccgccuacuacgugggguaccugcagccccgcaccuuccugcucaaguacaacgagaacggcaccaucacggacgcggucgacugcgcccuggacccccugagcgagaccaagugcacccucaaguccuucaccguggagaaggggaucuaccagacgagcaacuuccgggugcagcccaccgaguccaucguccgcuucccgaacaucaccaaccugugccccuucggcgagguguucaacgccacccgguucgccagcgucuacgccuggaaccgcaagcggaucuccaacugcguggcggacuacagcgugcuguacaacuccgccagcuucuccacguucaagugcuacggcgucagccccaccaagcucaacgaccugugcuucaccaacguguacgccgacuccuucgugauccgcggggacgagguccggcagaucgcccccggccagaccgggaagaucgccgacuacaacuacaagcugccggacgacuucacgggcugcgugaucgcguggaacagcaacaaccucgacuccaaggucgggggcaacuacaacuaccuguuccgccuguuccgcaagagcaaccucaagcccuucgagcgggacaucuccaccgagaucuaccaggccggcagcacccccugcaacgggguggagggcuucaacugcuacuucccccugcaguccuacggguuccagccgaccaacggcgugggguaccagcccuaccggguggucgugcugagcuucgagcuccugcacgcccccgccacggugugcggccccaagaaguccaccaaccuggucaagaacaagugcgugaacuucaacuucaacggccucaccgggaccggcgugcugaccgagagcaacaagaaguuccugccguuccagcaguucgggcgcgacaucgccgacacgaccgacgcgguccgcgacccccagacccuggagauccucgacaucacccccugcagcuucggcgggguguccgugaucacgccgggcaccaacaccagcaaccaggucgccgugcuguaccagggcgugaacugcaccgagguccccguggccauccacgccgaccagcugacgcccaccuggcggguguacuccaccgggagcaacgucuuccagacccgcgccggcugccucaucggggcggagcacgugaacaacuccuacgagugcgacauccccaucggcgccggcaucugcgccagcuaccagacgcagaccaacuccccgcggcgcgcccggagcguggcgucccagagcaucaucgccuacaccaugucccugggggccgagaacagcgucgccuacuccaacaacagcaucgccauccccaccaacuucacgaucuccgugaccaccgagauccugcccgugagcaugaccaagacgagcgucgacugcaccauguacaucugcggcgacuccaccgagugcagcaaccuccugcugcaguacggguccuucugcacccagcucaaccgcgcgcugacgggcaucgccguggagcaggacaagaacacccaggagguguucgcccaggucaagcagaucuacaagacgcccccgaucaaggacuucgggggcuucaacuucagccagauccugcccgaccccuccaagcccagcaagcgguccuucaucgaggaccuccuguucaacaaggugacccuggccgacgccggcuucaucaagcaguacggggacugccucggcgacaucgcggcccgcgaccugaucugcgcccagaaguucaacgggcugaccgugcucccgccccugcugaccgacgagaugaucgcccaguacaccagcgcccuccuggcgggcaccaucacguccggguggaccuucggcgccggcgccgcccugcagauccccuucgcgaugcagauggccuaccgguucaacgggaucggcgucacccagaacgugcucuacgagaaccagaagcugaucgccaaccaguucaacagcgccaucgggaagauccaggacucccugagcuccaccgccagcgcgcucggcaagcugcaggacguggucaaccagaacgcccaggcccugaacacgcucgugaagcagcuguccagcaacuucggggccaucuccagcgugcugaacgacauccucucccgccuggacccgcccgaggccgagguccagaucgaccggcugaucaccggccgccuccagagccugcagaccuacgugacccagcagcugauccgggcggccgagauccgcgccagcgccaaccucgccgcgaccaagauguccgagugcgugcugggccagagcaagcgggucgacuucugcgggaagggcuaccaccugauguccuucccccagagcgcgccccacggggugguguuccuccacgucacguacgugcccgcccaggagaagaacuucaccaccgccccggccaucugccacgacggcaaggcccacuucccccgcgagggggucuucguguccaacggcacccacugguucgugacgcagcggaacuucuacgagccccagaucaucaccaccgacaacaccuucgucagcggcaacugcgacguggugaucgggaucgucaacaacacgguguacgacccccugcagccggagcuggacuccuucaaggaggagcucgacaaguacuucaagaaccacaccagccccgacguggaccugggcgacaucuccgggaucaacgccagcgucgugaacauccagaaggagaucgaccgccugaacgagguggccaagaaccucaacgagucccugaucgaccugcaggagcucggcaaguacgagcaguacaucaaguggcccugguacaucuggcugggcuucaucgccgggcugaucgcgaucgucauggugaccaucaugcucugcugcaugaccagcugcugcuccugccugaagggcugcugcagcugcggguccugcugcaaguucgacgaggacgacagcgagccggugcugaagggcgucaagcuccacuacacgugauaauaggcuggagccucgguggccuagcuucuugccccuugggccuccccccagccccuccuccccuuccugcacccguacccccguggucuuugaauaaagucugagugggcggcaaaaaaaaaaaaaaaaaaaaaaaaaaaaaaaaaaaaaaaaaaaaaaaaaaaaaaaaaaaaaaaaaaaaaaaaaaaaaaaaaaaaaaaaaaaaaaaaaaaa

SEQ ID NO: 26183 - RNA, 4095 nt, Artificial Sequence
  SARS-CoV-2/Wuhan/WIV05/2019__EPI_ISL_402128 spike protein mRNA gc (1-1273)(K986P_V987P_D614G_I692V)
gggaaauaagagagaaaagaagaguaagaagaaauauaagaccccggcgccgccaccauguucguguuccugguccuccugccccuggugagcucccagugcgugaaccucaccacccgcacgcagcugccgcccgccuacaccaacagcuucacccggggcgucuacuaccccgacaagguguuccgcuccagcgugcugcacuccacccaggaccucuuccugcccuucuucagcaacgucacgugguuccacgccauccacguguccgggaccaacggcaccaagcgguucgacaacccggugcugcccuucaacgacggggucuacuucgcgagcaccgagaaguccaacaucauccgcggcuggaucuucgggacgacccucgacagcaagacccagucccugcugaucgugaacaacgccaccaacguggucaucaaggugugcgaguuccaguucugcaacgaccccuuccucggcguguacuaccacaagaacaacaagagcuggauggaguccgaguuccgggucuacagcuccgccaacaacugcacguucgaguacgugagccagcccuuccugauggaccuggagggcaagcaggggaacuucaagaaccuccgcgaguucguguucaagaacaucgacggcuacuucaagaucuacuccaagcacaccccgaucaaccugguccgggaccugccccagggguucagcgcccucgagccccugguggaccugcccaucggcaucaacaucacccgcuuccagacccuccuggcccugcaccgguccuaccucacgccgggggacagcagcuccggcuggaccgcgggcgccgccgccuacuacgugggguaccugcagccccgcaccuuccugcucaaguacaacgagaacggcaccaucacggacgcggucgacugcgcccuggacccccugagcgagaccaagugcacccucaaguccuucaccguggagaaggggaucuaccagacgagcaacuuccgggugcagcccaccgaguccaucguccgcuucccgaacaucaccaaccugugccccuucggcgagguguucaacgccacccgguucgccagcgucuacgccuggaaccgcaagcggaucuccaacugcguggcggacuacagcgugcuguacaacuccgccagcuucuccacguucaagugcuacggcgucagccccaccaagcucaacgaccugugcuucaccaacguguacgccgacuccuucgugauccgcggggacgagguccggcagaucgcccccggccagaccgggaagaucgccgacuacaacuacaagcugccggacgacuucacgggcugcgugaucgcguggaacagcaacaaccucgacuccaaggucgggggcaacuacaacuaccuguaccgccuguuccgcaagagcaaccucaagcccuucgagcgggacaucuccaccgagaucuaccaggccggcagcacccccugcaacgggguggagggcuucaacugcuacuucccccugcaguccuacggguuccagccgaccaacggcgugggguaccagcccuaccggguggucgugcugagcuucgagcuccugcacgcccccgccacggugugcggccccaagaaguccaccaaccuggucaagaacaagugcgugaacuucaacuucaacggccucaccgggaccggcgugcugaccgagagcaacaagaaguuccugccguuccagcaguucgggcgcgacaucgccgacacgaccgacgcgguccgcgacccccagacccuggagauccucgacaucacccccugcagcuucggcgggguguccgugaucacgccgggcaccaacaccagcaaccaggucgccgugcuguaccagggcgugaacugcaccgagguccccguggccauccacgccgaccagcugacgcccaccuggcggguguacuccaccgggagcaacgucuuccagacccgcgccggcugccucaucggggcggagcacgugaacaacuccuacgagugcgacauccccaucggcgccggcaucugcgccagcuaccagacgcagaccaacuccccgcggcgcgcccggagcguggcgucccagagcgucaucgccuacaccaugucccugggggccgagaacagcguggccuacuccaacaacagcaucgccauccccaccaacuucacgaucuccgugaccaccgagauccugcccgucagcaugaccaagacgagcguggacugcaccauguacaucugcggcgacuccaccgagugcagcaaccuccugcugcaguacggguccuucugcacccagcucaaccgcgcgcugacgggcaucgccguggagcaggacaagaacacccaggaggucuucgcccaggugaagcagaucuacaagacgcccccgaucaaggacuucgggggcuucaacuucagccagauccugcccgaccccuccaagcccagcaagcgguccuucaucgaggaccuccuguucaacaaggugacccuggccgacgccggcuucaucaagcaguacggggacugccucggcgacaucgcggcccgcgaccugaucugcgcccagaaguucaacgggcugaccguccucccgccccugcugaccgacgagaugaucgcccaguacaccagcgcccuccuggcgggcaccaucacguccggguggaccuucggcgccggcgccgcccugcagauccccuucgcgaugcagauggccuaccgguucaacgggaucggcgugacccagaacgugcucuacgagaaccagaagcugaucgccaaccaguucaacagcgccaucgggaagauccaggacucccugagcuccaccgccagcgcgcucggcaagcugcaggacgucgugaaccagaacgcccaggcccugaacacgcucgugaagcagcuguccagcaacuucggggccaucuccagcguccugaacgacauccucucccgccuggacccgcccgaggccgaggugcagaucgaccggcugaucaccggccgccuccagagccugcagaccuacgugacccagcagcugauccgggcggccgagauccgcgccagcgccaaccucgccgcgaccaagauguccgagugcguccugggccagagcaagcggguggacuucugcgggaagggcuaccaccugauguccuucccccagagcgcgccccacgggguggucuuccuccacgugacguacguccccgcccaggagaagaacuucaccaccgccccggccaucugccacgacggcaaggcccacuucccccgcgaggggguguucguguccaacggcacccacugguucgucacgcagcggaacuucuacgagccccagaucaucaccaccgacaacaccuucgugagcggcaacugcgacguggucaucgggaucgugaacaacacgguguacgacccccugcagccggagcuggacuccuucaaggaggagcucgacaaguacuucaagaaccacaccagccccgacgucgaccugggcgacaucuccgggaucaacgccagcguggugaacauccagaaggagaucgaccgccugaacgaggucgccaagaaccucaacgagucccugaucgaccugcaggagcucggcaaguacgagcaguacaucaaguggcccugguacaucuggcugggcuucaucgccgggcugaucgcgaucgugauggugaccaucaugcucugcugcaugaccagcugcugcuccugccugaagggcugcugcagcugcggguccugcugcaaguucgacgaggacgacagcgagccgguccugaagggcgugaagcuccacuacacgugauaauaggcuggagccucgguggccuagcuucuugccccuugggccuccccccagccccuccuccccuuccugcacccguacccccguggucuuugaauaaagucugagugggcggcaaaaaaaaaaaaaaaaaaaaaaaaaaaaaaaaaaaaaaaaaaaaaaaaaaaaaaaaaaaaaaaaaaaaaaaaaaaaaaaaaaaaaaaaaaaaaaaaaaaa

SEQ ID NO: 26184 - RNA, 4095 nt, Artificial Sequence
  SARS-CoV-2/Wuhan/WIV05/2019__EPI_ISL_402128 spike protein mRNA gc (1-1273)(K986P_V987P_D614G_M1229I)
gggaaauaagagagaaaagaagaguaagaagaaauauaagaccccggcgccgccaccauguucguguuccugguccuccugccccuggugagcucccagugcgugaaccucaccacccgcacgcagcugccgcccgccuacaccaacagcuucacccggggcgucuacuaccccgacaagguguuccgcuccagcgugcugcacuccacccaggaccucuuccugcccuucuucagcaacgucacgugguuccacgccauccacguguccgggaccaacggcaccaagcgguucgacaacccggugcugcccuucaacgacggggucuacuucgcgagcaccgagaaguccaacaucauccgcggcuggaucuucgggacgacccucgacagcaagacccagucccugcugaucgugaacaacgccaccaacguggucaucaaggugugcgaguuccaguucugcaacgaccccuuccucggcguguacuaccacaagaacaacaagagcuggauggaguccgaguuccgggucuacagcuccgccaacaacugcacguucgaguacgugagccagcccuuccugauggaccuggagggcaagcaggggaacuucaagaaccuccgcgaguucguguucaagaacaucgacggcuacuucaagaucuacuccaagcacaccccgaucaaccugguccgggaccugccccagggguucagcgcccucgagccccugguggaccugcccaucggcaucaacaucacccgcuuccagacccuccuggcccugcaccgguccuaccucacgccgggggacagcagcuccggcuggaccgcgggcgccgccgccuacuacgugggguaccugcagccccgcaccuuccugcucaaguacaacgagaacggcaccaucacggacgcggucgacugcgcccuggacccccugagcgagaccaagugcacccucaaguccuucaccguggagaaggggaucuaccagacgagcaacuuccgggugcagcccaccgaguccaucguccgcuucccgaacaucaccaaccugugccccuucggcgagguguucaacgccacccgguucgccagcgucuacgccuggaaccgcaagcggaucuccaacugcguggcggacuacagcgugcuguacaacuccgccagcuucuccacguucaagugcuacggcgucagccccaccaagcucaacgaccugugcuucaccaacguguacgccgacuccuucgugauccgcggggacgagguccggcagaucgcccccggccagaccgggaagaucgccgacuacaacuacaagcugccggacgacuucacgggcugcgugaucgcguggaacagcaacaaccucgacuccaaggucgggggcaacuacaacuaccuguaccgccuguuccgcaagagcaaccucaagcccuucgagcgggacaucuccaccgagaucuaccaggccggcagcacccccugcaacgggguggagggcuucaacugcuacuucccccugcaguccuacggguuccagccgaccaacggcgugggguaccagcccuaccggguggucgugcugagcuucgagcuccugcacgcccccgccacggugugcggccccaagaaguccaccaaccuggucaagaacaagugcgugaacuucaacuucaacggccucaccgggaccggcgugcugaccgagagcaacaagaaguuccugccguuccagcaguucgggcgcgacaucgccgacacgaccgacgcgguccgcgacccccagacccuggagauccucgacaucacccccugcagcuucggcgggguguccgugaucacgccgggcaccaacaccagcaaccaggucgccgugcuguaccagggcgugaacugcaccgagguccccguggccauccacgccgaccagcugacgcccaccuggcggguguacuccaccgggagcaacgucuuccagacccgcgccggcugccucaucggggcggagcacgugaacaacuccuacgagugcgacauccccaucggcgccggcaucugcgccagcuaccagacgcagaccaacuccccgcggcgcgcccggagcguggcgucccagagcaucaucgccuacaccaugucccugggggccgagaacagcgucgccuacuccaacaacagcaucgccauccccaccaacuucacgaucuccgugaccaccgagauccugcccgugagcaugaccaagacgagcgucgacugcaccauguacaucugcggcgacuccaccgagugcagcaaccuccugcugcaguacggguccuucugcacccagcucaaccgcgcgcugacgggcaucgccguggagcaggacaagaacacccaggagguguucgcccaggucaagcagaucuacaagacgcccccgaucaaggacuucgggggcuucaacuucagccagauccugcccgaccccuccaagcccagcaagcgguccuucaucgaggaccuccuguucaacaaggugacccuggccgacgccggcuucaucaagcaguacggggacugccucggcgacaucgcggcccgcgaccugaucugcgcccagaaguucaacgggcugaccgugcucccgccccugcugaccgacgagaugaucgcccaguacaccagcgcccuccuggcgggcaccaucacguccggguggaccuucggcgccggcgccgcccugcagauccccuucgcgaugcagauggccuaccgguucaacgggaucggcgucacccagaacgugcucuacgagaaccagaagcugaucgccaaccaguucaacagcgccaucgggaagauccaggacucccugagcuccaccgccagcgcgcucggcaagcugcaggacguggucaaccagaacgcccaggcccugaacacgcucgugaagcagcuguccagcaacuucggggccaucuccagcgugcugaacgacauccucucccgccuggacccgcccgaggccgagguccagaucgaccggcugaucaccggccgccuccagagccugcagaccuacgugacccagcagcugauccgggcggccgagauccgcgccagcgccaaccucgccgcgaccaagauguccgagugcgugcugggccagagcaagcgggucgacuucugcgggaagggcuaccaccugauguccuucccccagagcgcgccccacggggugguguuccuccacgucacguacgugcccgcccaggagaagaacuucaccaccgccccggccaucugccacgacggcaaggcccacuucccccgcgagggggucuucguguccaacggcacccacugguucgugacgcagcggaacuucuacgagccccagaucaucaccaccgacaacaccuucgucagcggcaacugcgacguggugaucgggaucgucaacaacacgguguacgacccccugcagccggagcuggacuccuucaaggaggagcucgacaaguacuucaagaaccacaccagccccgacguggaccugggcgacaucuccgggaucaacgccagcgucgugaacauccagaaggagaucgaccgccugaacgagguggccaagaaccucaacgagucccugaucgaccugcaggagcucggcaaguacgagcaguacaucaaguggcccugguacaucuggcugggcuucaucgccgggcugaucgcgaucgucaucgugaccaucaugcucugcugcaugaccagcugcugcuccugccugaagggcugcugcagcugcggguccugcugcaaguucgacgaggacgacagcgagccggugcugaagggcgucaagcuccacuacacgugauaauaggcuggagccucgguggccuagcuucuugccccuugggccuccccccagccccuccuccccuuccugcacccguacccccguggucuuugaauaaagucugagugggcggcaaaaaaaaaaaaaaaaaaaaaaaaaaaaaaaaaaaaaaaaaaaaaaaaaaaaaaaaaaaaaaaaaaaaaaaaaaaaaaaaaaaaaaaaaaaaaaaaaaaa

SEQ ID NO: 26185 - RNA, 4089 nt, Artificial Sequence
  SARS-CoV-2/Wuhan/WIV05/2019__EPI_ISL_402128 spike protein mRNA gc (1-1273)(K986P_V987P_H69del_V70del_A222V_Y453F_S477N_D614G_I692V)
gggaaauaagagagaaaagaagaguaagaagaaauauaagaccccggcgccgccaccauguucguguuccugguccuccugccccuggugagcucccagugcgugaaccucaccacccgcacgcagcugccgcccgccuacaccaacagcuucacccggggcgucuacuaccccgacaagguguuccgcuccagcgugcugcacuccacccaggaccucuuccugcccuucuucagcaacgucacgugguuccacgccaucuccgggaccaacggcaccaagcgguucgacaacccggugcugcccuucaacgacgggguguacuucgcgagcaccgagaaguccaacaucauccgcggcuggaucuucgggacgacccucgacagcaagacccagucccugcugaucgucaacaacgccaccaacguggugaucaaggucugcgaguuccaguucugcaacgaccccuuccucggcguguacuaccacaagaacaacaagagcuggauggaguccgaguuccggguguacagcuccgccaacaacugcacguucgaguacgucagccagcccuuccugauggaccuggagggcaagcaggggaacuucaagaaccuccgcgaguucguguucaagaacaucgacggcuacuucaagaucuacuccaagcacaccccgaucaaccuggugcgggaccugccccagggguucagcguccucgagccccugguggaccugcccaucggcaucaacaucacccgcuuccagacccuccuggcccugcaccgguccuaccucacgccgggggacagcagcuccggcuggaccgccggcgcggccgccuacuacgugggguaccugcagccccgcaccuuccugcucaaguacaacgagaacggcaccaucacggacgccgucgacugcgcgcuggacccccugagcgagaccaagugcacccucaaguccuucaccguggagaaggggaucuaccagacgagcaacuuccgggugcagcccaccgaguccaucguccgcuucccgaacaucaccaaccugugccccuucggcgagguguucaacgccacccgguucgccagcgucuacgccuggaaccgcaagcggaucuccaacugcguggccgacuacagcgugcuguacaacuccgcgagcuucuccacguucaagugcuacggcgucagccccaccaagcucaacgaccugugcuucaccaacguguacgccgacuccuucgugauccgcggggacgagguccggcagaucgcccccggccagaccgggaagaucgccgacuacaacuacaagcugccggacgacuucacgggcugcgugaucgccuggaacagcaacaaccucgacuccaaggucgggggcaacuacaacuaccuguuccgccuguuccgcaagagcaaccucaagcccuucgagcgggacaucuccaccgagaucuaccaggcgggcaacacccccugcaacgggguggagggcuucaacugcuacuucccccugcagagcuacggguuccagccgaccaacggcgugggguaccagcccuaccggguggucgugcuguccuucgagcuccugcacgcccccgccacggugugcggccccaagaaguccaccaaccuggucaagaacaagugcgugaacuucaacuucaacggccucaccgggaccggcgugcugaccgagagcaacaagaaguuccugccguuccagcaguucgggcgcgacaucgccgacacgaccgacgccguccgcgacccccagacccuggagauccucgacaucacccccugcagcuucggcggggugagcgugaucacgccgggcaccaacaccuccaaccaggucgcggugcuguaccagggcgugaacugcaccgagguccccguggccauccacgccgaccagcugacgcccaccuggcggguguacagcaccggguccaacgucuuccagacccgcgccggcugccucaucggggccgagcacgugaacaacagcuacgagugcgacauccccaucggcgcgggcaucugcgccuccuaccagacgcagaccaacagcccgcggcgcgcccgguccguggccagccaguccgucaucgcguacaccaugagccugggggccgagaacuccguggccuacagcaacaacuccaucgccauccccaccaacuucacgaucagcgugaccaccgagauccugcccgucuccaugaccaagacgagcguggacugcaccauguacaucugcggcgacagcaccgagugcuccaaccuccugcugcaguacgggagcuucugcacccagcucaaccgcgcccugacgggcaucgcgguggagcaggacaagaacacccaggaggucuucgcccaggugaagcagaucuacaagacgcccccgaucaaggacuucgggggcuucaacuucucccagauccugcccgaccccagcaagcccuccaagcggagcuucaucgaggaccuccuguucaacaaggugacccuggccgacgccggcuucaucaagcaguacggggacugccucggcgacaucgccgcgcgcgaccugaucugcgcccagaaguucaacgggcugaccguccucccgccccugcugaccgacgagaugaucgcccaguacaccuccgcccuccuggccggcaccaucacgagcggguggaccuucggcgcgggcgccgcccugcagauccccuucgccaugcagauggcguaccgguucaacgggaucggcgugacccagaacgugcucuacgagaaccagaagcugaucgccaaccaguucaacuccgccaucgggaagauccaggacagccuguccagcaccgccuccgcccucggcaagcugcaggacgucgugaaccagaacgcgcaggcccugaacacgcucgugaagcagcugagcuccaacuucggggccaucagcuccguccugaacgacauccucagccgccuggacccgcccgaggccgaggugcagaucgaccggcugaucaccggccgccuccagucccugcagaccuacgugacccagcagcugauccgggccgcggagauccgcgccagcgccaaccucgccgccaccaagaugagcgagugcguccugggccaguccaagcggguggacuucugcgggaagggcuaccaccugaugagcuucccccaguccgcgccccacgggguggucuuccuccacgugacguacguccccgcccaggagaagaacuucaccaccgccccggccaucugccacgacggcaaggcgcacuucccccgcgaggggguguucgugagcaacggcacccacugguucgucacgcagcggaacuucuacgagccccagaucaucaccaccgacaacaccuucguguccggcaacugcgacguggucaucgggaucgugaacaacacgguguacgacccccugcagccggagcuggacagcuucaaggaggagcucgacaaguacuucaagaaccacaccucccccgacgucgaccugggcgacaucagcgggaucaacgccuccguggugaacauccagaaggagaucgaccgccugaacgaggucgccaagaaccucaacgagagccugaucgaccugcaggagcucggcaaguacgagcaguacaucaaguggcccugguacaucuggcugggcuucaucgccgggcugaucgccaucgugauggugaccaucaugcucugcugcaugaccuccugcugcagcugccugaagggcugcugcuccugcgggagcugcugcaaguucgacgaggacgacuccgagccgguccugaagggcgugaagcuccacuacacgugauaauaggcuggagccucgguggccuagcuucuugccccuugggccuccccccagccccuccuccccuuccugcacccguacccccguggucuuugaauaaagucugagugggcggcaaaaaaaaaaaaaaaaaaaaaaaaaaaaaaaaaaaaaaaaaaaaaaaaaaaaaaaaaaaaaaaaaaaaaaaaaaaaaaaaaaaaaaaaaaaaaaaaaaaa

SEQ ID NO: 26186 - RNA, 4089 nt, Artificial Sequence
  SARS-CoV-2/Wuhan/WIV05/2019__EPI_ISL_402128 spike protein mRNA gc (1-1273)(K986P_V987P_H69del_V70del_Y453F_D614G_I692V_M1229I)
gggaaauaagagagaaaagaagaguaagaagaaauauaagaccccggcgccgccaccauguucguguuccugguccuccugccccuggugagcucccagugcgugaaccucaccacccgcacgcagcugccgcccgccuacaccaacagcuucacccggggcgucuacuaccccgacaagguguuccgcuccagcgugcugcacuccacccaggaccucuuccugcccuucuucagcaacgucacgugguuccacgccaucuccgggaccaacggcaccaagcgguucgacaacccggugcugcccuucaacgacgggguguacuucgcgagcaccgagaaguccaacaucauccgcggcuggaucuucgggacgacccucgacagcaagacccagucccugcugaucgucaacaacgccaccaacguggugaucaaggucugcgaguuccaguucugcaacgaccccuuccucggcguguacuaccacaagaacaacaagagcuggauggaguccgaguuccggguguacagcuccgccaacaacugcacguucgaguacgucagccagcccuuccugauggaccuggagggcaagcaggggaacuucaagaaccuccgcgaguucguguucaagaacaucgacggcuacuucaagaucuacuccaagcacaccccgaucaaccuggugcgggaccugccccagggguucagcgcccucgagccccuggucgaccugcccaucggcaucaacaucacccgcuuccagacccuccuggcccugcaccgguccuaccucacgccgggggacagcagcuccggcuggaccgcgggcgccgccgccuacuacgugggguaccugcagccccgcaccuuccugcucaaguacaacgagaacggcaccaucacggacgcgguggacugcgcccuggacccccugagcgagaccaagugcacccucaaguccuucaccgucgagaaggggaucuaccagacgagcaacuuccgggugcagcccaccgaguccaucgugcgcuucccgaacaucaccaaccugugccccuucggcgaggucuucaacgccacccgguucgccagcguguacgccuggaaccgcaagcggaucuccaacugcgucgcggacuacagcgugcuguacaacuccgccagcuucuccacguucaagugcuacggcgugagccccaccaagcucaacgaccugugcuucaccaacgucuacgccgacuccuucgugauccgcggggacgaggugcggcagaucgcccccggccagaccgggaagaucgccgacuacaacuacaagcugccggacgacuucacgggcugcgucaucgcguggaacagcaacaaccucgacuccaaggucgggggcaacuacaacuaccuguuccgccuguuccgcaagagcaaccucaagcccuucgagcgggacaucuccaccgagaucuaccaggccggcagcacccccugcaacgggguggagggcuucaacugcuacuucccccugcaguccuacggguuccagccgaccaacggcgugggguaccagcccuaccggguggugguccugagcuucgagcuccugcacgcccccgccacggugugcggccccaagaaguccaccaaccuggugaagaacaagugcgucaacuucaacuucaacggccucaccgggaccggcgugcugaccgagagcaacaagaaguuccugccguuccagcaguucgggcgcgacaucgccgacacgaccgacgcggugcgcgacccccagacccuggagauccucgacaucacccccugcagcuucggcggggucuccgugaucacgccgggcaccaacaccagcaaccagguggccguccuguaccagggcgugaacugcaccgaggugcccgucgccauccacgccgaccagcugacgcccaccuggcggguguacuccaccgggagcaacguguuccagacccgcgccggcugccucaucggggcggagcacgucaacaacuccuacgagugcgacauccccaucggcgccggcaucugcgccagcuaccagacgcagaccaacuccccgcggcgcgcccggagcguggcgucccagagcgugaucgccuacaccaugucccugggggccgagaacagcgucgccuacuccaacaacagcaucgccauccccaccaacuucacgaucuccgugaccaccgagauccugcccgugagcaugaccaagacgagcgucgacugcaccauguacaucugcggcgacuccaccgagugcagcaaccuccugcugcaguacggguccuucugcacccagcucaaccgcgcgcugacgggcaucgccguggagcaggacaagaacacccaggagguguucgcccaggucaagcagaucuacaagacgcccccgaucaaggacuucgggggcuucaacuucagccagauccugcccgaccccuccaagcccagcaagcgguccuucaucgaggaccuccuguucaacaaggugacccuggccgacgccggcuucaucaagcaguacggggacugccucggcgacaucgcggcccgcgaccugaucugcgcccagaaguucaacgggcugaccgugcucccgccccugcugaccgacgagaugaucgcccaguacaccagcgcccuccuggcgggcaccaucacguccggguggaccuucggcgccggcgccgcccugcagauccccuucgcgaugcagauggccuaccgguucaacgggaucggcgucacccagaacgugcucuacgagaaccagaagcugaucgccaaccaguucaacagcgccaucgggaagauccaggacucccugagcuccaccgccagcgcgcucggcaagcugcaggacguggucaaccagaacgcccaggcccugaacacgcucgugaagcagcuguccagcaacuucggggccaucuccagcgugcugaacgacauccucucccgccuggacccgcccgaggccgagguccagaucgaccggcugaucaccggccgccuccagagccugcagaccuacgugacccagcagcugauccgggcggccgagauccgcgccagcgccaaccucgccgcgaccaagauguccgagugcgugcugggccagagcaagcgggucgacuucugcgggaagggcuaccaccugauguccuucccccagagcgcgccccacggggugguguuccuccacgucacguacgugcccgcccaggagaagaacuucaccaccgccccggccaucugccacgacggcaaggcccacuucccccgcgagggggucuucguguccaacggcacccacugguucgugacgcagcggaacuucuacgagccccagaucaucaccaccgacaacaccuucgucagcggcaacugcgacguggugaucgggaucgucaacaacacgguguacgacccccugcagccggagcuggacuccuucaaggaggagcucgacaaguacuucaagaaccacaccagccccgacguggaccugggcgacaucuccgggaucaacgccagcgucgugaacauccagaaggagaucgaccgccugaacgagguggccaagaaccucaacgagucccugaucgaccugcaggagcucggcaaguacgagcaguacaucaaguggcccugguacaucuggcugggcuucaucgccgggcugaucgcgaucgucaucgugaccaucaugcucugcugcaugaccagcugcugcuccugccugaagggcugcugcagcugcggguccugcugcaaguucgacgaggacgacagcgagccggugcugaagggcgucaagcuccacuacacgugauaauaggcuggagccucgguggccuagcuucuugccccuugggccuccccccagccccuccuccccuuccugcacccguacccccguggucuuugaauaaagucugagugggcggcaaaaaaaaaaaaaaaaaaaaaaaaaaaaaaaaaaaaaaaaaaaaaaaaaaaaaaaaaaaaaaaaaaaaaaaaaaaaaaaaaaaaaaaaaaaaaaaaaaaa

SEQ ID NO: 26187 - RNA, 4086 nt, Artificial Sequence
  SARS-CoV-2/Wuhan/WIV05/2019__EPI_ISL_402128 spike protein mRNA gc (1-1273)(K986P_V987P_K986P_V987P_H69del_V70del_Y144del_N501Y_A570 D_D614G_P681H_T716I_S982A_D1118H)
gggaaauaagagagaaaagaagaguaagaagaaauauaagaccccggcgccgccaccauguucguguuccugguccuccugccccuggugagcucccagugcgugaaccucaccacccgcacgcagcugccgcccgccuacaccaacagcuucacccggggcgucuacuaccccgacaagguguuccgcuccagcgugcugcacuccacccaggaccucuuccugcccuucuucagcaacgucacgugguuccacgccaucuccgggaccaacggcaccaagcgguucgacaacccggugcugcccuucaacgacgggguguacuucgcgagcaccgagaaguccaacaucauccgcggcuggaucuucgggacgacccucgacagcaagacccagucccugcugaucgucaacaacgccaccaacguggugaucaaggucugcgaguuccaguucugcaacgaccccuuccucggcguguaccacaagaacaacaagagcuggauggaguccgaguuccggguguacagcuccgccaacaacugcacguucgaguacgucagccagcccuuccugauggaccuggagggcaagcaggggaacuucaagaaccuccgcgaguucguguucaagaacaucgacggcuacuucaagaucuacuccaagcacaccccgaucaaccuggugcgggaccugccccagggguucagcgcccucgagccccuggucgaccugcccaucggcaucaacaucacccgcuuccagacccuccuggcccugcaccgguccuaccucacgccgggggacagcagcuccggcuggaccgcgggcgccgccgccuacuacgugggguaccugcagccccgcaccuuccugcucaaguacaacgagaacggcaccaucacggacgcgguggacugcgcccuggacccccugagcgagaccaagugcacccucaaguccuucaccgucgagaaggggaucuaccagacgagcaacuuccgggugcagcccaccgaguccaucgugcgcuucccgaacaucaccaaccugugccccuucggcgaggucuucaacgccacccgguucgccagcguguacgccuggaaccgcaagcggaucuccaacugcgucgcggacuacagcgugcuguacaacuccgccagcuucuccacguucaagugcuacggcgugagccccaccaagcucaacgaccugugcuucaccaacgucuacgccgacuccuucgugauccgcggggacgaggugcggcagaucgcccccggccagaccgggaagaucgccgacuacaacuacaagcugccggacgacuucacgggcugcgucaucgcguggaacagcaacaaccucgacuccaaggucgggggcaacuacaacuaccuguaccgccuguuccgcaagagcaaccucaagcccuucgagcgggacaucuccaccgagaucuaccaggccggcagcacccccugcaacgggguggagggcuucaacugcuacuucccccugcaguccuacggguuccagccgaccuacggcgugggguaccagcccuaccggguggugguccugagcuucgagcuccugcacgcccccgccacggugugcggccccaagaaguccaccaaccuggugaagaacaagugcgucaacuucaacuucaacggccucaccgggaccggcgugcugaccgagagcaacaagaaguuccugccguuccagcaguucgggcgcgacaucgacgacacgaccgacgccgugcgcgacccccagacccuggagauccucgacaucacccccugcagcuucggcggggucuccgugaucacgccgggcaccaacaccagcaaccagguggcgguccuguaccagggcgugaacugcaccgaggugcccgucgccauccacgccgaccagcugacgcccaccuggcggguguacuccaccgggagcaacguguuccagacccgcgccggcugccucaucggggccgagcacgucaacaacuccuacgagugcgacauccccaucggcgcgggcaucugcgccagcuaccagacgcagaccaacucccaccggcgcgcccggagcguggccucccagagcaucaucgcguacaccaugucccugggggccgagaacagcguggccuacuccaacaacagcaucgccaucccgaucaacuucaccaucuccgucacgaccgagauccugcccgugagcaugaccaagaccagcguggacugcacgauguacaucugcggcgacuccaccgagugcagcaaccuccugcugcaguacggguccuucugcacccagcucaaccgcgcccugaccggcaucgcggucgagcaggacaagaacacgcaggagguguucgcccaggugaagcagaucuacaagaccccgcccaucaaggacuucgggggcuucaacuucagccagauccugcccgaccccuccaagcccagcaagcgguccuucaucgaggaccuccuguucaacaaggucacccuggccgacgccggcuucaucaagcaguacggggacugccucggcgacaucgccgcgcgcgaccugaucugcgcccagaaguucaacgggcugaccgugcugcccccgcuccugacggacgagaugaucgcccaguacaccagcgcccuccuggccggcaccaucaccuccggguggacguucggcgcgggcgccgcccugcagauccccuucgccaugcagauggcguaccgguucaacgggaucggcgugacccagaacguccucuacgagaaccagaagcugaucgccaaccaguucaacagcgccaucgggaagauccaggacucccugagcuccaccgccagcgcccucggcaagcugcaggacguggugaaccagaacgcgcaggcccugaacacccucgucaagcagcuguccagcaacuucggggccaucuccagcgugcugaacgacauccucgcccgccuggacccgcccgaggccgaggugcagaucgaccggcugaucacgggccgccuccagucccugcagaccuacgucacccagcagcugauccgggcggccgagauccgcgccagcgccaaccucgccgcgaccaagaugagcgagugcgugcugggccaguccaagcggguggacuucugcgggaagggcuaccaccugaugagcuucccccaguccgcgccccacggggucguguuccuccacgugaccuacguccccgcccaggagaagaacuucacgaccgcccccgccaucugccacgacggcaaggcccacuucccgcgcgaggggguguucgucagcaacggcacccacugguucgugacccagcggaacuucuacgagccccagaucaucacgacccacaacaccuucguguccggcaacugcgacgucgugaucgggaucgugaacaacaccgucuacgacccccugcagcccgagcuggacagcuucaaggaggagcucgacaaguacuucaagaaccacacguccccggacguggaccugggcgacaucagcgggaucaacgccuccguggucaacauccagaaggagaucgaccgccugaacgagguggccaagaaccucaacgagagccugaucgaccugcaggagcucggcaaguacgagcaguacaucaaguggcccugguacaucuggcugggcuucaucgccgggcugaucgcgaucgugauggucaccaucaugcucugcugcaugaccuccugcugcagcugccugaagggcugcugcuccugcgggagcugcugcaaguucgacgaggacgacuccgagcccgugcugaagggcgugaagcuccacuacaccugauaauaggcuggagccucgguggccuagcuucuugccccuugggccuccccccagccccuccuccccuuccugcacccguacccccguggucuuugaauaaagucugagugggcggcaaaaaaaaaaaaaaaaaaaaaaaaaaaaaaaaaaaaaaaaaaaaaaaaaaaaaaaaaaaaaaaaaaaaaaaaaaaaaaaaaaaaaaaaaaaaaaaaaaaa

SEQ ID NO: 26188 - RNA, 4095 nt, Artificial Sequence
  SARS-CoV-2/Wuhan/WIV05/2019__EPI_ISL_402128 spike protein mRNA gc (1-1273)(K986P_V987P_K986P_V987P_K417N_E484K_N501Y_D614G)
gggaaauaagagagaaaagaagaguaagaagaaauauaagaccccggcgccgccaccauguucguguuccugguccuccugccccuggugagcucccagugcgugaaccucaccacccgcacgcagcugccgcccgccuacaccaacagcuucacccggggcgucuacuaccccgacaagguguuccgcuccagcgugcugcacuccacccaggaccucuuccugcccuucuucagcaacgucacgugguuccacgccauccacguguccgggaccaacggcaccaagcgguucgacaacccggugcugcccuucaacgacggggucuacuucgcgagcaccgagaaguccaacaucauccgcggcuggaucuucgggacgacccucgacagcaagacccagucccugcugaucgugaacaacgccaccaacguggucaucaaggugugcgaguuccaguucugcaacgaccccuuccucggcguguacuaccacaagaacaacaagagcuggauggaguccgaguuccgggucuacagcuccgccaacaacugcacguucgaguacgugagccagcccuuccugauggaccuggagggcaagcaggggaacuucaagaaccuccgcgaguucguguucaagaacaucgacggcuacuucaagaucuacuccaagcacaccccgaucaaccugguccgggaccugccccagggguucagcgcccucgagccccugguggaccugcccaucggcaucaacaucacccgcuuccagacccuccuggcccugcaccgguccuaccucacgccgggggacagcagcuccggcuggaccgcgggcgccgccgccuacuacgugggguaccugcagccccgcaccuuccugcucaaguacaacgagaacggcaccaucacggacgcggucgacugcgcccuggacccccugagcgagaccaagugcacccucaaguccuucaccguggagaaggggaucuaccagacgagcaacuuccgggugcagcccaccgaguccaucguccgcuucccgaacaucaccaaccugugccccuucggcgagguguucaacgccacccgguucgccagcgucuacgccuggaaccgcaagcggaucuccaacugcguggcggacuacagcgugcuguacaacuccgccagcuucuccacguucaagugcuacggcgucagccccaccaagcucaacgaccugugcuucaccaacguguacgccgacuccuucgugauccgcggggacgagguccggcagaucgcccccggccagaccgggaacaucgccgacuacaacuacaagcugccggacgacuucacgggcugcgugaucgcguggaacagcaacaaccucgacuccaaggucgggggcaacuacaacuaccuguaccgccuguuccgcaagagcaaccucaagcccuucgagcgggacaucuccaccgagaucuaccaggccggcagcacccccugcaacggggugaagggcuucaacugcuacuucccccugcaguccuacggguuccagccgaccuacggcgugggguaccagcccuaccggguggucgugcugagcuucgagcuccugcacgcccccgccacggugugcggccccaagaaguccaccaaccuggucaagaacaagugcgugaacuucaacuucaacggccucaccgggaccggcgugcugaccgagagcaacaagaaguuccugccguuccagcaguucgggcgcgacaucgccgacacgaccgacgcgguccgcgacccccagacccuggagauccucgacaucacccccugcagcuucggcgggguguccgugaucacgccgggcaccaacaccagcaaccaggucgccgugcuguaccagggcgugaacugcaccgagguccccguggccauccacgccgaccagcugacgcccaccuggcggguguacuccaccgggagcaacgucuuccagacccgcgccggcugccucaucggggcggagcacgugaacaacuccuacgagugcgacauccccaucggcgccggcaucugcgccagcuaccagacgcagaccaacuccccgcggcgcgcccggagcguggcgucccagagcaucaucgccuacaccaugucccugggggccgagaacagcgucgccuacuccaacaacagcaucgccauccccaccaacuucacgaucuccgugaccaccgagauccugcccgugagcaugaccaagacgagcgucgacugcaccauguacaucugcggcgacuccaccgagugcagcaaccuccugcugcaguacggguccuucugcacccagcucaaccgcgcgcugacgggcaucgccguggagcaggacaagaacacccaggagguguucgcccaggucaagcagaucuacaagacgcccccgaucaaggacuucgggggcuucaacuucagccagauccugcccgaccccuccaagcccagcaagcgguccuucaucgaggaccuccuguucaacaaggugacccuggccgacgccggcuucaucaagcaguacggggacugccucggcgacaucgcggcccgcgaccugaucugcgcccagaaguucaacgggcugaccgugcucccgccccugcugaccgacgagaugaucgcccaguacaccagcgcccuccuggcgggcaccaucacguccggguggaccuucggcgccggcgccgcccugcagauccccuucgcgaugcagauggccuaccgguucaacgggaucggcgucacccagaacgugcucuacgagaaccagaagcugaucgccaaccaguucaacagcgccaucgggaagauccaggacucccugagcuccaccgccagcgcgcucggcaagcugcaggacguggucaaccagaacgcccaggcccugaacacgcucgugaagcagcuguccagcaacuucggggccaucuccagcgugcugaacgacauccucucccgccuggacccgcccgaggccgagguccagaucgaccggcugaucaccggccgccuccagagccugcagaccuacgugacccagcagcugauccgggcggccgagauccgcgccagcgccaaccucgccgcgaccaagauguccgagugcgugcugggccagagcaagcgggucgacuucugcgggaagggcuaccaccugauguccuucccccagagcgcgccccacggggugguguuccuccacgucacguacgugcccgcccaggagaagaacuucaccaccgccccggccaucugccacgacggcaaggcccacuucccccgcgagggggucuucguguccaacggcacccacugguucgugacgcagcggaacuucuacgagccccagaucaucaccaccgacaacaccuucgucagcggcaacugcgacguggugaucgggaucgucaacaacacgguguacgacccccugcagccggagcuggacuccuucaaggaggagcucgacaaguacuucaagaaccacaccagccccgacguggaccugggcgacaucuccgggaucaacgccagcgucgugaacauccagaaggagaucgaccgccugaacgagguggccaagaaccucaacgagucccugaucgaccugcaggagcucggcaaguacgagcaguacaucaaguggcccugguacaucuggcugggcuucaucgccgggcugaucgcgaucgucauggugaccaucaugcucugcugcaugaccagcugcugcuccugccugaagggcugcugcagcugcggguccugcugcaaguucgacgaggacgacagcgagccggugcugaagggcgucaagcuccacuacacgugauaauaggcuggagccucgguggccuagcuucuugccccuugggccuccccccagccccuccuccccuuccugcacccguacccccguggucuuugaauaaagucugagugggcggcaaaaaaaaaaaaaaaaaaaaaaaaaaaaaaaaaaaaaaaaaaaaaaaaaaaaaaaaaaaaaaaaaaaaaaaaaaaaaaaaaaaaaaaaaaaaaaaaaaaa

SEQ ID NO: 26189 - RNA, 4086 nt, Artificial Sequence
  SARS-CoV-2/Wuhan/WIV05/2019__EPI_ISL_402128 spike protein mRNA gc (1-1273)(K986P_V987P_K986P_V987P_L18F_D80A_D215G_L242del_A243del_ L244del_R246I_K417N_E484K_N501Y_D614G_A701V)
gggaaauaagagagaaaagaagaguaagaagaaauauaagaccccggcgccgccaccauguucguguuccugguccuccugccccuggugagcucccagugcgugaacuucaccacccgcacgcagcucccgcccgccuacaccaacagcuucacccggggcgucuacuaccccgacaagguguuccgcuccagcgugcugcacuccacccaggaccuguuccuccccuucuucagcaacgucacgugguuccacgccauccacguguccgggaccaacggcaccaagcgguucgcgaacccggugcugcccuucaacgacggggucuacuucgccagcaccgagaaguccaacaucauccgcggcuggaucuucgggacgacccuggacagcaagacccagucccuccugaucgugaacaacgccaccaacguggucaucaaggugugcgaguuccaguucugcaacgaccccuuccugggcguguacuaccacaagaacaacaagagcuggauggaguccgaguuccgggucuacagcuccgccaacaacugcacguucgaguacgugagccagcccuuccucauggaccuggagggcaagcaggggaacuucaagaaccugcgcgaguucguguucaagaacaucgacggcuacuucaagaucuacuccaagcacaccccgaucaaccucguccgggggcugccccagggcuucagcgcccuggagccccucguggaccugcccaucgggaucaacaucacccgcuuccagacccugcacaucuccuaccucacgccgggcgacagcagcuccggcuggaccgcgggggccgccgccuacuacgugggcuaccugcagccccggaccuuccugcucaaguacaacgagaacgggaccaucacggacgcggucgacugcgcccuggacccccugagcgagaccaagugcacccucaaguccuucaccguggagaagggcaucuaccagacgagcaacuuccgcgugcagcccaccgaguccaucguccgguucccgaacaucaccaaccugugccccuucggcgagguguucaacgccacccgcuucgccagcgucuacgccuggaaccggaagcgcaucuccaacugcguggcggacuacagcgugcuguacaacuccgccagcuucuccacguucaagugcuacggggucagccccaccaagcucaacgaccugugcuucaccaacguguacgccgacuccuucgugauccggggcgacgagguccgccagaucgcccccgggcagaccggcaacaucgccgacuacaacuacaagcugccggacgacuucacggggugcgugaucgcguggaacagcaacaaccucgacuccaaggugggcggcaacuacaacuaccuguaccggcuguuccgcaagagcaaccucaagcccuucgagcgggacaucuccaccgagaucuaccaggccgggagcacccccugcaacggcgucaagggguucaacugcuacuucccccugcaguccuacggcuuccagccgaccuacggggugggcuaccagcccuaccgcguggucgugcugagcuucgagcuccugcacgcccccgccacggugugcggccccaagaaguccaccaaccuggucaagaacaagugcgugaacuucaacuucaacgggcucaccggcaccggggugcugaccgagagcaacaagaaguuccugccguuccagcaguucggccgggacaucgccgacacgaccgacgcgguccgcgacccccagacccucgagauccuggacaucacccccugcagcuucgggggcguguccgugaucacgccgggcaccaacaccagcaaccaggucgccgugcuguaccagggggugaacugcaccgagguccccguggccauccacgccgaccagcugacgcccaccuggcgcguguacuccaccggcagcaacgucuuccagacccgggccgggugccucaucggcgcggagcacgugaacaacuccuacgagugcgacauccccaucggcgccgggaucugcgccagcuaccagacgcagaccaacuccccgcgccgggcccgcagcguggcgucccagagcaucaucgccuacaccaugucccugggcgucgagaacagcguggccuacuccaacaacagcaucgccauccccaccaacuucacgaucuccgugaccaccgagauccugcccgucagcaugaccaagacgagcguggacugcaccauguacaucugcggggacuccaccgagugcagcaaccuccugcugcaguacggcuccuucugcacccagcucaaccgggcccugacggggaucgcgguggagcaggacaagaacacccaggaggucuucgcccaggugaagcagaucuacaagacgcccccgaucaaggacuucggcggcuucaacuucagccagauccugcccgaccccuccaagcccagcaagcgcuccuucaucgaggaccuccuguucaacaaggugacccuggccgacgccggguucaucaagcaguacggcgacugccucggggacaucgccgcgcgggaccugaucugcgcccagaaguucaacggccugaccguccucccgccccugcugaccgacgagaugaucgcccaguacaccagcgcccuccuggccgggaccaucacguccggcuggaccuucggcgcgggggccgcccugcagauccccuucgccaugcagauggcguaccgcuucaacggcaucggggugacccagaacgugcucuacgagaaccagaagcugaucgccaaccaguucaacagcgccaucggcaagauccaggacucccugagcuccaccgccagcgcccucgggaagcugcaggacgucgugaaccagaacgcgcaggcccugaacacgcucgugaagcagcuguccagcaacuucggcgccaucuccagcguccugaacgacauccucucccggcuggacccgcccgaggccgaggugcagaucgaccgccugaucaccggccggcuccagagccugcagaccuacgugacccagcagcugauccgcgccgcggagauccgggccagcgccaaccucgccgccaccaagauguccgagugcguccuggggcagagcaagcgcguggacuucugcggcaagggguaccaccugauguccuucccccagagcgcgccccacggcguggucuuccuccacgugacguacguccccgcccaggagaagaacuucaccaccgccccggccaucugccacgacgggaaggcgcacuucccccgggagggcguguucguguccaacggcacccacugguucgucacgcagcgcaacuucuacgagccccagaucaucaccaccgacaacaccuucgugagcgggaacugcgacguggucaucggcaucgugaacaacacgguguacgacccccugcagccggagcuggacuccuucaaggaggagcucgacaaguacuucaagaaccacaccagccccgacgucgaccugggggacaucuccggcaucaacgccagcguggugaacauccagaaggagaucgaccggcugaacgaggucgccaagaaccucaacgagucccugaucgaccugcaggagcucggcaaguacgagcaguacaucaaguggcccugguacaucuggcugggguucaucgccggccugaucgccaucgugauggugaccaucaugcucugcugcaugaccagcugcugcuccugccugaaggggugcugcagcugcggcuccugcugcaaguucgacgaggacgacagcgagccgguccugaagggggugaagcuccacuacacgugauaauaggcuggagccucgguggccuagcuucuugccccuugggccuccccccagccccuccuccccuuccugcacccguacccccguggucuuugaauaaagucugagugggcggcaaaaaaaaaaaaaaaaaaaaaaaaaaaaaaaaaaaaaaaaaaaaaaaaaaaaaaaaaaaaaaaaaaaaaaaaaaaaaaaaaaaaaaaaaaaaaaaaaaaa

SEQ ID NO: 26190 - RNA, 4095 nt, Artificial Sequence
  SARS-CoV-2/Wuhan/WIV05/2019__EPI_ISL_402128 spike protein mRNA gc (1-1273)(K986P_V987P_K986P_V987P_E484K_D614G)
gggaaauaagagagaaaagaagaguaagaagaaauauaagaccccggcgccgccaccauguucguguuccugguccuccugccccuggugagcucccagugcgugaaccucaccacccgcacgcagcugccgcccgccuacaccaacagcuucacccggggcgucuacuaccccgacaagguguuccgcuccagcgugcugcacuccacccaggaccucuuccugcccuucuucagcaacgucacgugguuccacgccauccacguguccgggaccaacggcaccaagcgguucgacaacccggugcugcccuucaacgacggggucuacuucgcgagcaccgagaaguccaacaucauccgcggcuggaucuucgggacgacccucgacagcaagacccagucccugcugaucgugaacaacgccaccaacguggucaucaaggugugcgaguuccaguucugcaacgaccccuuccucggcguguacuaccacaagaacaacaagagcuggauggaguccgaguuccgggucuacagcuccgccaacaacugcacguucgaguacgugagccagcccuuccugauggaccuggagggcaagcaggggaacuucaagaaccuccgcgaguucguguucaagaacaucgacggcuacuucaagaucuacuccaagcacaccccgaucaaccugguccgggaccugccccagggguucagcgcccucgagccccugguggaccugcccaucggcaucaacaucacccgcuuccagacccuccuggcccugcaccgguccuaccucacgccgggggacagcagcuccggcuggaccgcgggcgccgccgccuacuacgugggguaccugcagccccgcaccuuccugcucaaguacaacgagaacggcaccaucacggacgcggucgacugcgcccuggacccccugagcgagaccaagugcacccucaaguccuucaccguggagaaggggaucuaccagacgagcaacuuccgggugcagcccaccgaguccaucguccgcuucccgaacaucaccaaccugugccccuucggcgagguguucaacgccacccgguucgccagcgucuacgccuggaaccgcaagcggaucuccaacugcguggcggacuacagcgugcuguacaacuccgccagcuucuccacguucaagugcuacggcgucagccccaccaagcucaacgaccugugcuucaccaacguguacgccgacuccuucgugauccgcggggacgagguccggcagaucgcccccggccagaccgggaagaucgccgacuacaacuacaagcugccggacgacuucacgggcugcgugaucgcguggaacagcaacaaccucgacuccaaggucgggggcaacuacaacuaccuguaccgccuguuccgcaagagcaaccucaagcccuucgagcgggacaucuccaccgagaucuaccaggccggcagcacccccugcaacggggugaagggcuucaacugcuacuucccccugcaguccuacggguuccagccgaccaacggcgugggguaccagcccuaccggguggucgugcugagcuucgagcuccugcacgcccccgccacggugugcggccccaagaaguccaccaaccuggucaagaacaagugcgugaacuucaacuucaacggccucaccgggaccggcgugcugaccgagagcaacaagaaguuccugccguuccagcaguucgggcgcgacaucgccgacacgaccgacgcgguccgcgacccccagacccuggagauccucgacaucacccccugcagcuucggcgggguguccgugaucacgccgggcaccaacaccagcaaccaggucgccgugcuguaccagggcgugaacugcaccgagguccccguggccauccacgccgaccagcugacgcccaccuggcggguguacuccaccgggagcaacgucuuccagacccgcgccggcugccucaucggggcggagcacgugaacaacuccuacgagugcgacauccccaucggcgccggcaucugcgccagcuaccagacgcagaccaacuccccgcggcgcgcccggagcguggcgucccagagcaucaucgccuacaccaugucccugggggccgagaacagcgucgccuacuccaacaacagcaucgccauccccaccaacuucacgaucuccgugaccaccgagauccugcccgugagcaugaccaagacgagcgucgacugcaccauguacaucugcggcgacuccaccgagugcagcaaccuccugcugcaguacggguccuucugcacccagcucaaccgcgcgcugacgggcaucgccguggagcaggacaagaacacccaggagguguucgcccaggucaagcagaucuacaagacgcccccgaucaaggacuucgggggcuucaacuucagccagauccugcccgaccccuccaagcccagcaagcgguccuucaucgaggaccuccuguucaacaaggugacccuggccgacgccggcuucaucaagcaguacggggacugccucggcgacaucgcggcccgcgaccugaucugcgcccagaaguucaacgggcugaccgugcucccgccccugcugaccgacgagaugaucgcccaguacaccagcgcccuccuggcgggcaccaucacguccggguggaccuucggcgccggcgccgcccugcagauccccuucgcgaugcagauggccuaccgguucaacgggaucggcgucacccagaacgugcucuacgagaaccagaagcugaucgccaaccaguucaacagcgccaucgggaagauccaggacucccugagcuccaccgccagcgcgcucggcaagcugcaggacguggucaaccagaacgcccaggcccugaacacgcucgugaagcagcuguccagcaacuucggggccaucuccagcgugcugaacgacauccucucccgccuggacccgcccgaggccgagguccagaucgaccggcugaucaccggccgccuccagagccugcagaccuacgugacccagcagcugauccgggcggccgagauccgcgccagcgccaaccucgccgcgaccaagauguccgagugcgugcugggccagagcaagcgggucgacuucugcgggaagggcuaccaccugauguccuucccccagagcgcgccccacggggugguguuccuccacgucacguacgugcccgcccaggagaagaacuucaccaccgccccggccaucugccacgacggcaaggcccacuucccccgcgagggggucuucguguccaacggcacccacugguucgugacgcagcggaacuucuacgagccccagaucaucaccaccgacaacaccuucgucagcggcaacugcgacguggugaucgggaucgucaacaacacgguguacgacccccugcagccggagcuggacuccuucaaggaggagcucgacaaguacuucaagaaccacaccagccccgacguggaccugggcgacaucuccgggaucaacgccagcgucgugaacauccagaaggagaucgaccgccugaacgagguggccaagaaccucaacgagucccugaucgaccugcaggagcucggcaaguacgagcaguacaucaaguggcccugguacaucuggcugggcuucaucgccgggcugaucgcgaucgucauggugaccaucaugcucugcugcaugaccagcugcugcuccugccugaagggcugcugcagcugcggguccugcugcaaguucgacgaggacgacagcgagccggugcugaagggcgucaagcuccacuacacgugauaauaggcuggagccucgguggccuagcuucuugccccuugggccuccccccagccccuccuccccuuccugcacccguacccccguggucuuugaauaaagucugagugggcggcaaaaaaaaaaaaaaaaaaaaaaaaaaaaaaaaaaaaaaaaaaaaaaaaaaaaaaaaaaaaaaaaaaaaaaaaaaaaaaaaaaaaaaaaaaaaaaaaaaaa

SEQ ID NO: 26191 - RNA, 4095 nt, Artificial Sequence
  SARS-CoV-2/Wuhan/WIV05/2019__EPI_ISL_402128 spike protein mRNA gc (1-1273)(K986P_V987P_K986P_V987P_L18F_T20N_P26S_D138Y_R190S_K417T _E484K_N501Y_D614G_H655Y_T1027I)
gggaaauaagagagaaaagaagaguaagaagaaauauaagaccccggcgccgccaccauguucguguuccugguccuccugccccuggugagcucccagugcgugaacuucaccaaccgcacccagcucccgagcgccuacacgaacuccuucacccggggcgucuacuaccccgacaagguguuccgcagcuccgugcugcacagcacccaggaccuguuccuccccuucuucuccaacgucaccugguuccacgccauccacgugagcgggacgaacggcaccaagcgguucgacaaccccgugcugccguucaacgacggggucuacuucgcguccaccgagaaguccaacaucauccgcggcuggaucuucgggaccacgcuggacuccaagacccagagccuccugaucgugaacaacgccaccaacguggucaucaaggugugcgaguuccaguucugcaacuaccccuuccugggcguguacuaccacaagaacaacaaguccuggauggagagcgaguuccgggucuacuccagcgccaacaacugcaccuucgaguacgugucccagcccuuccucauggaccuggagggcaagcaggggaacuucaagaaccugagcgaguucguguucaagaacaucgacggcuacuucaagaucuacuccaagcacacgcccaucaaccucguccgcgaccugccgcagggguucagcgcccuggagccccucguggaccugcccaucggcaucaacaucacccgguuccagacccugcucgcccugcaccgcagcuaccugacccccggggacuccagcuccggcuggacggcgggcgccgccgccuacuacgugggguaccuccagccgcggaccuuccugcugaaguacaacgagaacggcaccaucaccgacgcggucgacugcgcccucgacccccugagcgagacgaagugcacccugaaguccuucaccguggagaaggggaucuaccagaccagcaacuuccgcgugcagcccacggaguccaucguccgguuccccaacaucaccaaccucugcccguucggcgagguguucaacgccacccgcuucgccagcgucuacgccuggaaccggaagcgcaucuccaacugcguggcggacuacagcgugcuguacaacuccgccagcuucuccaccuucaagugcuacggcgucagccccacgaagcugaacgaccucugcuucaccaacguguacgccgacuccuucgugauccgcggggacgagguccggcagaucgcccccggccagaccgggaccaucgccgacuacaacuacaagcugcccgacgacuucacgggcugcgugaucgcguggaacagcaacaaccuggacuccaaggucgggggcaacuacaacuaccucuaccggcuguuccgcaagagcaaccugaagccguucgagcgggacaucuccaccgagaucuaccaggccggcagcacccccugcaacggggugaagggcuucaacugcuacuucccccuccagagcuacggguuccagcccaccuacggcgugggguaccagccguaccgcguggucgugcuguccuucgagcugcuccacgcccccgccacggugugcggccccaagaaguccaccaaccuggucaagaacaagugcgugaacuucaacuucaacggccugaccgggaccggcgugcucaccgagagcaacaagaaguuccugcccuuccagcaguucgggcgggacaucgccgacacgaccgacgcgguccgcgacccgcagacccuggagauccuggacaucacccccugcagcuucggcgggguguccgugaucacgcccggcaccaacaccagcaaccaggucgccgugcucuaccagggcgugaacugcaccgaggucccgguggccauccacgccgaccagcugacgcccaccuggcgcguguacuccaccgggagcaacgucuuccagacccgggccggcugccugaucggggcggaguacgugaacaacuccuacgagugcgacauccccaucggcgccggcaucugcgccagcuaccagacgcagaccaacagcccccgccgggcccgcagcguggcgucccagagcaucaucgccuacaccaugucccucggggccgagaacagcgucgccuacuccaacaacagcaucgccaucccgaccaacuucacgaucagcgugaccaccgagauccugcccguguccaugaccaagacgagcgucgacugcaccauguacaucugcggcgacuccaccgagugcagcaaccugcuccugcaguacggguccuucugcacccagcugaaccgggcgcucacgggcaucgccguggagcaggacaagaacacccaggagguguucgcccaggucaagcagaucuacaagaccccgcccaucaaggacuucgggggcuucaacuucagccagauccugcccgaccccuccaagcccagcaagcgcuccuucaucgaggaccuccuguucaacaaggugacccuggccgacgccggcuucaucaagcaguacggggacugccugggcgacaucgcggcccgggaccucaucugcgcccagaaguucaacgggcugacggugcugcccccgcuccugaccgacgagaugaucgcccaguacaccagcgcccugcucgcgggcaccaucacguccggguggaccuucggcgccggcgccgcccugcagauccccuucgcgaugcagauggccuaccgcuucaacgggaucggcgucacccagaacgugcuguacgagaaccagaagcucaucgccaaccaguucaacagcgccaucgggaagauccaggacucccugagcuccaccgccagcgcgcugggcaagcuccaggacguggucaaccagaacgcccaggcccugaacacgcuggugaagcagcucuccagcaacuucggggccaucuccagcgugcugaacgacauccugagccggcucgacccgcccgaggccgagguccagaucgaccgccugaucaccggccggcugcagucccuccagaccuacgugacccagcagcugauccgcgcggccgagauccgggccagcgccaaccuggccgcgaucaagauguccgagugcgugcucggccagagcaagcgcgucgacuucugcgggaagggcuaccaccugauguccuucccccagagcgcgccccacggggugguguuccugcacgucaccuacgugcccgcccaggagaagaacuucacgaccgcccccgccaucugccacgacggcaaggcccacuucccgcgggagggggucuucguguccaacggcacccacugguucgugacccagcgcaacuucuacgagccccagaucaucacgaccgacaacaccuucgucagcggcaacugcgacguggugaucgggaucgucaacaacaccguguacgacccccuccagcccgagcuggacuccuucaaggaggagcuggacaaguacuucaagaaccacacgagcccggacguggaccucggcgacaucuccgggaucaacgccagcgucgugaacauccagaaggagaucgaccggcugaacgagguggccaagaaccugaacgagucccucaucgaccugcaggagcugggcaaguacgagcaguacaucaaguggcccugguacaucuggcucggcuucaucgccgggcugaucgcgaucgucauggugaccaucaugcugugcugcaugaccagcugcugcuccugccucaagggcugcugcagcugcggguccugcugcaaguucgacgaggacgacagcgagcccgugcugaagggcgucaagcugcacuacaccugauaauaggcuggagccucgguggccuagcuucuugccccuugggccuccccccagccccuccuccccuuccugcacccguacccccguggucuuugaauaaagucugagugggcggcaaaaaaaaaaaaaaaaaaaaaaaaaaaaaaaaaaaaaaaaaaaaaaaaaaaaaaaaaaaaaaaaaaaaaaaaaaaaaaaaaaaaaaaaaaaaaaaaaaaa

SEQ ID NO: 26192 - RNA, 4095 nt, Artificial Sequence
  SARS-CoV-2/Wuhan/WIV05/2019__EPI_ISL_402128 spike protein mRNA gc (1-1273)(K986P_V987P_K986P_V987P_S13I_W152C_L452R_D614G)
gggaaauaagagagaaaagaagaguaagaagaaauauaagaccccggcgccgccaccauguucguguuccugguccuccugccccuggugagcauccagugcgugaaccucaccacccgcacgcagcugccgcccgccuacaccaacuccuucacccggggcgucuacuaccccgacaagguguuccgcagcuccgugcugcacagcacccaggaccucuuccugcccuucuucuccaacgucacgugguuccacgccauccacgugagcgggaccaacggcaccaagcgguucgacaacccggugcugcccuucaacgacggggucuacuucgcguccaccgagaaguccaacaucauccgcggcuggaucuucgggacgacccucgacagcaagacccagagccugcugaucgugaacaacgccaccaacguggucaucaaggugugcgaguuccaguucugcaacgaccccuuccucggcguguacuaccacaagaacaacaaguccugcauggagagcgaguuccgggucuacuccagcgccaacaacugcacguucgaguacgugucccagcccuuccugauggaccuggagggcaagcaggggaacuucaagaaccuccgcgaguucguguucaagaacaucgacggcuacuucaagaucuacagcaagcacaccccgaucaaccugguccgggaccugccccagggguucuccgcccucgagccccugguggaccugcccaucggcaucaacaucacccgcuuccagacccuccuggcccugcaccggagcuaccucacgccgggggacuccagcagcggcuggaccgcgggcgccgccgccuacuacgugggguaccugcagccccgcaccuuccugcucaaguacaacgagaacggcaccaucacggacgcggucgacugcgcccuggacccccuguccgagaccaagugcacccucaagagcuucaccguggagaaggggaucuaccagacguccaacuuccgggugcagcccaccgagagcaucguccgcuucccgaacaucaccaaccugugccccuucggcgagguguucaacgccacccgguucgccuccgucuacgccuggaaccgcaagcggaucagcaacugcguggcggacuacuccgugcuguacaacagcgccuccuucagcacguucaagugcuacggcgucucccccaccaagcucaacgaccugugcuucaccaacguguacgccgacagcuucgugauccgcggggacgagguccggcagaucgcccccggccagaccgggaagaucgccgacuacaacuacaagcugccggacgacuucacgggcugcgugaucgcguggaacuccaacaaccucgacagcaaggucgggggcaacuacaacuaccgcuaccggcuguuccgcaaguccaaccugaagcccuucgagcgggacaucagcaccgagaucuaccaggccggcuccacccccugcaacgggguggagggcuucaacugcuacuucccccuccagagcuacggguuccagccgaccaacggcgugggguaccagcccuaccgcguggucgugcuguccuucgagcugcuccacgcccccgccacggugugcggccccaagaaguccaccaaccuggucaagaacaagugcgugaacuucaacuucaacggccugaccgggaccggcgugcucaccgagagcaacaagaaguuccugccguuccagcaguucgggcgcgacaucgccgacacgaccgacgcgguccgggacccccagacccuggagauccuggacaucacccccugcagcuucggcggggugagcgugaucacgccgggcaccaacaccuccaaccaggucgccgugcucuaccagggcgugaacugcaccgagguccccguggccauccacgccgaccagcugacgcccaccuggcgcguguacagcaccggguccaacgucuuccagacccgggccggcugccugaucggggcggagcacgugaacaacagcuacgagugcgacauccccaucggcgccggcaucugcgccuccuaccagacgcagaccaacagcccgcgccgggcccgcuccguggcgagccaguccaucaucgccuacaccaugagccucggggccgagaacuccgucgccuacagcaacaacuccaucgccauccccaccaacuucacgaucagcgugaccaccgagauccugcccguguccaugaccaagacgagcgucgacugcaccauguacaucugcggcgacagcaccgagugcuccaaccugcuccugcaguacgggagcuucugcacccagcugaaccgggcgcucacgggcaucgccguggagcaggacaagaacacccaggagguguucgcccaggucaagcagaucuacaagacgcccccgaucaaggacuucgggggcuucaacuucucccagauccugcccgaccccagcaagcccuccaagcgcagcuucaucgaggaccuccuguucaacaaggugacccuggccgacgccggcuucaucaagcaguacggggacugccugggcgacaucgcggcccgggaccucaucugcgcccagaaguucaacgggcugaccgugcugccgccccuccugaccgacgagaugaucgcccaguacaccuccgcccugcucgcgggcaccaucacgagcggguggaccuucggcgccggcgccgcccugcagauccccuucgcgaugcagauggccuaccgcuucaacgggaucggcgucacccagaacgugcuguacgagaaccagaagcucaucgccaaccaguucaacuccgccaucgggaagauccaggacagccuguccagcaccgccuccgcgcugggcaagcuccaggacguggucaaccagaacgcccaggcccugaacacgcuggugaagcagcucagcuccaacuucggggccaucagcuccgugcugaacgacauccugagccggcucgacccgcccgaggccgagguccagaucgaccgccugaucaccggccggcugcagucccuccagaccuacgugacccagcagcugauccgcgcggccgagauccgggccagcgccaaccuggccgcgaccaagaugagcgagugcgugcucggccaguccaagcgcgucgacuucugcgggaagggcuaccaccugaugagcuucccccaguccgcgccccacggggugguguuccugcacgucacguacgugcccgcccaggagaagaacuucaccaccgccccggccaucugccacgacggcaaggcccacuucccccgggagggggucuucgugagcaacggcacccacugguucgugacgcagcgcaacuucuacgagccccagaucaucaccaccgacaacaccuucgucuccggcaacugcgacguggugaucgggaucgucaacaacacgguguacgacccccuccagccggagcuggacagcuucaaggaggagcuggacaaguacuucaagaaccacaccucccccgacguggaccucggcgacaucagcgggaucaacgccuccgucgugaacauccagaaggagaucgaccggcugaacgagguggccaagaaccugaacgagagccucaucgaccugcaggagcugggcaaguacgagcaguacaucaaguggcccugguacaucuggcucggcuucaucgccgggcugaucgcgaucgucauggugaccaucaugcugugcugcaugaccuccugcugcagcugccucaagggcugcugcuccugcgggagcugcugcaaguucgacgaggacgacuccgagccggugcugaagggcgucaagcugcacuacacgugauaauaggcuggagccucgguggccuagcuucuugccccuugggccuccccccagccccuccuccccuuccugcacccguacccccguggucuuugaauaaagucugagugggcggcaaaaaaaaaaaaaaaaaaaaaaaaaaaaaaaaaaaaaaaaaaaaaaaaaaaaaaaaaaaaaaaaaaaaaaaaaaaaaaaaaaaaaaaaaaaaaaaaaaaa

SEQ ID NO: 26193 - RNA, 4095 nt, Artificial Sequence
  SARS-CoV-2/Wuhan/WIV05/2019__EPI_ISL_402128 spike protein mRNA gc (1-1273)(K986P_V987P)
gggaaauaagagagaaaagaagaguaagaagaaauauaagaccccggcgccgccaccauguucguguuccuggugcugcugccccuggugagcagccagugcgugaaccugaccacccggacccagcugccaccagccuacaccaacagcuucacccggggcgucuacuaccccgacaagguguuccggagcagcguccugcacagcacccaggaccuguuccugcccuucuucagcaacgugaccugguuccacgccauccacgugagcggcaccaacggcaccaagcgguucgacaaccccgugcugcccuucaacgacggcguguacuucgccagcaccgagaagagcaacaucauccggggcuggaucuucggcaccacccuggacagcaagacccagagccugcugaucgugaauaacgccaccaacguggugaucaaggugugcgaguuccaguucugcaacgaccccuuccugggcguguacuaccacaagaacaacaagagcuggauggagagcgaguuccggguguacagcagcgccaacaacugcaccuucgaguacgugagccagcccuuccugauggaccuggagggcaagcagggcaacuucaagaaccugcgggaguucguguucaagaacaucgacggcuacuucaagaucuacagcaagcacaccccaaucaaccuggugcgggaucugccccagggcuucucagcccuggagccccugguggaccugcccaucggcaucaacaucacccgguuccagacccugcuggcccugcaccggagcuaccugaccccaggcgacagcagcagcggguggacagcaggcgcggcugcuuacuacgugggcuaccugcagccccggaccuuccugcugaaguacaacgagaacggcaccaucaccgacgccguggacugcgcccuggacccucugagcgagaccaagugcacccugaagagcuucaccguggagaagggcaucuaccagaccagcaacuuccgggugcagcccaccgagagcaucgugcgguuccccaacaucaccaaccugugccccuucggcgagguguucaacgccacccgguucgccagcguguacgccuggaaccggaagcggaucagcaacugcguggccgacuacagcgugcuguacaacagcgccagcuucagcaccuucaagugcuacggcgugagccccaccaagcugaacgaccugugcuucaccaacguguacgccgacagcuucgugauccguggcgacgaggugcggcagaucgcacccggccagacaggcaagaucgccgacuacaacuacaagcugcccgacgacuucaccggcugcgugaucgccuggaacagcaacaaccucgacagcaaggugggcggcaacuacaacuaccuguaccggcuguuccggaagagcaaccugaagcccuucgagcgggacaucagcaccgagaucuaccaagccggcuccaccccuugcaacggcguggagggcuucaacugcuacuucccucugcagagcuacggcuuccagcccaccaacggcgugggcuaccagcccuaccgggugguggugcugagcuucgagcugcugcacgccccagccaccguguguggccccaagaagagcaccaaccuggugaagaacaagugcgugaacuucaacuucaacggccuuaccggcaccggcgugcugaccgagagcaacaagaaauuccugcccuuucagcaguucggccgggacaucgccgacaccaccgacgcugugcgggauccccagacccuggagauccuggacaucaccccuugcagcuucggcggcgugagcgugaucaccccaggcaccaacaccagcaaccagguggccgugcuguaccaggacgugaacugcaccgaggugcccguggccauccacgccgaccagcugacacccaccuggcgggucuacagcaccggcagcaacguguuccagacccgggccgguugccugaucggcgccgagcacgugaacaacagcuacgagugcgacauccccaucggcgccggcaucugugccagcuaccagacccagaccaauucaccccggagggcaaggagcguggccagccagagcaucaucgccuacaccaugagccugggcgccgagaacagcguggccuacagcaacaacagcaucgccauccccaccaacuucaccaucagcgugaccaccgagauucugcccgugagcaugaccaagaccagcguggacugcaccauguacaucugcggcgacagcaccgagugcagcaaccugcugcugcaguacggcagcuucugcacccagcugaaccgggcccugaccggcaucgccguggagcaggacaagaacacccaggagguguucgcccaggugaagcagaucuacaagaccccucccaucaaggacuucggcggcuucaacuucagccagauccugcccgaccccagcaagcccagcaagcggagcuucaucgaggaccugcuguucaacaaggugacccuagccgacgccggcuucaucaagcaguacggcgacugccucggcgacauagccgcccgggaccugaucugcgcccagaaguucaacggccugaccgugcugccuccccugcugaccgacgagaugaucgcccaguacaccagcgcccuguuagccggaaccaucaccagcggcuggacuuucggcgcuggagccgcucugcagauccccuucgccaugcagauggccuaccgguucaacggcaucggcgugacccagaacgugcuguacgagaaccagaagcugaucgccaaccaguucaacagcgccaucggcaagauccaggacagccugagcagcaccgcuagcgcccugggcaagcugcaggacguggugaaccagaacgcccaggcccugaacacccuggugaagcagcugagcagcaacuucggcgccaucagcagcgugcugaacgacauccugagccggcuggacccucccgaggccgaggugcagaucgaccggcugaucacuggccggcugcagagccugcagaccuacgugacccagcagcugauccgggccgccgagauucgggccagcgccaaccuggccgccaccaagaugagcgagugcgugcugggccagagcaagcggguggacuucugcggcaagggcuaccaccugaugagcuuuccccagagcgcaccccacggagugguguuccugcacgugaccuacgugcccgcccaggagaagaacuucaccaccgccccagccaucugccacgacggcaaggcccacuuuccccgggagggcguguucgugagcaacggcacccacugguucgugacccagcggaacuucuacgagccccagaucaucaccaccgacaacaccuucgugagcggcaacugcgacguggugaucggcaucgugaacaacaccguguacgauccccugcagcccgagcuggacagcuucaaggaggagcuggacaaguacuucaagaaucacaccagccccgacguggaccugggcgacaucagcggcaucaacgccagcguggugaacauccagaaggagaucgaucggcugaacgagguggccaagaaccugaacgagagccugaucgaccugcaggagcugggcaaguacgagcaguacaucaaguggcccugguacaucuggcugggcuucaucgccggccugaucgccaucgugauggugaccaucaugcugugcugcaugaccagcugcugcagcugccugaagggcuguugcagcugcggcagcugcugcaaguucgacgaggacgacagcgagcccgugcugaagggcgugaagcugcacuacaccugauaauaggcuggagccucgguggccuagcuucuugccccuugggccuccccccagccccuccuccccuuccugcacccguacccccguggucuuugaauaaagucugagugggcggcaaaaaaaaaaaaaaaaaaaaaaaaaaaaaaaaaaaaaaaaaaaaaaaaaaaaaaaaaaaaaaaaaaaaaaaaaaaaaaaaaaaaaaaaaaaaaaaaaaaa

SEQ ID NO: 26194 - RNA, 4095 nt, Artificial Sequence
  SARS-CoV-2/Wuhan/WIV05/2019__EPI_ISL_402128 spike protein mRNA gc (1-1273)(K986P_V987P_ D614G)
gggaaauaagagagaaaagaagaguaagaagaaauauaagaccccggcgccgccaccauguucguguuccuggugcugcugccccuggugagcagccagugcgugaaccugaccacccggacccagcugccaccagccuacaccaacagcuucacccggggcgucuacuaccccgacaagguguuccggagcagcguccugcacagcacccaggaccuguuccugcccuucuucagcaacgugaccugguuccacgccauccacgugagcggcaccaacggcaccaagcgguucgacaaccccgugcugcccuucaacgacggcguguacuucgccagcaccgagaagagcaacaucauccggggcuggaucuucggcaccacccuggacagcaagacccagagccugcugaucgugaauaacgccaccaacguggugaucaaggugugcgaguuccaguucugcaacgaccccuuccugggcguguacuaccacaagaacaacaagagcuggauggagagcgaguuccggguguacagcagcgccaacaacugcaccuucgaguacgugagccagcccuuccugauggaccuggagggcaagcagggcaacuucaagaaccugcgggaguucguguucaagaacaucgacggcuacuucaagaucuacagcaagcacaccccaaucaaccuggugcgggaucugccccagggcuucucagcccuggagccccugguggaccugcccaucggcaucaacaucacccgguuccagacccugcuggcccugcaccggagcuaccugaccccaggcgacagcagcagcggguggacagcaggcgcggcugcuuacuacgugggcuaccugcagccccggaccuuccugcugaaguacaacgagaacggcaccaucaccgacgccguggacugcgcccuggacccucugagcgagaccaagugcacccugaagagcuucaccguggagaagggcaucuaccagaccagcaacuuccgggugcagcccaccgagagcaucgugcgguuccccaacaucaccaaccugugccccuucggcgagguguucaacgccacccgguucgccagcguguacgccuggaaccggaagcggaucagcaacugcguggccgacuacagcgugcuguacaacagcgccagcuucagcaccuucaagugcuacggcgugagccccaccaagcugaacgaccugugcuucaccaacguguacgccgacagcuucgugauccguggcgacgaggugcggcagaucgcacccggccagacaggcaagaucgccgacuacaacuacaagcugcccgacgacuucaccggcugcgugaucgccuggaacagcaacaaccucgacagcaaggugggcggcaacuacaacuaccuguaccggcuguuccggaagagcaaccugaagcccuucgagcgggacaucagcaccgagaucuaccaagccggcuccaccccuugcaacggcguggagggcuucaacugcuacuucccucugcagagcuacggcuuccagcccaccaacggcgugggcuaccagcccuaccgggugguggugcugagcuucgagcugcugcacgccccagccaccguguguggccccaagaagagcaccaaccuggugaagaacaagugcgugaacuucaacuucaacggccuuaccggcaccggcgugcugaccgagagcaacaagaaauuccugcccuuucagcaguucggccgggacaucgccgacaccaccgacgcugugcgggauccccagacccuggagauccuggacaucaccccuugcagcuucggcggcgugagcgugaucaccccaggcaccaacaccagcaaccagguggccgugcuguaccagggcgugaacugcaccgaggugcccguggccauccacgccgaccagcugacacccaccuggcgggucuacagcaccggcagcaacguguuccagacccgggccgguugccugaucggcgccgagcacgugaacaacagcuacgagugcgacauccccaucggcgccggcaucugugccagcuaccagacccagaccaauucaccccggagggcaaggagcguggccagccagagcaucaucgccuacaccaugagccugggcgccgagaacagcguggccuacagcaacaacagcaucgccauccccaccaacuucaccaucagcgugaccaccgagauucugcccgugagcaugaccaagaccagcguggacugcaccauguacaucugcggcgacagcaccgagugcagcaaccugcugcugcaguacggcagcuucugcacccagcugaaccgggcccugaccggcaucgccguggagcaggacaagaacacccaggagguguucgcccaggugaagcagaucuacaagaccccucccaucaaggacuucggcggcuucaacuucagccagauccugcccgaccccagcaagcccagcaagcggagcuucaucgaggaccugcuguucaacaaggugacccuagccgacgccggcuucaucaagcaguacggcgacugccucggcgacauagccgcccgggaccugaucugcgcccagaaguucaacggccugaccgugcugccuccccugcugaccgacgagaugaucgcccaguacaccagcgcccuguuagccggaaccaucaccagcggcuggacuuucggcgcuggagccgcucugcagauccccuucgccaugcagauggccuaccgguucaacggcaucggcgugacccagaacgugcuguacgagaaccagaagcugaucgccaaccaguucaacagcgccaucggcaagauccaggacagccugagcagcaccgcuagcgcccugggcaagcugcaggacguggugaaccagaacgcccaggcccugaacacccuggugaagcagcugagcagcaacuucggcgccaucagcagcgugcugaacgacauccugagccggcuggacccucccgaggccgaggugcagaucgaccggcugaucacuggccggcugcagagccugcagaccuacgugacccagcagcugauccgggccgccgagauucgggccagcgccaaccuggccgccaccaagaugagcgagugcgugcugggccagagcaagcggguggacuucugcggcaagggcuaccaccugaugagcuuuccccagagcgcaccccacggagugguguuccugcacgugaccuacgugcccgcccaggagaagaacuucaccaccgccccagccaucugccacgacggcaaggcccacuuuccccgggagggcguguucgugagcaacggcacccacugguucgugacccagcggaacuucuacgagccccagaucaucaccaccgacaacaccuucgugagcggcaacugcgacguggugaucggcaucgugaacaacaccguguacgauccccugcagcccgagcuggacagcuucaaggaggagcuggacaaguacuucaagaaucacaccagccccgacguggaccugggcgacaucagcggcaucaacgccagcguggugaacauccagaaggagaucgaucggcugaacgagguggccaagaaccugaacgagagccugaucgaccugcaggagcugggcaaguacgagcaguacaucaaguggcccugguacaucuggcugggcuucaucgccggccugaucgccaucgugauggugaccaucaugcugugcugcaugaccagcugcugcagcugccugaagggcuguugcagcugcggcagcugcugcaaguucgacgaggacgacagcgagcccgugcugaagggcgugaagcugcacuacaccugauaauaggcuggagccucgguggccuagcuucuugccccuugggccuccccccagccccuccuccccuuccugcacccguacccccguggucuuugaauaaagucugagugggcggcaaaaaaaaaaaaaaaaaaaaaaaaaaaaaaaaaaaaaaaaaaaaaaaaaaaaaaaaaaaaaaaaaaaaaaaaaaaaaaaaaaaaaaaaaaaaaaaaaaaa

SEQ ID NO: 26195 - RNA, 4095 nt, Artificial Sequence
  SARS-CoV-2/Wuhan/WIV05/2019__EPI_ISL_402128 spike protein mRNA gc (1-1273)(K986P_V987P_A222V_D614G)
gggaaauaagagagaaaagaagaguaagaagaaauauaagaccccggcgccgccaccauguucguguuccuggugcugcugccccuggugagcagccagugcgugaaccugaccacccggacccagcugccaccagccuacaccaacagcuucacccggggcgucuacuaccccgacaagguguuccggagcagcguccugcacagcacccaggaccuguuccugcccuucuucagcaacgugaccugguuccacgccauccacgugagcggcaccaacggcaccaagcgguucgacaaccccgugcugcccuucaacgacggcguguacuucgccagcaccgagaagagcaacaucauccggggcuggaucuucggcaccacccuggacagcaagacccagagccugcugaucgugaauaacgccaccaacguggugaucaaggugugcgaguuccaguucugcaacgaccccuuccugggcguguacuaccacaagaacaacaagagcuggauggagagcgaguuccggguguacagcagcgccaacaacugcaccuucgaguacgugagccagcccuuccugauggaccuggagggcaagcagggcaacuucaagaaccugcgggaguucguguucaagaacaucgacggcuacuucaagaucuacagcaagcacaccccaaucaaccuggugcgggaucugccccagggcuucucagugcuggagccccugguggaccugcccaucggcaucaacaucacccgguuccagacccugcuggcccugcaccggagcuaccugaccccaggcgacagcagcagcggguggacagcaggcgcggcugcuuacuacgugggcuaccugcagccccggaccuuccugcugaaguacaacgagaacggcaccaucaccgacgccguggacugcgcccuggacccucugagcgagaccaagugcacccugaagagcuucaccguggagaagggcaucuaccagaccagcaacuuccgggugcagcccaccgagagcaucgugcgguuccccaacaucaccaaccugugccccuucggcgagguguucaacgccacccgguucgccagcguguacgccuggaaccggaagcggaucagcaacugcguggccgacuacagcgugcuguacaacagcgccagcuucagcaccuucaagugcuacggcgugagccccaccaagcugaacgaccugugcuucaccaacguguacgccgacagcuucgugauccguggcgacgaggugcggcagaucgcacccggccagacaggcaagaucgccgacuacaacuacaagcugcccgacgacuucaccggcugcgugaucgccuggaacagcaacaaccucgacagcaaggugggcggcaacuacaacuaccuguaccggcuguuccggaagagcaaccugaagcccuucgagcgggacaucagcaccgagaucuaccaagccggcuccaccccuugcaacggcguggagggcuucaacugcuacuucccucugcagagcuacggcuuccagcccaccaacggcgugggcuaccagcccuaccgggugguggugcugagcuucgagcugcugcacgccccagccaccguguguggccccaagaagagcaccaaccuggugaagaacaagugcgugaacuucaacuucaacggccuuaccggcaccggcgugcugaccgagagcaacaagaaauuccugcccuuucagcaguucggccgggacaucgccgacaccaccgacgcugugcgggauccccagacccuggagauccuggacaucaccccuugcagcuucggcggcgugagcgugaucaccccaggcaccaacaccagcaaccagguggccgugcuguaccagggcgugaacugcaccgaggugcccguggccauccacgccgaccagcugacacccaccuggcgggucuacagcaccggcagcaacguguuccagacccgggccgguugccugaucggcgccgagcacgugaacaacagcuacgagugcgacauccccaucggcgccggcaucugugccagcuaccagacccagaccaauucaccccggagggcaaggagcguggccagccagagcaucaucgccuacaccaugagccugggcgccgagaacagcguggccuacagcaacaacagcaucgccauccccaccaacuucaccaucagcgugaccaccgagauucugcccgugagcaugaccaagaccagcguggacugcaccauguacaucugcggcgacagcaccgagugcagcaaccugcugcugcaguacggcagcuucugcacccagcugaaccgggcccugaccggcaucgccguggagcaggacaagaacacccaggagguguucgcccaggugaagcagaucuacaagaccccucccaucaaggacuucggcggcuucaacuucagccagauccugcccgaccccagcaagcccagcaagcggagcuucaucgaggaccugcuguucaacaaggugacccuagccgacgccggcuucaucaagcaguacggcgacugccucggcgacauagccgcccgggaccugaucugcgcccagaaguucaacggccugaccgugcugccuccccugcugaccgacgagaugaucgcccaguacaccagcgcccuguuagccggaaccaucaccagcggcuggacuuucggcgcuggagccgcucugcagauccccuucgccaugcagauggccuaccgguucaacggcaucggcgugacccagaacgugcuguacgagaaccagaagcugaucgccaaccaguucaacagcgccaucggcaagauccaggacagccugagcagcaccgcuagcgcccugggcaagcugcaggacguggugaaccagaacgcccaggcccugaacacccuggugaagcagcugagcagcaacuucggcgccaucagcagcgugcugaacgacauccugagccggcuggacccucccgaggccgaggugcagaucgaccggcugaucacuggccggcugcagagccugcagaccuacgugacccagcagcugauccgggccgccgagauucgggccagcgccaaccuggccgccaccaagaugagcgagugcgugcugggccagagcaagcggguggacuucugcggcaagggcuaccaccugaugagcuuuccccagagcgcaccccacggagugguguuccugcacgugaccuacgugcccgcccaggagaagaacuucaccaccgccccagccaucugccacgacggcaaggcccacuuuccccgggagggcguguucgugagcaacggcacccacugguucgugacccagcggaacuucuacgagccccagaucaucaccaccgacaacaccuucgugagcggcaacugcgacguggugaucggcaucgugaacaacaccguguacgauccccugcagcccgagcuggacagcuucaaggaggagcuggacaaguacuucaagaaucacaccagccccgacguggaccugggcgacaucagcggcaucaacgccagcguggugaacauccagaaggagaucgaucggcugaacgagguggccaagaaccugaacgagagccugaucgaccugcaggagcugggcaaguacgagcaguacaucaaguggcccugguacaucuggcugggcuucaucgccggccugaucgccaucgugauggugaccaucaugcugugcugcaugaccagcugcugcagcugccugaagggcuguugcagcugcggcagcugcugcaaguucgacgaggacgacagcgagcccgugcugaagggcgugaagcugcacuacaccugauaauaggcuggagccucgguggccuagcuucuugccccuugggccuccccccagccccuccuccccuuccugcacccguacccccguggucuuugaauaaagucugagugggcggcaaaaaaaaaaaaaaaaaaaaaaaaaaaaaaaaaaaaaaaaaaaaaaaaaaaaaaaaaaaaaaaaaaaaaaaaaaaaaaaaaaaaaaaaaaaaaaaaaaaa

SEQ ID NO: 26196 - RNA, 4095 nt, Artificial Sequence
  SARS-CoV-2/Wuhan/WIV05/2019__EPI_ISL_402128 spike protein mRNA gc (1-1273)(K986P_V987P_N439K_D614G)
gggaaauaagagagaaaagaagaguaagaagaaauauaagaccccggcgccgccaccauguucguguuccuggugcugcugccccuggugagcagccagugcgugaaccugaccacccggacccagcugccaccagccuacaccaacagcuucacccggggcgucuacuaccccgacaagguguuccggagcagcguccugcacagcacccaggaccuguuccugcccuucuucagcaacgugaccugguuccacgccauccacgugagcggcaccaacggcaccaagcgguucgacaaccccgugcugcccuucaacgacggcguguacuucgccagcaccgagaagagcaacaucauccggggcuggaucuucggcaccacccuggacagcaagacccagagccugcugaucgugaauaacgccaccaacguggugaucaaggugugcgaguuccaguucugcaacgaccccuuccugggcguguacuaccacaagaacaacaagagcuggauggagagcgaguuccggguguacagcagcgccaacaacugcaccuucgaguacgugagccagcccuuccugauggaccuggagggcaagcagggcaacuucaagaaccugcgggaguucguguucaagaacaucgacggcuacuucaagaucuacagcaagcacaccccaaucaaccuggugcgggaucugccccagggcuucucagcccuggagccccugguggaccugcccaucggcaucaacaucacccgguuccagacccugcuggcccugcaccggagcuaccugaccccaggcgacagcagcagcggguggacagcaggcgcggcugcuuacuacgugggcuaccugcagccccggaccuuccugcugaaguacaacgagaacggcaccaucaccgacgccguggacugcgcccuggacccucugagcgagaccaagugcacccugaagagcuucaccguggagaagggcaucuaccagaccagcaacuuccgggugcagcccaccgagagcaucgugcgguuccccaacaucaccaaccugugccccuucggcgagguguucaacgccacccgguucgccagcguguacgccuggaaccggaagcggaucagcaacugcguggccgacuacagcgugcuguacaacagcgccagcuucagcaccuucaagugcuacggcgugagccccaccaagcugaacgaccugugcuucaccaacguguacgccgacagcuucgugauccguggcgacgaggugcggcagaucgcacccggccagacaggcaagaucgccgacuacaacuacaagcugcccgacgacuucaccggcugcgugaucgccuggaacagcaagaaccucgacagcaaggugggcggcaacuacaacuaccuguaccggcuguuccggaagagcaaccugaagcccuucgagcgggacaucagcaccgagaucuaccaagccggcuccaccccuugcaacggcguggagggcuucaacugcuacuucccucugcagagcuacggcuuccagcccaccaacggcgugggcuaccagcccuaccgggugguggugcugagcuucgagcugcugcacgccccagccaccguguguggccccaagaagagcaccaaccuggugaagaacaagugcgugaacuucaacuucaacggccuuaccggcaccggcgugcugaccgagagcaacaagaaauuccugcccuuucagcaguucggccgggacaucgccgacaccaccgacgcugugcgggauccccagacccuggagauccuggacaucaccccuugcagcuucggcggcgugagcgugaucaccccaggcaccaacaccagcaaccagguggccgugcuguaccagggcgugaacugcaccgaggugcccguggccauccacgccgaccagcugacacccaccuggcgggucuacagcaccggcagcaacguguuccagacccgggccgguugccugaucggcgccgagcacgugaacaacagcuacgagugcgacauccccaucggcgccggcaucugugccagcuaccagacccagaccaauucaccccggagggcaaggagcguggccagccagagcaucaucgccuacaccaugagccugggcgccgagaacagcguggccuacagcaacaacagcaucgccauccccaccaacuucaccaucagcgugaccaccgagauucugcccgugagcaugaccaagaccagcguggacugcaccauguacaucugcggcgacagcaccgagugcagcaaccugcugcugcaguacggcagcuucugcacccagcugaaccgggcccugaccggcaucgccguggagcaggacaagaacacccaggagguguucgcccaggugaagcagaucuacaagaccccucccaucaaggacuucggcggcuucaacuucagccagauccugcccgaccccagcaagcccagcaagcggagcuucaucgaggaccugcuguucaacaaggugacccuagccgacgccggcuucaucaagcaguacggcgacugccucggcgacauagccgcccgggaccugaucugcgcccagaaguucaacggccugaccgugcugccuccccugcugaccgacgagaugaucgcccaguacaccagcgcccuguuagccggaaccaucaccagcggcuggacuuucggcgcuggagccgcucugcagauccccuucgccaugcagauggccuaccgguucaacggcaucggcgugacccagaacgugcuguacgagaaccagaagcugaucgccaaccaguucaacagcgccaucggcaagauccaggacagccugagcagcaccgcuagcgcccugggcaagcugcaggacguggugaaccagaacgcccaggcccugaacacccuggugaagcagcugagcagcaacuucggcgccaucagcagcgugcugaacgacauccugagccggcuggacccucccgaggccgaggugcagaucgaccggcugaucacuggccggcugcagagccugcagaccuacgugacccagcagcugauccgggccgccgagauucgggccagcgccaaccuggccgccaccaagaugagcgagugcgugcugggccagagcaagcggguggacuucugcggcaagggcuaccaccugaugagcuuuccccagagcgcaccccacggagugguguuccugcacgugaccuacgugcccgcccaggagaagaacuucaccaccgccccagccaucugccacgacggcaaggcccacuuuccccgggagggcguguucgugagcaacggcacccacugguucgugacccagcggaacuucuacgagccccagaucaucaccaccgacaacaccuucgugagcggcaacugcgacguggugaucggcaucgugaacaacaccguguacgauccccugcagcccgagcuggacagcuucaaggaggagcuggacaaguacuucaagaaucacaccagccccgacguggaccugggcgacaucagcggcaucaacgccagcguggugaacauccagaaggagaucgaucggcugaacgagguggccaagaaccugaacgagagccugaucgaccugcaggagcugggcaaguacgagcaguacaucaaguggcccugguacaucuggcugggcuucaucgccggccugaucgccaucgugauggugaccaucaugcugugcugcaugaccagcugcugcagcugccugaagggcuguugcagcugcggcagcugcugcaaguucgacgaggacgacagcgagcccgugcugaagggcgugaagcugcacuacaccugauaauaggcuggagccucgguggccuagcuucuugccccuugggccuccccccagccccuccuccccuuccugcacccguacccccguggucuuugaauaaagucugagugggcggcaaaaaaaaaaaaaaaaaaaaaaaaaaaaaaaaaaaaaaaaaaaaaaaaaaaaaaaaaaaaaaaaaaaaaaaaaaaaaaaaaaaaaaaaaaaaaaaaaaaa

SEQ ID NO: 26197 - RNA, 4095 nt, Artificial Sequence
  SARS-CoV-2/Wuhan/WIV05/2019__EPI_ISL_402128 spike protein mRNA gc (1-1273)(K986P_V987P_S477N_D614G)
gggaaauaagagagaaaagaagaguaagaagaaauauaagaccccggcgccgccaccauguucguguuccuggugcugcugccccuggugagcagccagugcgugaaccugaccacccggacccagcugccaccagccuacaccaacagcuucacccggggcgucuacuaccccgacaagguguuccggagcagcguccugcacagcacccaggaccuguuccugcccuucuucagcaacgugaccugguuccacgccauccacgugagcggcaccaacggcaccaagcgguucgacaaccccgugcugcccuucaacgacggcguguacuucgccagcaccgagaagagcaacaucauccggggcuggaucuucggcaccacccuggacagcaagacccagagccugcugaucgugaauaacgccaccaacguggugaucaaggugugcgaguuccaguucugcaacgaccccuuccugggcguguacuaccacaagaacaacaagagcuggauggagagcgaguuccggguguacagcagcgccaacaacugcaccuucgaguacgugagccagcccuuccugauggaccuggagggcaagcagggcaacuucaagaaccugcgggaguucguguucaagaacaucgacggcuacuucaagaucuacagcaagcacaccccaaucaaccuggugcgggaucugccccagggcuucucagcccuggagccccugguggaccugcccaucggcaucaacaucacccgguuccagacccugcuggcccugcaccggagcuaccugaccccaggcgacagcagcagcggguggacagcaggcgcggcugcuuacuacgugggcuaccugcagccccggaccuuccugcugaaguacaacgagaacggcaccaucaccgacgccguggacugcgcccuggacccucugagcgagaccaagugcacccugaagagcuucaccguggagaagggcaucuaccagaccagcaacuuccgggugcagcccaccgagagcaucgugcgguuccccaacaucaccaaccugugccccuucggcgagguguucaacgccacccgguucgccagcguguacgccuggaaccggaagcggaucagcaacugcguggccgacuacagcgugcuguacaacagcgccagcuucagcaccuucaagugcuacggcgugagccccaccaagcugaacgaccugugcuucaccaacguguacgccgacagcuucgugauccguggcgacgaggugcggcagaucgcacccggccagacaggcaagaucgccgacuacaacuacaagcugcccgacgacuucaccggcugcgugaucgccuggaacagcaacaaccucgacagcaaggugggcggcaacuacaacuaccuguaccggcuguuccggaagagcaaccugaagcccuucgagcgggacaucagcaccgagaucuaccaagccggcaacaccccuugcaacggcguggagggcuucaacugcuacuucccucugcagagcuacggcuuccagcccaccaacggcgugggcuaccagcccuaccgggugguggugcugagcuucgagcugcugcacgccccagccaccguguguggccccaagaagagcaccaaccuggugaagaacaagugcgugaacuucaacuucaacggccuuaccggcaccggcgugcugaccgagagcaacaagaaauuccugcccuuucagcaguucggccgggacaucgccgacaccaccgacgcugugcgggauccccagacccuggagauccuggacaucaccccuugcagcuucggcggcgugagcgugaucaccccaggcaccaacaccagcaaccagguggccgugcuguaccagggcgugaacugcaccgaggugcccguggccauccacgccgaccagcugacacccaccuggcgggucuacagcaccggcagcaacguguuccagacccgggccgguugccugaucggcgccgagcacgugaacaacagcuacgagugcgacauccccaucggcgccggcaucugugccagcuaccagacccagaccaauucaccccggagggcaaggagcguggccagccagagcaucaucgccuacaccaugagccugggcgccgagaacagcguggccuacagcaacaacagcaucgccauccccaccaacuucaccaucagcgugaccaccgagauucugcccgugagcaugaccaagaccagcguggacugcaccauguacaucugcggcgacagcaccgagugcagcaaccugcugcugcaguacggcagcuucugcacccagcugaaccgggcccugaccggcaucgccguggagcaggacaagaacacccaggagguguucgcccaggugaagcagaucuacaagaccccucccaucaaggacuucggcggcuucaacuucagccagauccugcccgaccccagcaagcccagcaagcggagcuucaucgaggaccugcuguucaacaaggugacccuagccgacgccggcuucaucaagcaguacggcgacugccucggcgacauagccgcccgggaccugaucugcgcccagaaguucaacggccugaccgugcugccuccccugcugaccgacgagaugaucgcccaguacaccagcgcccuguuagccggaaccaucaccagcggcuggacuuucggcgcuggagccgcucugcagauccccuucgccaugcagauggccuaccgguucaacggcaucggcgugacccagaacgugcuguacgagaaccagaagcugaucgccaaccaguucaacagcgccaucggcaagauccaggacagccugagcagcaccgcuagcgcccugggcaagcugcaggacguggugaaccagaacgcccaggcccugaacacccuggugaagcagcugagcagcaacuucggcgccaucagcagcgugcugaacgacauccugagccggcuggacccucccgaggccgaggugcagaucgaccggcugaucacuggccggcugcagagccugcagaccuacgugacccagcagcugauccgggccgccgagauucgggccagcgccaaccuggccgccaccaagaugagcgagugcgugcugggccagagcaagcggguggacuucugcggcaagggcuaccaccugaugagcuuuccccagagcgcaccccacggagugguguuccugcacgugaccuacgugcccgcccaggagaagaacuucaccaccgccccagccaucugccacgacggcaaggcccacuuuccccgggagggcguguucgugagcaacggcacccacugguucgugacccagcggaacuucuacgagccccagaucaucaccaccgacaacaccuucgugagcggcaacugcgacguggugaucggcaucgugaacaacaccguguacgauccccugcagcccgagcuggacagcuucaaggaggagcuggacaaguacuucaagaaucacaccagccccgacguggaccugggcgacaucagcggcaucaacgccagcguggugaacauccagaaggagaucgaucggcugaacgagguggccaagaaccugaacgagagccugaucgaccugcaggagcugggcaaguacgagcaguacaucaaguggcccugguacaucuggcugggcuucaucgccggccugaucgccaucgugauggugaccaucaugcugugcugcaugaccagcugcugcagcugccugaagggcuguugcagcugcggcagcugcugcaaguucgacgaggacgacagcgagcccgugcugaagggcgugaagcugcacuacaccugauaauaggcuggagccucgguggccuagcuucuugccccuugggccuccccccagccccuccuccccuuccugcacccguacccccguggucuuugaauaaagucugagugggcggcaaaaaaaaaaaaaaaaaaaaaaaaaaaaaaaaaaaaaaaaaaaaaaaaaaaaaaaaaaaaaaaaaaaaaaaaaaaaaaaaaaaaaaaaaaaaaaaaaaaa

SEQ ID NO: 26198 - RNA, 4095 nt, Artificial Sequence
  SARS-CoV-2/Wuhan/WIV05/2019__EPI_ISL_402128 spike protein mRNA gc (1-1273)(K986P_V987P_N501Y_D614G)
gggaaauaagagagaaaagaagaguaagaagaaauauaagaccccggcgccgccaccauguucguguuccuggugcugcugccccuggugagcagccagugcgugaaccugaccacccggacccagcugccaccagccuacaccaacagcuucacccggggcgucuacuaccccgacaagguguuccggagcagcguccugcacagcacccaggaccuguuccugcccuucuucagcaacgugaccugguuccacgccauccacgugagcggcaccaacggcaccaagcgguucgacaaccccgugcugcccuucaacgacggcguguacuucgccagcaccgagaagagcaacaucauccggggcuggaucuucggcaccacccuggacagcaagacccagagccugcugaucgugaauaacgccaccaacguggugaucaaggugugcgaguuccaguucugcaacgaccccuuccugggcguguacuaccacaagaacaacaagagcuggauggagagcgaguuccggguguacagcagcgccaacaacugcaccuucgaguacgugagccagcccuuccugauggaccuggagggcaagcagggcaacuucaagaaccugcgggaguucguguucaagaacaucgacggcuacuucaagaucuacagcaagcacaccccaaucaaccuggugcgggaucugccccagggcuucucagcccuggagccccugguggaccugcccaucggcaucaacaucacccgguuccagacccugcuggcccugcaccggagcuaccugaccccaggcgacagcagcagcggguggacagcaggcgcggcugcuuacuacgugggcuaccugcagccccggaccuuccugcugaaguacaacgagaacggcaccaucaccgacgccguggacugcgcccuggacccucugagcgagaccaagugcacccugaagagcuucaccguggagaagggcaucuaccagaccagcaacuuccgggugcagcccaccgagagcaucgugcgguuccccaacaucaccaaccugugccccuucggcgagguguucaacgccacccgguucgccagcguguacgccuggaaccggaagcggaucagcaacugcguggccgacuacagcgugcuguacaacagcgccagcuucagcaccuucaagugcuacggcgugagccccaccaagcugaacgaccugugcuucaccaacguguacgccgacagcuucgugauccguggcgacgaggugcggcagaucgcacccggccagacaggcaagaucgccgacuacaacuacaagcugcccgacgacuucaccggcugcgugaucgccuggaacagcaacaaccucgacagcaaggugggcggcaacuacaacuaccuguaccggcuguuccggaagagcaaccugaagcccuucgagcgggacaucagcaccgagaucuaccaagccggcuccaccccuugcaacggcguggagggcuucaacugcuacuucccucugcagagcuacggcuuccagcccaccuacggcgugggcuaccagcccuaccgggugguggugcugagcuucgagcugcugcacgccccagccaccguguguggccccaagaagagcaccaaccuggugaagaacaagugcgugaacuucaacuucaacggccuuaccggcaccggcgugcugaccgagagcaacaagaaauuccugcccuuucagcaguucggccgggacaucgccgacaccaccgacgcugugcgggauccccagacccuggagauccuggacaucaccccuugcagcuucggcggcgugagcgugaucaccccaggcaccaacaccagcaaccagguggccgugcuguaccagggcgugaacugcaccgaggugcccguggccauccacgccgaccagcugacacccaccuggcgggucuacagcaccggcagcaacguguuccagacccgggccgguugccugaucggcgccgagcacgugaacaacagcuacgagugcgacauccccaucggcgccggcaucugugccagcuaccagacccagaccaauucaccccggagggcaaggagcguggccagccagagcaucaucgccuacaccaugagccugggcgccgagaacagcguggccuacagcaacaacagcaucgccauccccaccaacuucaccaucagcgugaccaccgagauucugcccgugagcaugaccaagaccagcguggacugcaccauguacaucugcggcgacagcaccgagugcagcaaccugcugcugcaguacggcagcuucugcacccagcugaaccgggcccugaccggcaucgccguggagcaggacaagaacacccaggagguguucgcccaggugaagcagaucuacaagaccccucccaucaaggacuucggcggcuucaacuucagccagauccugcccgaccccagcaagcccagcaagcggagcuucaucgaggaccugcuguucaacaaggugacccuagccgacgccggcuucaucaagcaguacggcgacugccucggcgacauagccgcccgggaccugaucugcgcccagaaguucaacggccugaccgugcugccuccccugcugaccgacgagaugaucgcccaguacaccagcgcccuguuagccggaaccaucaccagcggcuggacuuucggcgcuggagccgcucugcagauccccuucgccaugcagauggccuaccgguucaacggcaucggcgugacccagaacgugcuguacgagaaccagaagcugaucgccaaccaguucaacagcgccaucggcaagauccaggacagccugagcagcaccgcuagcgcccugggcaagcugcaggacguggugaaccagaacgcccaggcccugaacacccuggugaagcagcugagcagcaacuucggcgccaucagcagcgugcugaacgacauccugagccggcuggacccucccgaggccgaggugcagaucgaccggcugaucacuggccggcugcagagccugcagaccuacgugacccagcagcugauccgggccgccgagauucgggccagcgccaaccuggccgccaccaagaugagcgagugcgugcugggccagagcaagcggguggacuucugcggcaagggcuaccaccugaugagcuuuccccagagcgcaccccacggagugguguuccugcacgugaccuacgugcccgcccaggagaagaacuucaccaccgccccagccaucugccacgacggcaaggcccacuuuccccgggagggcguguucgugagcaacggcacccacugguucgugacccagcggaacuucuacgagccccagaucaucaccaccgacaacaccuucgugagcggcaacugcgacguggugaucggcaucgugaacaacaccguguacgauccccugcagcccgagcuggacagcuucaaggaggagcuggacaaguacuucaagaaucacaccagccccgacguggaccugggcgacaucagcggcaucaacgccagcguggugaacauccagaaggagaucgaucggcugaacgagguggccaagaaccugaacgagagccugaucgaccugcaggagcugggcaaguacgagcaguacaucaaguggcccugguacaucuggcugggcuucaucgccggccugaucgccaucgugauggugaccaucaugcugugcugcaugaccagcugcugcagcugccugaagggcuguugcagcugcggcagcugcugcaaguucgacgaggacgacagcgagcccgugcugaagggcgugaagcugcacuacaccugauaauaggcuggagccucgguggccuagcuucuugccccuugggccuccccccagccccuccuccccuuccugcacccguacccccguggucuuugaauaaagucugagugggcggcaaaaaaaaaaaaaaaaaaaaaaaaaaaaaaaaaaaaaaaaaaaaaaaaaaaaaaaaaaaaaaaaaaaaaaaaaaaaaaaaaaaaaaaaaaaaaaaaaaaa

SEQ ID NO: 26199 - RNA, 4089 nt, Artificial Sequence
  SARS-CoV-2/Wuhan/WIV05/2019__EPI_ISL_402128 spike protein mRNA gc (1-1273)(K986P_V987P_H69del_V70del_D614G)
gggaaauaagagagaaaagaagaguaagaagaaauauaagaccccggcgccgccaccauguucguguuccuggugcugcugccccuggugagcagccagugcgugaaccugaccacccggacccagcugccaccagccuacaccaacagcuucacccggggcgucuacuaccccgacaagguguuccggagcagcguccugcacagcacccaggaccuguuccugcccuucuucagcaacgugaccugguuccacgccaucagcggcaccaacggcaccaagcgguucgacaaccccgugcugcccuucaacgacggcguguacuucgccagcaccgagaagagcaacaucauccggggcuggaucuucggcaccacccuggacagcaagacccagagccugcugaucgugaauaacgccaccaacguggugaucaaggugugcgaguuccaguucugcaacgaccccuuccugggcguguacuaccacaagaacaacaagagcuggauggagagcgaguuccggguguacagcagcgccaacaacugcaccuucgaguacgugagccagcccuuccugauggaccuggagggcaagcagggcaacuucaagaaccugcgggaguucguguucaagaacaucgacggcuacuucaagaucuacagcaagcacaccccaaucaaccuggugcgggaucugccccagggcuucucagcccuggagccccugguggaccugcccaucggcaucaacaucacccgguuccagacccugcuggcccugcaccggagcuaccugaccccaggcgacagcagcagcggguggacagcaggcgcggcugcuuacuacgugggcuaccugcagccccggaccuuccugcugaaguacaacgagaacggcaccaucaccgacgccguggacugcgcccuggacccucugagcgagaccaagugcacccugaagagcuucaccguggagaagggcaucuaccagaccagcaacuuccgggugcagcccaccgagagcaucgugcgguuccccaacaucaccaaccugugccccuucggcgagguguucaacgccacccgguucgccagcguguacgccuggaaccggaagcggaucagcaacugcguggccgacuacagcgugcuguacaacagcgccagcuucagcaccuucaagugcuacggcgugagccccaccaagcugaacgaccugugcuucaccaacguguacgccgacagcuucgugauccguggcgacgaggugcggcagaucgcacccggccagacaggcaagaucgccgacuacaacuacaagcugcccgacgacuucaccggcugcgugaucgccuggaacagcaacaaccucgacagcaaggugggcggcaacuacaacuaccuguaccggcuguuccggaagagcaaccugaagcccuucgagcgggacaucagcaccgagaucuaccaagccggcuccaccccuugcaacggcguggagggcuucaacugcuacuucccucugcagagcuacggcuuccagcccaccaacggcgugggcuaccagcccuaccgggugguggugcugagcuucgagcugcugcacgccccagccaccguguguggccccaagaagagcaccaaccuggugaagaacaagugcgugaacuucaacuucaacggccuuaccggcaccggcgugcugaccgagagcaacaagaaauuccugcccuuucagcaguucggccgggacaucgccgacaccaccgacgcugugcgggauccccagacccuggagauccuggacaucaccccuugcagcuucggcggcgugagcgugaucaccccaggcaccaacaccagcaaccagguggccgugcuguaccagggcgugaacugcaccgaggugcccguggccauccacgccgaccagcugacacccaccuggcgggucuacagcaccggcagcaacguguuccagacccgggccgguugccugaucggcgccgagcacgugaacaacagcuacgagugcgacauccccaucggcgccggcaucugugccagcuaccagacccagaccaauucaccccggagggcaaggagcguggccagccagagcaucaucgccuacaccaugagccugggcgccgagaacagcguggccuacagcaacaacagcaucgccauccccaccaacuucaccaucagcgugaccaccgagauucugcccgugagcaugaccaagaccagcguggacugcaccauguacaucugcggcgacagcaccgagugcagcaaccugcugcugcaguacggcagcuucugcacccagcugaaccgggcccugaccggcaucgccguggagcaggacaagaacacccaggagguguucgcccaggugaagcagaucuacaagaccccucccaucaaggacuucggcggcuucaacuucagccagauccugcccgaccccagcaagcccagcaagcggagcuucaucgaggaccugcuguucaacaaggugacccuagccgacgccggcuucaucaagcaguacggcgacugccucggcgacauagccgcccgggaccugaucugcgcccagaaguucaacggccugaccgugcugccuccccugcugaccgacgagaugaucgcccaguacaccagcgcccuguuagccggaaccaucaccagcggcuggacuuucggcgcuggagccgcucugcagauccccuucgccaugcagauggccuaccgguucaacggcaucggcgugacccagaacgugcuguacgagaaccagaagcugaucgccaaccaguucaacagcgccaucggcaagauccaggacagccugagcagcaccgcuagcgcccugggcaagcugcaggacguggugaaccagaacgcccaggcccugaacacccuggugaagcagcugagcagcaacuucggcgccaucagcagcgugcugaacgacauccugagccggcuggacccucccgaggccgaggugcagaucgaccggcugaucacuggccggcugcagagccugcagaccuacgugacccagcagcugauccgggccgccgagauucgggccagcgccaaccuggccgccaccaagaugagcgagugcgugcugggccagagcaagcggguggacuucugcggcaagggcuaccaccugaugagcuuuccccagagcgcaccccacggagugguguuccugcacgugaccuacgugcccgcccaggagaagaacuucaccaccgccccagccaucugccacgacggcaaggcccacuuuccccgggagggcguguucgugagcaacggcacccacugguucgugacccagcggaacuucuacgagccccagaucaucaccaccgacaacaccuucgugagcggcaacugcgacguggugaucggcaucgugaacaacaccguguacgauccccugcagcccgagcuggacagcuucaaggaggagcuggacaaguacuucaagaaucacaccagccccgacguggaccugggcgacaucagcggcaucaacgccagcguggugaacauccagaaggagaucgaucggcugaacgagguggccaagaaccugaacgagagccugaucgaccugcaggagcugggcaaguacgagcaguacaucaaguggcccugguacaucuggcugggcuucaucgccggccugaucgccaucgugauggugaccaucaugcugugcugcaugaccagcugcugcagcugccugaagggcuguugcagcugcggcagcugcugcaaguucgacgaggacgacagcgagcccgugcugaagggcgugaagcugcacuacaccugauaauaggcuggagccucgguggccuagcuucuugccccuugggccuccccccagccccuccuccccuuccugcacccguacccccguggucuuugaauaaagucugagugggcggcaaaaaaaaaaaaaaaaaaaaaaaaaaaaaaaaaaaaaaaaaaaaaaaaaaaaaaaaaaaaaaaaaaaaaaaaaaaaaaaaaaaaaaaaaaaaaaaaaaaa

SEQ ID NO: 26200 - RNA, 4095 nt, Artificial Sequence
  SARS-CoV-2/Wuhan/WIV05/2019__EPI_ISL_402128 spike protein mRNA gc (1-1273)(K986P_V987P_Y453F_D614G)
gggaaauaagagagaaaagaagaguaagaagaaauauaagaccccggcgccgccaccauguucguguuccuggugcugcugccccuggugagcagccagugcgugaaccugaccacccggacccagcugccaccagccuacaccaacagcuucacccggggcgucuacuaccccgacaagguguuccggagcagcguccugcacagcacccaggaccuguuccugcccuucuucagcaacgugaccugguuccacgccauccacgugagcggcaccaacggcaccaagcgguucgacaaccccgugcugcccuucaacgacggcguguacuucgccagcaccgagaagagcaacaucauccggggcuggaucuucggcaccacccuggacagcaagacccagagccugcugaucgugaauaacgccaccaacguggugaucaaggugugcgaguuccaguucugcaacgaccccuuccugggcguguacuaccacaagaacaacaagagcuggauggagagcgaguuccggguguacagcagcgccaacaacugcaccuucgaguacgugagccagcccuuccugauggaccuggagggcaagcagggcaacuucaagaaccugcgggaguucguguucaagaacaucgacggcuacuucaagaucuacagcaagcacaccccaaucaaccuggugcgggaucugccccagggcuucucagcccuggagccccugguggaccugcccaucggcaucaacaucacccgguuccagacccugcuggcccugcaccggagcuaccugaccccaggcgacagcagcagcggguggacagcaggcgcggcugcuuacuacgugggcuaccugcagccccggaccuuccugcugaaguacaacgagaacggcaccaucaccgacgccguggacugcgcccuggacccucugagcgagaccaagugcacccugaagagcuucaccguggagaagggcaucuaccagaccagcaacuuccgggugcagcccaccgagagcaucgugcgguuccccaacaucaccaaccugugccccuucggcgagguguucaacgccacccgguucgccagcguguacgccuggaaccggaagcggaucagcaacugcguggccgacuacagcgugcuguacaacagcgccagcuucagcaccuucaagugcuacggcgugagccccaccaagcugaacgaccugugcuucaccaacguguacgccgacagcuucgugauccguggcgacgaggugcggcagaucgcacccggccagacaggcaagaucgccgacuacaacuacaagcugcccgacgacuucaccggcugcgugaucgccuggaacagcaacaaccucgacagcaaggugggcggcaacuacaacuaccuguuccggcuguuccggaagagcaaccugaagcccuucgagcgggacaucagcaccgagaucuaccaagccggcuccaccccuugcaacggcguggagggcuucaacugcuacuucccucugcagagcuacggcuuccagcccaccaacggcgugggcuaccagcccuaccgggugguggugcugagcuucgagcugcugcacgccccagccaccguguguggccccaagaagagcaccaaccuggugaagaacaagugcgugaacuucaacuucaacggccuuaccggcaccggcgugcugaccgagagcaacaagaaauuccugcccuuucagcaguucggccgggacaucgccgacaccaccgacgcugugcgggauccccagacccuggagauccuggacaucaccccuugcagcuucggcggcgugagcgugaucaccccaggcaccaacaccagcaaccagguggccgugcuguaccagggcgugaacugcaccgaggugcccguggccauccacgccgaccagcugacacccaccuggcgggucuacagcaccggcagcaacguguuccagacccgggccgguugccugaucggcgccgagcacgugaacaacagcuacgagugcgacauccccaucggcgccggcaucugugccagcuaccagacccagaccaauucaccccggagggcaaggagcguggccagccagagcaucaucgccuacaccaugagccugggcgccgagaacagcguggccuacagcaacaacagcaucgccauccccaccaacuucaccaucagcgugaccaccgagauucugcccgugagcaugaccaagaccagcguggacugcaccauguacaucugcggcgacagcaccgagugcagcaaccugcugcugcaguacggcagcuucugcacccagcugaaccgggcccugaccggcaucgccguggagcaggacaagaacacccaggagguguucgcccaggugaagcagaucuacaagaccccucccaucaaggacuucggcggcuucaacuucagccagauccugcccgaccccagcaagcccagcaagcggagcuucaucgaggaccugcuguucaacaaggugacccuagccgacgccggcuucaucaagcaguacggcgacugccucggcgacauagccgcccgggaccugaucugcgcccagaaguucaacggccugaccgugcugccuccccugcugaccgacgagaugaucgcccaguacaccagcgcccuguuagccggaaccaucaccagcggcuggacuuucggcgcuggagccgcucugcagauccccuucgccaugcagauggccuaccgguucaacggcaucggcgugacccagaacgugcuguacgagaaccagaagcugaucgccaaccaguucaacagcgccaucggcaagauccaggacagccugagcagcaccgcuagcgcccugggcaagcugcaggacguggugaaccagaacgcccaggcccugaacacccuggugaagcagcugagcagcaacuucggcgccaucagcagcgugcugaacgacauccugagccggcuggacccucccgaggccgaggugcagaucgaccggcugaucacuggccggcugcagagccugcagaccuacgugacccagcagcugauccgggccgccgagauucgggccagcgccaaccuggccgccaccaagaugagcgagugcgugcugggccagagcaagcggguggacuucugcggcaagggcuaccaccugaugagcuuuccccagagcgcaccccacggagugguguuccugcacgugaccuacgugcccgcccaggagaagaacuucaccaccgccccagccaucugccacgacggcaaggcccacuuuccccgggagggcguguucgugagcaacggcacccacugguucgugacccagcggaacuucuacgagccccagaucaucaccaccgacaacaccuucgugagcggcaacugcgacguggugaucggcaucgugaacaacaccguguacgauccccugcagcccgagcuggacagcuucaaggaggagcuggacaaguacuucaagaaucacaccagccccgacguggaccugggcgacaucagcggcaucaacgccagcguggugaacauccagaaggagaucgaucggcugaacgagguggccaagaaccugaacgagagccugaucgaccugcaggagcugggcaaguacgagcaguacaucaaguggcccugguacaucuggcugggcuucaucgccggccugaucgccaucgugauggugaccaucaugcugugcugcaugaccagcugcugcagcugccugaagggcuguugcagcugcggcagcugcugcaaguucgacgaggacgacagcgagcccgugcugaagggcgugaagcugcacuacaccugauaauaggcuggagccucgguggccuagcuucuugccccuugggccuccccccagccccuccuccccuuccugcacccguacccccguggucuuugaauaaagucugagugggcggcaaaaaaaaaaaaaaaaaaaaaaaaaaaaaaaaaaaaaaaaaaaaaaaaaaaaaaaaaaaaaaaaaaaaaaaaaaaaaaaaaaaaaaaaaaaaaaaaaaaa

SEQ ID NO: 26201 - RNA, 4095 nt, Artificial Sequence
  SARS-CoV-2/Wuhan/WIV05/2019__EPI_ISL_402128 spike protein mRNA gc (1-1273)(K986P_V987P_D614G_I692V)
gggaaauaagagagaaaagaagaguaagaagaaauauaagaccccggcgccgccaccauguucguguuccuggugcugcugccccuggugagcagccagugcgugaaccugaccacccggacccagcugccaccagccuacaccaacagcuucacccggggcgucuacuaccccgacaagguguuccggagcagcguccugcacagcacccaggaccuguuccugcccuucuucagcaacgugaccugguuccacgccauccacgugagcggcaccaacggcaccaagcgguucgacaaccccgugcugcccuucaacgacggcguguacuucgccagcaccgagaagagcaacaucauccggggcuggaucuucggcaccacccuggacagcaagacccagagccugcugaucgugaauaacgccaccaacguggugaucaaggugugcgaguuccaguucugcaacgaccccuuccugggcguguacuaccacaagaacaacaagagcuggauggagagcgaguuccggguguacagcagcgccaacaacugcaccuucgaguacgugagccagcccuuccugauggaccuggagggcaagcagggcaacuucaagaaccugcgggaguucguguucaagaacaucgacggcuacuucaagaucuacagcaagcacaccccaaucaaccuggugcgggaucugccccagggcuucucagcccuggagccccugguggaccugcccaucggcaucaacaucacccgguuccagacccugcuggcccugcaccggagcuaccugaccccaggcgacagcagcagcggguggacagcaggcgcggcugcuuacuacgugggcuaccugcagccccggaccuuccugcugaaguacaacgagaacggcaccaucaccgacgccguggacugcgcccuggacccucugagcgagaccaagugcacccugaagagcuucaccguggagaagggcaucuaccagaccagcaacuuccgggugcagcccaccgagagcaucgugcgguuccccaacaucaccaaccugugccccuucggcgagguguucaacgccacccgguucgccagcguguacgccuggaaccggaagcggaucagcaacugcguggccgacuacagcgugcuguacaacagcgccagcuucagcaccuucaagugcuacggcgugagccccaccaagcugaacgaccugugcuucaccaacguguacgccgacagcuucgugauccguggcgacgaggugcggcagaucgcacccggccagacaggcaagaucgccgacuacaacuacaagcugcccgacgacuucaccggcugcgugaucgccuggaacagcaacaaccucgacagcaaggugggcggcaacuacaacuaccuguaccggcuguuccggaagagcaaccugaagcccuucgagcgggacaucagcaccgagaucuaccaagccggcuccaccccuugcaacggcguggagggcuucaacugcuacuucccucugcagagcuacggcuuccagcccaccaacggcgugggcuaccagcccuaccgggugguggugcugagcuucgagcugcugcacgccccagccaccguguguggccccaagaagagcaccaaccuggugaagaacaagugcgugaacuucaacuucaacggccuuaccggcaccggcgugcugaccgagagcaacaagaaauuccugcccuuucagcaguucggccgggacaucgccgacaccaccgacgcugugcgggauccccagacccuggagauccuggacaucaccccuugcagcuucggcggcgugagcgugaucaccccaggcaccaacaccagcaaccagguggccgugcuguaccagggcgugaacugcaccgaggugcccguggccauccacgccgaccagcugacacccaccuggcgggucuacagcaccggcagcaacguguuccagacccgggccgguugccugaucggcgccgagcacgugaacaacagcuacgagugcgacauccccaucggcgccggcaucugugccagcuaccagacccagaccaauucaccccggagggcaaggagcguggccagccagagcgugaucgccuacaccaugagccugggcgccgagaacagcguggccuacagcaacaacagcaucgccauccccaccaacuucaccaucagcgugaccaccgagauucugcccgugagcaugaccaagaccagcguggacugcaccauguacaucugcggcgacagcaccgagugcagcaaccugcugcugcaguacggcagcuucugcacccagcugaaccgggcccugaccggcaucgccguggagcaggacaagaacacccaggagguguucgcccaggugaagcagaucuacaagaccccucccaucaaggacuucggcggcuucaacuucagccagauccugcccgaccccagcaagcccagcaagcggagcuucaucgaggaccugcuguucaacaaggugacccuagccgacgccggcuucaucaagcaguacggcgacugccucggcgacauagccgcccgggaccugaucugcgcccagaaguucaacggccugaccgugcugccuccccugcugaccgacgagaugaucgcccaguacaccagcgcccuguuagccggaaccaucaccagcggcuggacuuucggcgcuggagccgcucugcagauccccuucgccaugcagauggccuaccgguucaacggcaucggcgugacccagaacgugcuguacgagaaccagaagcugaucgccaaccaguucaacagcgccaucggcaagauccaggacagccugagcagcaccgcuagcgcccugggcaagcugcaggacguggugaaccagaacgcccaggcccugaacacccuggugaagcagcugagcagcaacuucggcgccaucagcagcgugcugaacgacauccugagccggcuggacccucccgaggccgaggugcagaucgaccggcugaucacuggccggcugcagagccugcagaccuacgugacccagcagcugauccgggccgccgagauucgggccagcgccaaccuggccgccaccaagaugagcgagugcgugcugggccagagcaagcggguggacuucugcggcaagggcuaccaccugaugagcuuuccccagagcgcaccccacggagugguguuccugcacgugaccuacgugcccgcccaggagaagaacuucaccaccgccccagccaucugccacgacggcaaggcccacuuuccccgggagggcguguucgugagcaacggcacccacugguucgugacccagcggaacuucuacgagccccagaucaucaccaccgacaacaccuucgugagcggcaacugcgacguggugaucggcaucgugaacaacaccguguacgauccccugcagcccgagcuggacagcuucaaggaggagcuggacaaguacuucaagaaucacaccagccccgacguggaccugggcgacaucagcggcaucaacgccagcguggugaacauccagaaggagaucgaucggcugaacgagguggccaagaaccugaacgagagccugaucgaccugcaggagcugggcaaguacgagcaguacaucaaguggcccugguacaucuggcugggcuucaucgccggccugaucgccaucgugauggugaccaucaugcugugcugcaugaccagcugcugcagcugccugaagggcuguugcagcugcggcagcugcugcaaguucgacgaggacgacagcgagcccgugcugaagggcgugaagcugcacuacaccugauaauaggcuggagccucgguggccuagcuucuugccccuugggccuccccccagccccuccuccccuuccugcacccguacccccguggucuuugaauaaagucugagugggcggcaaaaaaaaaaaaaaaaaaaaaaaaaaaaaaaaaaaaaaaaaaaaaaaaaaaaaaaaaaaaaaaaaaaaaaaaaaaaaaaaaaaaaaaaaaaaaaaaaaaa

SEQ ID NO: 26202 - RNA, 4095 nt, Artificial Sequence
  SARS-CoV-2/Wuhan/WIV05/2019__EPI_ISL_402128 spike protein mRNA gc (1-1273)(K986P_V987P_D614G_M1229I)
gggaaauaagagagaaaagaagaguaagaagaaauauaagaccccggcgccgccaccauguucguguuccuggugcugcugccccuggugagcagccagugcgugaaccugaccacccggacccagcugccaccagccuacaccaacagcuucacccggggcgucuacuaccccgacaagguguuccggagcagcguccugcacagcacccaggaccuguuccugcccuucuucagcaacgugaccugguuccacgccauccacgugagcggcaccaacggcaccaagcgguucgacaaccccgugcugcccuucaacgacggcguguacuucgccagcaccgagaagagcaacaucauccggggcuggaucuucggcaccacccuggacagcaagacccagagccugcugaucgugaauaacgccaccaacguggugaucaaggugugcgaguuccaguucugcaacgaccccuuccugggcguguacuaccacaagaacaacaagagcuggauggagagcgaguuccggguguacagcagcgccaacaacugcaccuucgaguacgugagccagcccuuccugauggaccuggagggcaagcagggcaacuucaagaaccugcgggaguucguguucaagaacaucgacggcuacuucaagaucuacagcaagcacaccccaaucaaccuggugcgggaucugccccagggcuucucagcccuggagccccugguggaccugcccaucggcaucaacaucacccgguuccagacccugcuggcccugcaccggagcuaccugaccccaggcgacagcagcagcggguggacagcaggcgcggcugcuuacuacgugggcuaccugcagccccggaccuuccugcugaaguacaacgagaacggcaccaucaccgacgccguggacugcgcccuggacccucugagcgagaccaagugcacccugaagagcuucaccguggagaagggcaucuaccagaccagcaacuuccgggugcagcccaccgagagcaucgugcgguuccccaacaucaccaaccugugccccuucggcgagguguucaacgccacccgguucgccagcguguacgccuggaaccggaagcggaucagcaacugcguggccgacuacagcgugcuguacaacagcgccagcuucagcaccuucaagugcuacggcgugagccccaccaagcugaacgaccugugcuucaccaacguguacgccgacagcuucgugauccguggcgacgaggugcggcagaucgcacccggccagacaggcaagaucgccgacuacaacuacaagcugcccgacgacuucaccggcugcgugaucgccuggaacagcaacaaccucgacagcaaggugggcggcaacuacaacuaccuguaccggcuguuccggaagagcaaccugaagcccuucgagcgggacaucagcaccgagaucuaccaagccggcuccaccccuugcaacggcguggagggcuucaacugcuacuucccucugcagagcuacggcuuccagcccaccaacggcgugggcuaccagcccuaccgggugguggugcugagcuucgagcugcugcacgccccagccaccguguguggccccaagaagagcaccaaccuggugaagaacaagugcgugaacuucaacuucaacggccuuaccggcaccggcgugcugaccgagagcaacaagaaauuccugcccuuucagcaguucggccgggacaucgccgacaccaccgacgcugugcgggauccccagacccuggagauccuggacaucaccccuugcagcuucggcggcgugagcgugaucaccccaggcaccaacaccagcaaccagguggccgugcuguaccagggcgugaacugcaccgaggugcccguggccauccacgccgaccagcugacacccaccuggcgggucuacagcaccggcagcaacguguuccagacccgggccgguugccugaucggcgccgagcacgugaacaacagcuacgagugcgacauccccaucggcgccggcaucugugccagcuaccagacccagaccaauucaccccggagggcaaggagcguggccagccagagcaucaucgccuacaccaugagccugggcgccgagaacagcguggccuacagcaacaacagcaucgccauccccaccaacuucaccaucagcgugaccaccgagauucugcccgugagcaugaccaagaccagcguggacugcaccauguacaucugcggcgacagcaccgagugcagcaaccugcugcugcaguacggcagcuucugcacccagcugaaccgggcccugaccggcaucgccguggagcaggacaagaacacccaggagguguucgcccaggugaagcagaucuacaagaccccucccaucaaggacuucggcggcuucaacuucagccagauccugcccgaccccagcaagcccagcaagcggagcuucaucgaggaccugcuguucaacaaggugacccuagccgacgccggcuucaucaagcaguacggcgacugccucggcgacauagccgcccgggaccugaucugcgcccagaaguucaacggccugaccgugcugccuccccugcugaccgacgagaugaucgcccaguacaccagcgcccuguuagccggaaccaucaccagcggcuggacuuucggcgcuggagccgcucugcagauccccuucgccaugcagauggccuaccgguucaacggcaucggcgugacccagaacgugcuguacgagaaccagaagcugaucgccaaccaguucaacagcgccaucggcaagauccaggacagccugagcagcaccgcuagcgcccugggcaagcugcaggacguggugaaccagaacgcccaggcccugaacacccuggugaagcagcugagcagcaacuucggcgccaucagcagcgugcugaacgacauccugagccggcuggacccucccgaggccgaggugcagaucgaccggcugaucacuggccggcugcagagccugcagaccuacgugacccagcagcugauccgggccgccgagauucgggccagcgccaaccuggccgccaccaagaugagcgagugcgugcugggccagagcaagcggguggacuucugcggcaagggcuaccaccugaugagcuuuccccagagcgcaccccacggagugguguuccugcacgugaccuacgugcccgcccaggagaagaacuucaccaccgccccagccaucugccacgacggcaaggcccacuuuccccgggagggcguguucgugagcaacggcacccacugguucgugacccagcggaacuucuacgagccccagaucaucaccaccgacaacaccuucgugagcggcaacugcgacguggugaucggcaucgugaacaacaccguguacgauccccugcagcccgagcuggacagcuucaaggaggagcuggacaaguacuucaagaaucacaccagccccgacguggaccugggcgacaucagcggcaucaacgccagcguggugaacauccagaaggagaucgaucggcugaacgagguggccaagaaccugaacgagagccugaucgaccugcaggagcugggcaaguacgagcaguacaucaaguggcccugguacaucuggcugggcuucaucgccggccugaucgccaucgugaucgugaccaucaugcugugcugcaugaccagcugcugcagcugccugaagggcuguugcagcugcggcagcugcugcaaguucgacgaggacgacagcgagcccgugcugaagggcgugaagcugcacuacaccugauaauaggcuggagccucgguggccuagcuucuugccccuugggccuccccccagccccuccuccccuuccugcacccguacccccguggucuuugaauaaagucugagugggcggcaaaaaaaaaaaaaaaaaaaaaaaaaaaaaaaaaaaaaaaaaaaaaaaaaaaaaaaaaaaaaaaaaaaaaaaaaaaaaaaaaaaaaaaaaaaaaaaaaaaa

SEQ ID NO: 26203 - RNA, 4089 nt, Artificial Sequence
  SARS-CoV-2/Wuhan/WIV05/2019__EPI_ISL_402128 spike protein mRNA gc (1-1273)(K986P_V987P_H69del_V70del_A222V_Y453F_S477N_D614G_I692V)
gggaaauaagagagaaaagaagaguaagaagaaauauaagaccccggcgccgccaccauguucguguuccuggugcugcugccccuggugagcagccagugcgugaaccugaccacccggacccagcugccaccagccuacaccaacagcuucacccggggcgucuacuaccccgacaagguguuccggagcagcguccugcacagcacccaggaccuguuccugcccuucuucagcaacgugaccugguuccacgccaucagcggcaccaacggcaccaagcgguucgacaaccccgugcugcccuucaacgacggcguguacuucgccagcaccgagaagagcaacaucauccggggcuggaucuucggcaccacccuggacagcaagacccagagccugcugaucgugaauaacgccaccaacguggugaucaaggugugcgaguuccaguucugcaacgaccccuuccugggcguguacuaccacaagaacaacaagagcuggauggagagcgaguuccggguguacagcagcgccaacaacugcaccuucgaguacgugagccagcccuuccugauggaccuggagggcaagcagggcaacuucaagaaccugcgggaguucguguucaagaacaucgacggcuacuucaagaucuacagcaagcacaccccaaucaaccuggugcgggaucugccccagggcuucucagugcuggagccccugguggaccugcccaucggcaucaacaucacccgguuccagacccugcuggcccugcaccggagcuaccugaccccaggcgacagcagcagcggguggacagcaggcgcggcugcuuacuacgugggcuaccugcagccccggaccuuccugcugaaguacaacgagaacggcaccaucaccgacgccguggacugcgcccuggacccucugagcgagaccaagugcacccugaagagcuucaccguggagaagggcaucuaccagaccagcaacuuccgggugcagcccaccgagagcaucgugcgguuccccaacaucaccaaccugugccccuucggcgagguguucaacgccacccgguucgccagcguguacgccuggaaccggaagcggaucagcaacugcguggccgacuacagcgugcuguacaacagcgccagcuucagcaccuucaagugcuacggcgugagccccaccaagcugaacgaccugugcuucaccaacguguacgccgacagcuucgugauccguggcgacgaggugcggcagaucgcacccggccagacaggcaagaucgccgacuacaacuacaagcugcccgacgacuucaccggcugcgugaucgccuggaacagcaacaaccucgacagcaaggugggcggcaacuacaacuaccuguuccggcuguuccggaagagcaaccugaagcccuucgagcgggacaucagcaccgagaucuaccaagccggcaacaccccuugcaacggcguggagggcuucaacugcuacuucccucugcagagcuacggcuuccagcccaccaacggcgugggcuaccagcccuaccgggugguggugcugagcuucgagcugcugcacgccccagccaccguguguggccccaagaagagcaccaaccuggugaagaacaagugcgugaacuucaacuucaacggccuuaccggcaccggcgugcugaccgagagcaacaagaaauuccugcccuuucagcaguucggccgggacaucgccgacaccaccgacgcugugcgggauccccagacccuggagauccuggacaucaccccuugcagcuucggcggcgugagcgugaucaccccaggcaccaacaccagcaaccagguggccgugcuguaccagggcgugaacugcaccgaggugcccguggccauccacgccgaccagcugacacccaccuggcgggucuacagcaccggcagcaacguguuccagacccgggccgguugccugaucggcgccgagcacgugaacaacagcuacgagugcgacauccccaucggcgccggcaucugugccagcuaccagacccagaccaauucaccccggagggcaaggagcguggccagccagagcgugaucgccuacaccaugagccugggcgccgagaacagcguggccuacagcaacaacagcaucgccauccccaccaacuucaccaucagcgugaccaccgagauucugcccgugagcaugaccaagaccagcguggacugcaccauguacaucugcggcgacagcaccgagugcagcaaccugcugcugcaguacggcagcuucugcacccagcugaaccgggcccugaccggcaucgccguggagcaggacaagaacacccaggagguguucgcccaggugaagcagaucuacaagaccccucccaucaaggacuucggcggcuucaacuucagccagauccugcccgaccccagcaagcccagcaagcggagcuucaucgaggaccugcuguucaacaaggugacccuagccgacgccggcuucaucaagcaguacggcgacugccucggcgacauagccgcccgggaccugaucugcgcccagaaguucaacggccugaccgugcugccuccccugcugaccgacgagaugaucgcccaguacaccagcgcccuguuagccggaaccaucaccagcggcuggacuuucggcgcuggagccgcucugcagauccccuucgccaugcagauggccuaccgguucaacggcaucggcgugacccagaacgugcuguacgagaaccagaagcugaucgccaaccaguucaacagcgccaucggcaagauccaggacagccugagcagcaccgcuagcgcccugggcaagcugcaggacguggugaaccagaacgcccaggcccugaacacccuggugaagcagcugagcagcaacuucggcgccaucagcagcgugcugaacgacauccugagccggcuggacccucccgaggccgaggugcagaucgaccggcugaucacuggccggcugcagagccugcagaccuacgugacccagcagcugauccgggccgccgagauucgggccagcgccaaccuggccgccaccaagaugagcgagugcgugcugggccagagcaagcggguggacuucugcggcaagggcuaccaccugaugagcuuuccccagagcgcaccccacggagugguguuccugcacgugaccuacgugcccgcccaggagaagaacuucaccaccgccccagccaucugccacgacggcaaggcccacuuuccccgggagggcguguucgugagcaacggcacccacugguucgugacccagcggaacuucuacgagccccagaucaucaccaccgacaacaccuucgugagcggcaacugcgacguggugaucggcaucgugaacaacaccguguacgauccccugcagcccgagcuggacagcuucaaggaggagcuggacaaguacuucaagaaucacaccagccccgacguggaccugggcgacaucagcggcaucaacgccagcguggugaacauccagaaggagaucgaucggcugaacgagguggccaagaaccugaacgagagccugaucgaccugcaggagcugggcaaguacgagcaguacaucaaguggcccugguacaucuggcugggcuucaucgccggccugaucgccaucgugauggugaccaucaugcugugcugcaugaccagcugcugcagcugccugaagggcuguugcagcugcggcagcugcugcaaguucgacgaggacgacagcgagcccgugcugaagggcgugaagcugcacuacaccugauaauaggcuggagccucgguggccuagcuucuugccccuugggccuccccccagccccuccuccccuuccugcacccguacccccguggucuuugaauaaagucugagugggcggcaaaaaaaaaaaaaaaaaaaaaaaaaaaaaaaaaaaaaaaaaaaaaaaaaaaaaaaaaaaaaaaaaaaaaaaaaaaaaaaaaaaaaaaaaaaaaaaaaaaa

SEQ ID NO: 26204 - RNA, 4089 nt, Artificial Sequence
  SARS-CoV-2/Wuhan/WIV05/2019__EPI_ISL_402128 spike protein mRNA gc (1-1273)(K986P_V987P_H69del_V70del_Y453F_D614G_I692V_M1229I)
gggaaauaagagagaaaagaagaguaagaagaaauauaagaccccggcgccgccaccauguucguguuccuggugcugcugccccuggugagcagccagugcgugaaccugaccacccggacccagcugccaccagccuacaccaacagcuucacccggggcgucuacuaccccgacaagguguuccggagcagcguccugcacagcacccaggaccuguuccugcccuucuucagcaacgugaccugguuccacgccaucagcggcaccaacggcaccaagcgguucgacaaccccgugcugcccuucaacgacggcguguacuucgccagcaccgagaagagcaacaucauccggggcuggaucuucggcaccacccuggacagcaagacccagagccugcugaucgugaauaacgccaccaacguggugaucaaggugugcgaguuccaguucugcaacgaccccuuccugggcguguacuaccacaagaacaacaagagcuggauggagagcgaguuccggguguacagcagcgccaacaacugcaccuucgaguacgugagccagcccuuccugauggaccuggagggcaagcagggcaacuucaagaaccugcgggaguucguguucaagaacaucgacggcuacuucaagaucuacagcaagcacaccccaaucaaccuggugcgggaucugccccagggcuucucagcccuggagccccugguggaccugcccaucggcaucaacaucacccgguuccagacccugcuggcccugcaccggagcuaccugaccccaggcgacagcagcagcggguggacagcaggcgcggcugcuuacuacgugggcuaccugcagccccggaccuuccugcugaaguacaacgagaacggcaccaucaccgacgccguggacugcgcccuggacccucugagcgagaccaagugcacccugaagagcuucaccguggagaagggcaucuaccagaccagcaacuuccgggugcagcccaccgagagcaucgugcgguuccccaacaucaccaaccugugccccuucggcgagguguucaacgccacccgguucgccagcguguacgccuggaaccggaagcggaucagcaacugcguggccgacuacagcgugcuguacaacagcgccagcuucagcaccuucaagugcuacggcgugagccccaccaagcugaacgaccugugcuucaccaacguguacgccgacagcuucgugauccguggcgacgaggugcggcagaucgcacccggccagacaggcaagaucgccgacuacaacuacaagcugcccgacgacuucaccggcugcgugaucgccuggaacagcaacaaccucgacagcaaggugggcggcaacuacaacuaccuguuccggcuguuccggaagagcaaccugaagcccuucgagcgggacaucagcaccgagaucuaccaagccggcuccaccccuugcaacggcguggagggcuucaacugcuacuucccucugcagagcuacggcuuccagcccaccaacggcgugggcuaccagcccuaccgggugguggugcugagcuucgagcugcugcacgccccagccaccguguguggccccaagaagagcaccaaccuggugaagaacaagugcgugaacuucaacuucaacggccuuaccggcaccggcgugcugaccgagagcaacaagaaauuccugcccuuucagcaguucggccgggacaucgccgacaccaccgacgcugugcgggauccccagacccuggagauccuggacaucaccccuugcagcuucggcggcgugagcgugaucaccccaggcaccaacaccagcaaccagguggccgugcuguaccagggcgugaacugcaccgaggugcccguggccauccacgccgaccagcugacacccaccuggcgggucuacagcaccggcagcaacguguuccagacccgggccgguugccugaucggcgccgagcacgugaacaacagcuacgagugcgacauccccaucggcgccggcaucugugccagcuaccagacccagaccaauucaccccggagggcaaggagcguggccagccagagcgugaucgccuacaccaugagccugggcgccgagaacagcguggccuacagcaacaacagcaucgccauccccaccaacuucaccaucagcgugaccaccgagauucugcccgugagcaugaccaagaccagcguggacugcaccauguacaucugcggcgacagcaccgagugcagcaaccugcugcugcaguacggcagcuucugcacccagcugaaccgggcccugaccggcaucgccguggagcaggacaagaacacccaggagguguucgcccaggugaagcagaucuacaagaccccucccaucaaggacuucggcggcuucaacuucagccagauccugcccgaccccagcaagcccagcaagcggagcuucaucgaggaccugcuguucaacaaggugacccuagccgacgccggcuucaucaagcaguacggcgacugccucggcgacauagccgcccgggaccugaucugcgcccagaaguucaacggccugaccgugcugccuccccugcugaccgacgagaugaucgcccaguacaccagcgcccuguuagccggaaccaucaccagcggcuggacuuucggcgcuggagccgcucugcagauccccuucgccaugcagauggccuaccgguucaacggcaucggcgugacccagaacgugcuguacgagaaccagaagcugaucgccaaccaguucaacagcgccaucggcaagauccaggacagccugagcagcaccgcuagcgcccugggcaagcugcaggacguggugaaccagaacgcccaggcccugaacacccuggugaagcagcugagcagcaacuucggcgccaucagcagcgugcugaacgacauccugagccggcuggacccucccgaggccgaggugcagaucgaccggcugaucacuggccggcugcagagccugcagaccuacgugacccagcagcugauccgggccgccgagauucgggccagcgccaaccuggccgccaccaagaugagcgagugcgugcugggccagagcaagcggguggacuucugcggcaagggcuaccaccugaugagcuuuccccagagcgcaccccacggagugguguuccugcacgugaccuacgugcccgcccaggagaagaacuucaccaccgccccagccaucugccacgacggcaaggcccacuuuccccgggagggcguguucgugagcaacggcacccacugguucgugacccagcggaacuucuacgagccccagaucaucaccaccgacaacaccuucgugagcggcaacugcgacguggugaucggcaucgugaacaacaccguguacgauccccugcagcccgagcuggacagcuucaaggaggagcuggacaaguacuucaagaaucacaccagccccgacguggaccugggcgacaucagcggcaucaacgccagcguggugaacauccagaaggagaucgaucggcugaacgagguggccaagaaccugaacgagagccugaucgaccugcaggagcugggcaaguacgagcaguacaucaaguggcccugguacaucuggcugggcuucaucgccggccugaucgccaucgugaucgugaccaucaugcugugcugcaugaccagcugcugcagcugccugaagggcuguugcagcugcggcagcugcugcaaguucgacgaggacgacagcgagcccgugcugaagggcgugaagcugcacuacaccugauaauaggcuggagccucgguggccuagcuucuugccccuugggccuccccccagccccuccuccccuuccugcacccguacccccguggucuuugaauaaagucugagugggcggcaaaaaaaaaaaaaaaaaaaaaaaaaaaaaaaaaaaaaaaaaaaaaaaaaaaaaaaaaaaaaaaaaaaaaaaaaaaaaaaaaaaaaaaaaaaaaaaaaaaa

SEQ ID NO: 26205 - RNA, 4086 nt, Artificial Sequence
  SARS-CoV-2/Wuhan/WIV05/2019__EPI_ISL_402128 spike protein mRNA gc (1-1273)(K986P_V987P_K986P_V987P_H69del_V70del_Y144del_N501Y_A570 D_D614G_P681H_T716I_S982A_D1118H)
gggaaauaagagagaaaagaagaguaagaagaaauauaagaccccggcgccgccaccauguucguguuccuggugcugcugccccuggugagcagccagugcgugaaccugaccacccggacccagcugccaccagccuacaccaacagcuucacccggggcgucuacuaccccgacaagguguuccggagcagcguccugcacagcacccaggaccuguuccugcccuucuucagcaacgugaccugguuccacgccaucagcggcaccaacggcaccaagcgguucgacaaccccgugcugcccuucaacgacggcguguacuucgccagcaccgagaagagcaacaucauccggggcuggaucuucggcaccacccuggacagcaagacccagagccugcugaucgugaauaacgccaccaacguggugaucaaggugugcgaguuccaguucugcaacgaccccuuccugggcguguaccacaagaacaacaagagcuggauggagagcgaguuccggguguacagcagcgccaacaacugcaccuucgaguacgugagccagcccuuccugauggaccuggagggcaagcagggcaacuucaagaaccugcgggaguucguguucaagaacaucgacggcuacuucaagaucuacagcaagcacaccccaaucaaccuggugcgggaucugccccagggcuucucagcccuggagccccugguggaccugcccaucggcaucaacaucacccgguuccagacccugcuggcccugcaccggagcuaccugaccccaggcgacagcagcagcggguggacagcaggcgcggcugcuuacuacgugggcuaccugcagccccggaccuuccugcugaaguacaacgagaacggcaccaucaccgacgccguggacugcgcccuggacccucugagcgagaccaagugcacccugaagagcuucaccguggagaagggcaucuaccagaccagcaacuuccgggugcagcccaccgagagcaucgugcgguuccccaacaucaccaaccugugccccuucggcgagguguucaacgccacccgguucgccagcguguacgccuggaaccggaagcggaucagcaacugcguggccgacuacagcgugcuguacaacagcgccagcuucagcaccuucaagugcuacggcgugagccccaccaagcugaacgaccugugcuucaccaacguguacgccgacagcuucgugauccguggcgacgaggugcggcagaucgcacccggccagacaggcaagaucgccgacuacaacuacaagcugcccgacgacuucaccggcugcgugaucgccuggaacagcaacaaccucgacagcaaggugggcggcaacuacaacuaccuguaccggcuguuccggaagagcaaccugaagcccuucgagcgggacaucagcaccgagaucuaccaagccggcuccaccccuugcaacggcguggagggcuucaacugcuacuucccucugcagagcuacggcuuccagcccaccuacggcgugggcuaccagcccuaccgggugguggugcugagcuucgagcugcugcacgccccagccaccguguguggccccaagaagagcaccaaccuggugaagaacaagugcgugaacuucaacuucaacggccuuaccggcaccggcgugcugaccgagagcaacaagaaauuccugcccuuucagcaguucggccgggacaucgacgacaccaccgacgcugugcgggauccccagacccuggagauccuggacaucaccccuugcagcuucggcggcgugagcgugaucaccccaggcaccaacaccagcaaccagguggccgugcuguaccagggcgugaacugcaccgaggugcccguggccauccacgccgaccagcugacacccaccuggcgggucuacagcaccggcagcaacguguuccagacccgggccgguugccugaucggcgccgagcacgugaacaacagcuacgagugcgacauccccaucggcgccggcaucugugccagcuaccagacccagaccaauucacaccggagggcaaggagcguggccagccagagcaucaucgccuacaccaugagccugggcgccgagaacagcguggccuacagcaacaacagcaucgccauccccaucaacuucaccaucagcgugaccaccgagauucugcccgugagcaugaccaagaccagcguggacugcaccauguacaucugcggcgacagcaccgagugcagcaaccugcugcugcaguacggcagcuucugcacccagcugaaccgggcccugaccggcaucgccguggagcaggacaagaacacccaggagguguucgcccaggugaagcagaucuacaagaccccucccaucaaggacuucggcggcuucaacuucagccagauccugcccgaccccagcaagcccagcaagcggagcuucaucgaggaccugcuguucaacaaggugacccuagccgacgccggcuucaucaagcaguacggcgacugccucggcgacauagccgcccgggaccugaucugcgcccagaaguucaacggccugaccgugcugccuccccugcugaccgacgagaugaucgcccaguacaccagcgcccuguuagccggaaccaucaccagcggcuggacuuucggcgcuggagccgcucugcagauccccuucgccaugcagauggccuaccgguucaacggcaucggcgugacccagaacgugcuguacgagaaccagaagcugaucgccaaccaguucaacagcgccaucggcaagauccaggacagccugagcagcaccgcuagcgcccugggcaagcugcaggacguggugaaccagaacgcccaggcccugaacacccuggugaagcagcugagcagcaacuucggcgccaucagcagcgugcugaacgacauccuggcccggcuggacccucccgaggccgaggugcagaucgaccggcugaucacuggccggcugcagagccugcagaccuacgugacccagcagcugauccgggccgccgagauucgggccagcgccaaccuggccgccaccaagaugagcgagugcgugcugggccagagcaagcggguggacuucugcggcaagggcuaccaccugaugagcuuuccccagagcgcaccccacggagugguguuccugcacgugaccuacgugcccgcccaggagaagaacuucaccaccgccccagccaucugccacgacggcaaggcccacuuuccccgggagggcguguucgugagcaacggcacccacugguucgugacccagcggaacuucuacgagccccagaucaucaccacccacaacaccuucgugagcggcaacugcgacguggugaucggcaucgugaacaacaccguguacgauccccugcagcccgagcuggacagcuucaaggaggagcuggacaaguacuucaagaaucacaccagccccgacguggaccugggcgacaucagcggcaucaacgccagcguggugaacauccagaaggagaucgaucggcugaacgagguggccaagaaccugaacgagagccugaucgaccugcaggagcugggcaaguacgagcaguacaucaaguggcccugguacaucuggcugggcuucaucgccggccugaucgccaucgugauggugaccaucaugcugugcugcaugaccagcugcugcagcugccugaagggcuguugcagcugcggcagcugcugcaaguucgacgaggacgacagcgagcccgugcugaagggcgugaagcugcacuacaccugauaauaggcuggagccucgguggccuagcuucuugccccuugggccuccccccagccccuccuccccuuccugcacccguacccccguggucuuugaauaaagucugagugggcggcaaaaaaaaaaaaaaaaaaaaaaaaaaaaaaaaaaaaaaaaaaaaaaaaaaaaaaaaaaaaaaaaaaaaaaaaaaaaaaaaaaaaaaaaaaaaaaaaaaaa

SEQ ID NO: 26206 - RNA, 4095 nt, Artificial Sequence
  SARS-CoV-2/Wuhan/WIV05/2019__EPI_ISL_402128 spike protein mRNA gc (1-1273)(K986P_V987P_K986P_V987P_K417N_E484K_N501Y_D614G)
gggaaauaagagagaaaagaagaguaagaagaaauauaagaccccggcgccgccaccauguucguguuccuggugcugcugccccuggugagcagccagugcgugaaccugaccacccggacccagcugccaccagccuacaccaacagcuucacccggggcgucuacuaccccgacaagguguuccggagcagcguccugcacagcacccaggaccuguuccugcccuucuucagcaacgugaccugguuccacgccauccacgugagcggcaccaacggcaccaagcgguucgacaaccccgugcugcccuucaacgacggcguguacuucgccagcaccgagaagagcaacaucauccggggcuggaucuucggcaccacccuggacagcaagacccagagccugcugaucgugaauaacgccaccaacguggugaucaaggugugcgaguuccaguucugcaacgaccccuuccugggcguguacuaccacaagaacaacaagagcuggauggagagcgaguuccggguguacagcagcgccaacaacugcaccuucgaguacgugagccagcccuuccugauggaccuggagggcaagcagggcaacuucaagaaccugcgggaguucguguucaagaacaucgacggcuacuucaagaucuacagcaagcacaccccaaucaaccuggugcgggaucugccccagggcuucucagcccuggagccccugguggaccugcccaucggcaucaacaucacccgguuccagacccugcuggcccugcaccggagcuaccugaccccaggcgacagcagcagcggguggacagcaggcgcggcugcuuacuacgugggcuaccugcagccccggaccuuccugcugaaguacaacgagaacggcaccaucaccgacgccguggacugcgcccuggacccucugagcgagaccaagugcacccugaagagcuucaccguggagaagggcaucuaccagaccagcaacuuccgggugcagcccaccgagagcaucgugcgguuccccaacaucaccaaccugugccccuucggcgagguguucaacgccacccgguucgccagcguguacgccuggaaccggaagcggaucagcaacugcguggccgacuacagcgugcuguacaacagcgccagcuucagcaccuucaagugcuacggcgugagccccaccaagcugaacgaccugugcuucaccaacguguacgccgacagcuucgugauccguggcgacgaggugcggcagaucgcacccggccagacaggcaacaucgccgacuacaacuacaagcugcccgacgacuucaccggcugcgugaucgccuggaacagcaacaaccucgacagcaaggugggcggcaacuacaacuaccuguaccggcuguuccggaagagcaaccugaagcccuucgagcgggacaucagcaccgagaucuaccaagccggcuccaccccuugcaacggcgugaagggcuucaacugcuacuucccucugcagagcuacggcuuccagcccaccuacggcgugggcuaccagcccuaccgggugguggugcugagcuucgagcugcugcacgccccagccaccguguguggccccaagaagagcaccaaccuggugaagaacaagugcgugaacuucaacuucaacggccuuaccggcaccggcgugcugaccgagagcaacaagaaauuccugcccuuucagcaguucggccgggacaucgccgacaccaccgacgcugugcgggauccccagacccuggagauccuggacaucaccccuugcagcuucggcggcgugagcgugaucaccccaggcaccaacaccagcaaccagguggccgugcuguaccagggcgugaacugcaccgaggugcccguggccauccacgccgaccagcugacacccaccuggcgggucuacagcaccggcagcaacguguuccagacccgggccgguugccugaucggcgccgagcacgugaacaacagcuacgagugcgacauccccaucggcgccggcaucugugccagcuaccagacccagaccaauucaccccggagggcaaggagcguggccagccagagcaucaucgccuacaccaugagccugggcgccgagaacagcguggccuacagcaacaacagcaucgccauccccaccaacuucaccaucagcgugaccaccgagauucugcccgugagcaugaccaagaccagcguggacugcaccauguacaucugcggcgacagcaccgagugcagcaaccugcugcugcaguacggcagcuucugcacccagcugaaccgggcccugaccggcaucgccguggagcaggacaagaacacccaggagguguucgcccaggugaagcagaucuacaagaccccucccaucaaggacuucggcggcuucaacuucagccagauccugcccgaccccagcaagcccagcaagcggagcuucaucgaggaccugcuguucaacaaggugacccuagccgacgccggcuucaucaagcaguacggcgacugccucggcgacauagccgcccgggaccugaucugcgcccagaaguucaacggccugaccgugcugccuccccugcugaccgacgagaugaucgcccaguacaccagcgcccuguuagccggaaccaucaccagcggcuggacuuucggcgcuggagccgcucugcagauccccuucgccaugcagauggccuaccgguucaacggcaucggcgugacccagaacgugcuguacgagaaccagaagcugaucgccaaccaguucaacagcgccaucggcaagauccaggacagccugagcagcaccgcuagcgcccugggcaagcugcaggacguggugaaccagaacgcccaggcccugaacacccuggugaagcagcugagcagcaacuucggcgccaucagcagcgugcugaacgacauccugagccggcuggacccucccgaggccgaggugcagaucgaccggcugaucacuggccggcugcagagccugcagaccuacgugacccagcagcugauccgggccgccgagauucgggccagcgccaaccuggccgccaccaagaugagcgagugcgugcugggccagagcaagcggguggacuucugcggcaagggcuaccaccugaugagcuuuccccagagcgcaccccacggagugguguuccugcacgugaccuacgugcccgcccaggagaagaacuucaccaccgccccagccaucugccacgacggcaaggcccacuuuccccgggagggcguguucgugagcaacggcacccacugguucgugacccagcggaacuucuacgagccccagaucaucaccaccgacaacaccuucgugagcggcaacugcgacguggugaucggcaucgugaacaacaccguguacgauccccugcagcccgagcuggacagcuucaaggaggagcuggacaaguacuucaagaaucacaccagccccgacguggaccugggcgacaucagcggcaucaacgccagcguggugaacauccagaaggagaucgaucggcugaacgagguggccaagaaccugaacgagagccugaucgaccugcaggagcugggcaaguacgagcaguacaucaaguggcccugguacaucuggcugggcuucaucgccggccugaucgccaucgugauggugaccaucaugcugugcugcaugaccagcugcugcagcugccugaagggcuguugcagcugcggcagcugcugcaaguucgacgaggacgacagcgagcccgugcugaagggcgugaagcugcacuacaccugauaauaggcuggagccucgguggccuagcuucuugccccuugggccuccccccagccccuccuccccuuccugcacccguacccccguggucuuugaauaaagucugagugggcggcaaaaaaaaaaaaaaaaaaaaaaaaaaaaaaaaaaaaaaaaaaaaaaaaaaaaaaaaaaaaaaaaaaaaaaaaaaaaaaaaaaaaaaaaaaaaaaaaaaaa

SEQ ID NO: 26207 - RNA, 4086 nt, Artificial Sequence
  SARS-CoV-2/Wuhan/WIV05/2019__EPI_ISL_402128 spike protein mRNA gc (1-1273)(K986P_V987P_K986P_V987P_L18F_D80A_D215G_L242del_A243del_ L244del_R246I_K417N_E484K_N501Y_D614G_A701V)
gggaaauaagagagaaaagaagaguaagaagaaauauaagaccccggcgccgccaccauguucguguuccuggugcugcugccccuggugagcagccagugcgugaacuucaccacccggacccagcugccaccagccuacaccaacagcuucacccggggcgucuacuaccccgacaagguguuccggagcagcguccugcacagcacccaggaccuguuccugcccuucuucagcaacgugaccugguuccacgccauccacgugagcggcaccaacggcaccaagcgguucgccaaccccgugcugcccuucaacgacggcguguacuucgccagcaccgagaagagcaacaucauccggggcuggaucuucggcaccacccuggacagcaagacccagagccugcugaucgugaauaacgccaccaacguggugaucaaggugugcgaguuccaguucugcaacgaccccuuccugggcguguacuaccacaagaacaacaagagcuggauggagagcgaguuccggguguacagcagcgccaacaacugcaccuucgaguacgugagccagcccuuccugauggaccuggagggcaagcagggcaacuucaagaaccugcgggaguucguguucaagaacaucgacggcuacuucaagaucuacagcaagcacaccccaaucaaccuggugcggggccugccccagggcuucucagcccuggagccccugguggaccugcccaucggcaucaacaucacccgguuccagacccugcacaucagcuaccugaccccaggcgacagcagcagcggguggacagcaggcgcggcugcuuacuacgugggcuaccugcagccccggaccuuccugcugaaguacaacgagaacggcaccaucaccgacgccguggacugcgcccuggacccucugagcgagaccaagugcacccugaagagcuucaccguggagaagggcaucuaccagaccagcaacuuccgggugcagcccaccgagagcaucgugcgguuccccaacaucaccaaccugugccccuucggcgagguguucaacgccacccgguucgccagcguguacgccuggaaccggaagcggaucagcaacugcguggccgacuacagcgugcuguacaacagcgccagcuucagcaccuucaagugcuacggcgugagccccaccaagcugaacgaccugugcuucaccaacguguacgccgacagcuucgugauccguggcgacgaggugcggcagaucgcacccggccagacaggcaacaucgccgacuacaacuacaagcugcccgacgacuucaccggcugcgugaucgccuggaacagcaacaaccucgacagcaaggugggcggcaacuacaacuaccuguaccggcuguuccggaagagcaaccugaagcccuucgagcgggacaucagcaccgagaucuaccaagccggcuccaccccuugcaacggcgugaagggcuucaacugcuacuucccucugcagagcuacggcuuccagcccaccuacggcgugggcuaccagcccuaccgggugguggugcugagcuucgagcugcugcacgccccagccaccguguguggccccaagaagagcaccaaccuggugaagaacaagugcgugaacuucaacuucaacggccuuaccggcaccggcgugcugaccgagagcaacaagaaauuccugcccuuucagcaguucggccgggacaucgccgacaccaccgacgcugugcgggauccccagacccuggagauccuggacaucaccccuugcagcuucggcggcgugagcgugaucaccccaggcaccaacaccagcaaccagguggccgugcuguaccagggcgugaacugcaccgaggugcccguggccauccacgccgaccagcugacacccaccuggcgggucuacagcaccggcagcaacguguuccagacccgggccgguugccugaucggcgccgagcacgugaacaacagcuacgagugcgacauccccaucggcgccggcaucugugccagcuaccagacccagaccaauucaccccggagggcaaggagcguggccagccagagcaucaucgccuacaccaugagccugggcguggagaacagcguggccuacagcaacaacagcaucgccauccccaccaacuucaccaucagcgugaccaccgagauucugcccgugagcaugaccaagaccagcguggacugcaccauguacaucugcggcgacagcaccgagugcagcaaccugcugcugcaguacggcagcuucugcacccagcugaaccgggcccugaccggcaucgccguggagcaggacaagaacacccaggagguguucgcccaggugaagcagaucuacaagaccccucccaucaaggacuucggcggcuucaacuucagccagauccugcccgaccccagcaagcccagcaagcggagcuucaucgaggaccugcuguucaacaaggugacccuagccgacgccggcuucaucaagcaguacggcgacugccucggcgacauagccgcccgggaccugaucugcgcccagaaguucaacggccugaccgugcugccuccccugcugaccgacgagaugaucgcccaguacaccagcgcccuguuagccggaaccaucaccagcggcuggacuuucggcgcuggagccgcucugcagauccccuucgccaugcagauggccuaccgguucaacggcaucggcgugacccagaacgugcuguacgagaaccagaagcugaucgccaaccaguucaacagcgccaucggcaagauccaggacagccugagcagcaccgcuagcgcccugggcaagcugcaggacguggugaaccagaacgcccaggcccugaacacccuggugaagcagcugagcagcaacuucggcgccaucagcagcgugcugaacgacauccugagccggcuggacccucccgaggccgaggugcagaucgaccggcugaucacuggccggcugcagagccugcagaccuacgugacccagcagcugauccgggccgccgagauucgggccagcgccaaccuggccgccaccaagaugagcgagugcgugcugggccagagcaagcggguggacuucugcggcaagggcuaccaccugaugagcuuuccccagagcgcaccccacggagugguguuccugcacgugaccuacgugcccgcccaggagaagaacuucaccaccgccccagccaucugccacgacggcaaggcccacuuuccccgggagggcguguucgugagcaacggcacccacugguucgugacccagcggaacuucuacgagccccagaucaucaccaccgacaacaccuucgugagcggcaacugcgacguggugaucggcaucgugaacaacaccguguacgauccccugcagcccgagcuggacagcuucaaggaggagcuggacaaguacuucaagaaucacaccagccccgacguggaccugggcgacaucagcggcaucaacgccagcguggugaacauccagaaggagaucgaucggcugaacgagguggccaagaaccugaacgagagccugaucgaccugcaggagcugggcaaguacgagcaguacaucaaguggcccugguacaucuggcugggcuucaucgccggccugaucgccaucgugauggugaccaucaugcugugcugcaugaccagcugcugcagcugccugaagggcuguugcagcugcggcagcugcugcaaguucgacgaggacgacagcgagcccgugcugaagggcgugaagcugcacuacaccugauaauaggcuggagccucgguggccuagcuucuugccccuugggccuccccccagccccuccuccccuuccugcacccguacccccguggucuuugaauaaagucugagugggcggcaaaaaaaaaaaaaaaaaaaaaaaaaaaaaaaaaaaaaaaaaaaaaaaaaaaaaaaaaaaaaaaaaaaaaaaaaaaaaaaaaaaaaaaaaaaaaaaaaaaa

SEQ ID NO: 26208 - RNA, 4095 nt, Artificial Sequence
  SARS-CoV-2/Wuhan/WIV05/2019__EPI_ISL_402128 spike protein mRNA gc (1-1273)(K986P_V987P_K986P_V987P_E484K_D614G)
gggaaauaagagagaaaagaagaguaagaagaaauauaagaccccggcgccgccaccauguucguguuccuggugcugcugccccuggugagcagccagugcgugaaccugaccacccggacccagcugccaccagccuacaccaacagcuucacccggggcgucuacuaccccgacaagguguuccggagcagcguccugcacagcacccaggaccuguuccugcccuucuucagcaacgugaccugguuccacgccauccacgugagcggcaccaacggcaccaagcgguucgacaaccccgugcugcccuucaacgacggcguguacuucgccagcaccgagaagagcaacaucauccggggcuggaucuucggcaccacccuggacagcaagacccagagccugcugaucgugaauaacgccaccaacguggugaucaaggugugcgaguuccaguucugcaacgaccccuuccugggcguguacuaccacaagaacaacaagagcuggauggagagcgaguuccggguguacagcagcgccaacaacugcaccuucgaguacgugagccagcccuuccugauggaccuggagggcaagcagggcaacuucaagaaccugcgggaguucguguucaagaacaucgacggcuacuucaagaucuacagcaagcacaccccaaucaaccuggugcgggaucugccccagggcuucucagcccuggagccccugguggaccugcccaucggcaucaacaucacccgguuccagacccugcuggcccugcaccggagcuaccugaccccaggcgacagcagcagcggguggacagcaggcgcggcugcuuacuacgugggcuaccugcagccccggaccuuccugcugaaguacaacgagaacggcaccaucaccgacgccguggacugcgcccuggacccucugagcgagaccaagugcacccugaagagcuucaccguggagaagggcaucuaccagaccagcaacuuccgggugcagcccaccgagagcaucgugcgguuccccaacaucaccaaccugugccccuucggcgagguguucaacgccacccgguucgccagcguguacgccuggaaccggaagcggaucagcaacugcguggccgacuacagcgugcuguacaacagcgccagcuucagcaccuucaagugcuacggcgugagccccaccaagcugaacgaccugugcuucaccaacguguacgccgacagcuucgugauccguggcgacgaggugcggcagaucgcacccggccagacaggcaagaucgccgacuacaacuacaagcugcccgacgacuucaccggcugcgugaucgccuggaacagcaacaaccucgacagcaaggugggcggcaacuacaacuaccuguaccggcuguuccggaagagcaaccugaagcccuucgagcgggacaucagcaccgagaucuaccaagccggcuccaccccuugcaacggcgugaagggcuucaacugcuacuucccucugcagagcuacggcuuccagcccaccaacggcgugggcuaccagcccuaccgggugguggugcugagcuucgagcugcugcacgccccagccaccguguguggccccaagaagagcaccaaccuggugaagaacaagugcgugaacuucaacuucaacggccuuaccggcaccggcgugcugaccgagagcaacaagaaauuccugcccuuucagcaguucggccgggacaucgccgacaccaccgacgcugugcgggauccccagacccuggagauccuggacaucaccccuugcagcuucggcggcgugagcgugaucaccccaggcaccaacaccagcaaccagguggccgugcuguaccagggcgugaacugcaccgaggugcccguggccauccacgccgaccagcugacacccaccuggcgggucuacagcaccggcagcaacguguuccagacccgggccgguugccugaucggcgccgagcacgugaacaacagcuacgagugcgacauccccaucggcgccggcaucugugccagcuaccagacccagaccaauucaccccggagggcaaggagcguggccagccagagcaucaucgccuacaccaugagccugggcgccgagaacagcguggccuacagcaacaacagcaucgccauccccaccaacuucaccaucagcgugaccaccgagauucugcccgugagcaugaccaagaccagcguggacugcaccauguacaucugcggcgacagcaccgagugcagcaaccugcugcugcaguacggcagcuucugcacccagcugaaccgggcccugaccggcaucgccguggagcaggacaagaacacccaggagguguucgcccaggugaagcagaucuacaagaccccucccaucaaggacuucggcggcuucaacuucagccagauccugcccgaccccagcaagcccagcaagcggagcuucaucgaggaccugcuguucaacaaggugacccuagccgacgccggcuucaucaagcaguacggcgacugccucggcgacauagccgcccgggaccugaucugcgcccagaaguucaacggccugaccgugcugccuccccugcugaccgacgagaugaucgcccaguacaccagcgcccuguuagccggaaccaucaccagcggcuggacuuucggcgcuggagccgcucugcagauccccuucgccaugcagauggccuaccgguucaacggcaucggcgugacccagaacgugcuguacgagaaccagaagcugaucgccaaccaguucaacagcgccaucggcaagauccaggacagccugagcagcaccgcuagcgcccugggcaagcugcaggacguggugaaccagaacgcccaggcccugaacacccuggugaagcagcugagcagcaacuucggcgccaucagcagcgugcugaacgacauccugagccggcuggacccucccgaggccgaggugcagaucgaccggcugaucacuggccggcugcagagccugcagaccuacgugacccagcagcugauccgggccgccgagauucgggccagcgccaaccuggccgccaccaagaugagcgagugcgugcugggccagagcaagcggguggacuucugcggcaagggcuaccaccugaugagcuuuccccagagcgcaccccacggagugguguuccugcacgugaccuacgugcccgcccaggagaagaacuucaccaccgccccagccaucugccacgacggcaaggcccacuuuccccgggagggcguguucgugagcaacggcacccacugguucgugacccagcggaacuucuacgagccccagaucaucaccaccgacaacaccuucgugagcggcaacugcgacguggugaucggcaucgugaacaacaccguguacgauccccugcagcccgagcuggacagcuucaaggaggagcuggacaaguacuucaagaaucacaccagccccgacguggaccugggcgacaucagcggcaucaacgccagcguggugaacauccagaaggagaucgaucggcugaacgagguggccaagaaccugaacgagagccugaucgaccugcaggagcugggcaaguacgagcaguacaucaaguggcccugguacaucuggcugggcuucaucgccggccugaucgccaucgugauggugaccaucaugcugugcugcaugaccagcugcugcagcugccugaagggcuguugcagcugcggcagcugcugcaaguucgacgaggacgacagcgagcccgugcugaagggcgugaagcugcacuacaccugauaauaggcuggagccucgguggccuagcuucuugccccuugggccuccccccagccccuccuccccuuccugcacccguacccccguggucuuugaauaaagucugagugggcggcaaaaaaaaaaaaaaaaaaaaaaaaaaaaaaaaaaaaaaaaaaaaaaaaaaaaaaaaaaaaaaaaaaaaaaaaaaaaaaaaaaaaaaaaaaaaaaaaaaaa

SEQ ID NO: 26209 - RNA, 4095 nt, Artificial Sequence
  SARS-CoV-2/Wuhan/WIV05/2019__EPI_ISL_402128 spike protein mRNA gc (1-1273)(K986P_V987P_K986P_V987P_L18F_T20N_P26S_D138Y_R190S_K417T _E484K_N501Y_D614G_H655Y_T1027I)
gggaaauaagagagaaaagaagaguaagaagaaauauaagaccccggcgccgccaccauguucguguuccuggugcugcugccccuggugagcagccagugcgugaacuucaccaaccggacccagcugccaagcgccuacaccaacagcuucacccggggcgucuacuaccccgacaagguguuccggagcagcguccugcacagcacccaggaccuguuccugcccuucuucagcaacgugaccugguuccacgccauccacgugagcggcaccaacggcaccaagcgguucgacaaccccgugcugcccuucaacgacggcguguacuucgccagcaccgagaagagcaacaucauccggggcuggaucuucggcaccacccuggacagcaagacccagagccugcugaucgugaauaacgccaccaacguggugaucaaggugugcgaguuccaguucugcaacuaccccuuccugggcguguacuaccacaagaacaacaagagcuggauggagagcgaguuccggguguacagcagcgccaacaacugcaccuucgaguacgugagccagcccuuccugauggaccuggagggcaagcagggcaacuucaagaaccugagcgaguucguguucaagaacaucgacggcuacuucaagaucuacagcaagcacaccccaaucaaccuggugcgggaucugccccagggcuucucagcccuggagccccugguggaccugcccaucggcaucaacaucacccgguuccagacccugcuggcccugcaccggagcuaccugaccccaggcgacagcagcagcggguggacagcaggcgcggcugcuuacuacgugggcuaccugcagccccggaccuuccugcugaaguacaacgagaacggcaccaucaccgacgccguggacugcgcccuggacccucugagcgagaccaagugcacccugaagagcuucaccguggagaagggcaucuaccagaccagcaacuuccgggugcagcccaccgagagcaucgugcgguuccccaacaucaccaaccugugccccuucggcgagguguucaacgccacccgguucgccagcguguacgccuggaaccggaagcggaucagcaacugcguggccgacuacagcgugcuguacaacagcgccagcuucagcaccuucaagugcuacggcgugagccccaccaagcugaacgaccugugcuucaccaacguguacgccgacagcuucgugauccguggcgacgaggugcggcagaucgcacccggccagacaggcaccaucgccgacuacaacuacaagcugcccgacgacuucaccggcugcgugaucgccuggaacagcaacaaccucgacagcaaggugggcggcaacuacaacuaccuguaccggcuguuccggaagagcaaccugaagcccuucgagcgggacaucagcaccgagaucuaccaagccggcuccaccccuugcaacggcgugaagggcuucaacugcuacuucccucugcagagcuacggcuuccagcccaccuacggcgugggcuaccagcccuaccgggugguggugcugagcuucgagcugcugcacgccccagccaccguguguggccccaagaagagcaccaaccuggugaagaacaagugcgugaacuucaacuucaacggccuuaccggcaccggcgugcugaccgagagcaacaagaaauuccugcccuuucagcaguucggccgggacaucgccgacaccaccgacgcugugcgggauccccagacccuggagauccuggacaucaccccuugcagcuucggcggcgugagcgugaucaccccaggcaccaacaccagcaaccagguggccgugcuguaccagggcgugaacugcaccgaggugcccguggccauccacgccgaccagcugacacccaccuggcgggucuacagcaccggcagcaacguguuccagacccgggccgguugccugaucggcgccgaguacgugaacaacagcuacgagugcgacauccccaucggcgccggcaucugugccagcuaccagacccagaccaauucaccccggagggcaaggagcguggccagccagagcaucaucgccuacaccaugagccugggcgccgagaacagcguggccuacagcaacaacagcaucgccauccccaccaacuucaccaucagcgugaccaccgagauucugcccgugagcaugaccaagaccagcguggacugcaccauguacaucugcggcgacagcaccgagugcagcaaccugcugcugcaguacggcagcuucugcacccagcugaaccgggcccugaccggcaucgccguggagcaggacaagaacacccaggagguguucgcccaggugaagcagaucuacaagaccccucccaucaaggacuucggcggcuucaacuucagccagauccugcccgaccccagcaagcccagcaagcggagcuucaucgaggaccugcuguucaacaaggugacccuagccgacgccggcuucaucaagcaguacggcgacugccucggcgacauagccgcccgggaccugaucugcgcccagaaguucaacggccugaccgugcugccuccccugcugaccgacgagaugaucgcccaguacaccagcgcccuguuagccggaaccaucaccagcggcuggacuuucggcgcuggagccgcucugcagauccccuucgccaugcagauggccuaccgguucaacggcaucggcgugacccagaacgugcuguacgagaaccagaagcugaucgccaaccaguucaacagcgccaucggcaagauccaggacagccugagcagcaccgcuagcgcccugggcaagcugcaggacguggugaaccagaacgcccaggcccugaacacccuggugaagcagcugagcagcaacuucggcgccaucagcagcgugcugaacgacauccugagccggcuggacccucccgaggccgaggugcagaucgaccggcugaucacuggccggcugcagagccugcagaccuacgugacccagcagcugauccgggccgccgagauucgggccagcgccaaccuggccgccaucaagaugagcgagugcgugcugggccagagcaagcggguggacuucugcggcaagggcuaccaccugaugagcuuuccccagagcgcaccccacggagugguguuccugcacgugaccuacgugcccgcccaggagaagaacuucaccaccgccccagccaucugccacgacggcaaggcccacuuuccccgggagggcguguucgugagcaacggcacccacugguucgugacccagcggaacuucuacgagccccagaucaucaccaccgacaacaccuucgugagcggcaacugcgacguggugaucggcaucgugaacaacaccguguacgauccccugcagcccgagcuggacagcuucaaggaggagcuggacaaguacuucaagaaucacaccagccccgacguggaccugggcgacaucagcggcaucaacgccagcguggugaacauccagaaggagaucgaucggcugaacgagguggccaagaaccugaacgagagccugaucgaccugcaggagcugggcaaguacgagcaguacaucaaguggcccugguacaucuggcugggcuucaucgccggccugaucgccaucgugauggugaccaucaugcugugcugcaugaccagcugcugcagcugccugaagggcuguugcagcugcggcagcugcugcaaguucgacgaggacgacagcgagcccgugcugaagggcgugaagcugcacuacaccugauaauaggcuggagccucgguggccuagcuucuugccccuugggccuccccccagccccuccuccccuuccugcacccguacccccguggucuuugaauaaagucugagugggcggcaaaaaaaaaaaaaaaaaaaaaaaaaaaaaaaaaaaaaaaaaaaaaaaaaaaaaaaaaaaaaaaaaaaaaaaaaaaaaaaaaaaaaaaaaaaaaaaaaaaa

SEQ ID NO: 26210 - RNA, 4095 nt, Artificial Sequence
  SARS-CoV-2/Wuhan/WIV05/2019__EPI_ISL_402128 spike protein mRNA gc (1-1273)(K986P_V987P_K986P_V987P_S13I_W152C_L452R_D614G)
gggaaauaagagagaaaagaagaguaagaagaaauauaagaccccggcgccgccaccauguucguguuccuggugcugcugccccuggugagcauccagugcgugaaccugaccacccggacccagcugccaccagccuacaccaacagcuucacccggggcgucuacuaccccgacaagguguuccggagcagcguccugcacagcacccaggaccuguuccugcccuucuucagcaacgugaccugguuccacgccauccacgugagcggcaccaacggcaccaagcgguucgacaaccccgugcugcccuucaacgacggcguguacuucgccagcaccgagaagagcaacaucauccggggcuggaucuucggcaccacccuggacagcaagacccagagccugcugaucgugaauaacgccaccaacguggugaucaaggugugcgaguuccaguucugcaacgaccccuuccugggcguguacuaccacaagaacaacaagagcugcauggagagcgaguuccggguguacagcagcgccaacaacugcaccuucgaguacgugagccagcccuuccugauggaccuggagggcaagcagggcaacuucaagaaccugcgggaguucguguucaagaacaucgacggcuacuucaagaucuacagcaagcacaccccaaucaaccuggugcgggaucugccccagggcuucucagcccuggagccccugguggaccugcccaucggcaucaacaucacccgguuccagacccugcuggcccugcaccggagcuaccugaccccaggcgacagcagcagcggguggacagcaggcgcggcugcuuacuacgugggcuaccugcagccccggaccuuccugcugaaguacaacgagaacggcaccaucaccgacgccguggacugcgcccuggacccucugagcgagaccaagugcacccugaagagcuucaccguggagaagggcaucuaccagaccagcaacuuccgggugcagcccaccgagagcaucgugcgguuccccaacaucaccaaccugugccccuucggcgagguguucaacgccacccgguucgccagcguguacgccuggaaccggaagcggaucagcaacugcguggccgacuacagcgugcuguacaacagcgccagcuucagcaccuucaagugcuacggcgugagccccaccaagcugaacgaccugugcuucaccaacguguacgccgacagcuucgugauccguggcgacgaggugcggcagaucgcacccggccagacaggcaagaucgccgacuacaacuacaagcugcccgacgacuucaccggcugcgugaucgccuggaacagcaacaaccucgacagcaaggugggcggcaacuacaacuaccgcuaccggcuguuccggaagagcaaccugaagcccuucgagcgggacaucagcaccgagaucuaccaagccggcuccaccccuugcaacggcguggagggcuucaacugcuacuucccucugcagagcuacggcuuccagcccaccaacggcgugggcuaccagcccuaccgggugguggugcugagcuucgagcugcugcacgccccagccaccguguguggccccaagaagagcaccaaccuggugaagaacaagugcgugaacuucaacuucaacggccuuaccggcaccggcgugcugaccgagagcaacaagaaauuccugcccuuucagcaguucggccgggacaucgccgacaccaccgacgcugugcgggauccccagacccuggagauccuggacaucaccccuugcagcuucggcggcgugagcgugaucaccccaggcaccaacaccagcaaccagguggccgugcuguaccagggcgugaacugcaccgaggugcccguggccauccacgccgaccagcugacacccaccuggcgggucuacagcaccggcagcaacguguuccagacccgggccgguugccugaucggcgccgagcacgugaacaacagcuacgagugcgacauccccaucggcgccggcaucugugccagcuaccagacccagaccaauucaccccggagggcaaggagcguggccagccagagcaucaucgccuacaccaugagccugggcgccgagaacagcguggccuacagcaacaacagcaucgccauccccaccaacuucaccaucagcgugaccaccgagauucugcccgugagcaugaccaagaccagcguggacugcaccauguacaucugcggcgacagcaccgagugcagcaaccugcugcugcaguacggcagcuucugcacccagcugaaccgggcccugaccggcaucgccguggagcaggacaagaacacccaggagguguucgcccaggugaagcagaucuacaagaccccucccaucaaggacuucggcggcuucaacuucagccagauccugcccgaccccagcaagcccagcaagcggagcuucaucgaggaccugcuguucaacaaggugacccuagccgacgccggcuucaucaagcaguacggcgacugccucggcgacauagccgcccgggaccugaucugcgcccagaaguucaacggccugaccgugcugccuccccugcugaccgacgagaugaucgcccaguacaccagcgcccuguuagccggaaccaucaccagcggcuggacuuucggcgcuggagccgcucugcagauccccuucgccaugcagauggccuaccgguucaacggcaucggcgugacccagaacgugcuguacgagaaccagaagcugaucgccaaccaguucaacagcgccaucggcaagauccaggacagccugagcagcaccgcuagcgcccugggcaagcugcaggacguggugaaccagaacgcccaggcccugaacacccuggugaagcagcugagcagcaacuucggcgccaucagcagcgugcugaacgacauccugagccggcuggacccucccgaggccgaggugcagaucgaccggcugaucacuggccggcugcagagccugcagaccuacgugacccagcagcugauccgggccgccgagauucgggccagcgccaaccuggccgccaccaagaugagcgagugcgugcugggccagagcaagcggguggacuucugcggcaagggcuaccaccugaugagcuuuccccagagcgcaccccacggagugguguuccugcacgugaccuacgugcccgcccaggagaagaacuucaccaccgccccagccaucugccacgacggcaaggcccacuuuccccgggagggcguguucgugagcaacggcacccacugguucgugacccagcggaacuucuacgagccccagaucaucaccaccgacaacaccuucgugagcggcaacugcgacguggugaucggcaucgugaacaacaccguguacgauccccugcagcccgagcuggacagcuucaaggaggagcuggacaaguacuucaagaaucacaccagccccgacguggaccugggcgacaucagcggcaucaacgccagcguggugaacauccagaaggagaucgaucggcugaacgagguggccaagaaccugaacgagagccugaucgaccugcaggagcugggcaaguacgagcaguacaucaaguggcccugguacaucuggcugggcuucaucgccggccugaucgccaucgugauggugaccaucaugcugugcugcaugaccagcugcugcagcugccugaagggcuguugcagcugcggcagcugcugcaaguucgacgaggacgacagcgagcccgugcugaagggcgugaagcugcacuacaccugauaauaggcuggagccucgguggccuagcuucuugccccuugggccuccccccagccccuccuccccuuccugcacccguacccccguggucuuugaauaaagucugagugggcggcaaaaaaaaaaaaaaaaaaaaaaaaaaaaaaaaaaaaaaaaaaaaaaaaaaaaaaaaaaaaaaaaaaaaaaaaaaaaaaaaaaaaaaaaaaaaaaaaaaaa

SEQ ID NO: 26211 - RNA, 4095 nt, Artificial Sequence
  SARS-CoV-2/Wuhan/WIV05/2019__EPI_ISL_402128 spike protein mRNA gc (1-1273)(K986P_V987P)
gggaaauaagagagaaaagaagaguaagaagaaauauaagaccccggcgccgccaccauguucguguuccuggugcugcugccccuggugagcagccagugcgugaaccugaccacccggacccagcugcccccugccuacaccaacagcuucacccggggcguguacuaccccgacaagguguuccggagcagcgugcugcacagcacccaggaccuguuccugcccuucuucagcaacgugaccugguuccacgccauccacgugagcggcaccaacggcaccaagcgguucgacaacccagugcugcccuucaacgacggcguguacuucgccagcaccgagaagucaaacaucauccggggcuggaucuucggcaccacccuggacagcaagacacagagccugcugaucgugaacaacgccaccaacguggugaucaaggugugcgaguuucaguucugcaacgaccccuuccugggcguguacuaccacaagaacaacaagagcuggauggagagcgaguuccgggucuacagcagcgcuaacaauugcaccuucgaguacgugagccagcccuuccugauggaccucgagggcaagcagggcaacuucaagaaccugcgggaguucguguucaagaacaucgauggcuacuucaagaucuacagcaagcacacccccaucaaccuggugcgggaccugccccagggauucagcgcccuggagccucugguggaccugcccaucggcaucaacaucaccagguuccagacccugcuggcccugcaccggagcuaccugacccccggcgacagcagcagcggcuggaccgccggcgccgccgcauacuacgugggcuaccugcagccacggaccuuccugcugaaguacaacgagaacggcaccaucaccgacgccguggacugcgcccuggacccccugagcgagaccaagugcacccuaaagagcuucaccguggagaagggcaucuaccagaccagcaacuuccgggugcagcccacugagagcaucgugcgguuccccaacauuaccaaccugugucccuucggcgagguguucaacgccacccgguucgccagcguguacgccuggaaccggaagcggaucagcaacugcguggccgacuacagcgugcuguacaacagcgccagcuucagcaccuucaagugcuacggcgugagcccuaccaagcugaacgaccugugcuucaccaacguguacgcugacagcuucgugauccggggcgacgaggugcggcagaucgcccccggccagaccggcaagaucgccgacuacaacuacaagcugcccgacgacuucaccggcugcgugaucgccuggaacagcaacaaccuggacagcaaggugggcggcaacuacaacuaccuguaccggcuguuccguaagagcaaccugaagccauucgagcgggacaucagcaccgagaucuaccaggccggcagcacccccugcaacgguguggagggcuuuaacugcuacuucccccugcagagcuacggcuuccagcccaccaacggcgugggcuaccagcccuaccgggugguggugcugagcuucgagcugcugcacgcccccgccaccgugugcggcccuaaaaagagcaccaaccuggugaagaacaagugcgugaacuucaauuucaacggccugaccggcaccggcgugcugaccgagagcaacaagaaguuccugcccuuccagcaguucggccgggauaucgccgacaccaccgacgcagugcgggacccccagacccuggagauccuggacaucaccccaugcagcuucggcggcgugagcgucaucacccccggcacaaacaccagcaaccagguggccgugcuguaccaggacgugaacugcaccgaggugcccguggccauccacgccgaccagcugacccccaccuggcggguguacagcaccggaagcaacguguuccagacccgggccggcugccugaucggcgccgagcacgugaacaacuccuacgagugcgacauccccaucggcgcuggcaucugcgccagcuaccagacccagaccaacagcccccggcgggcccggagcguggccagccagagcaucaucgccuacaccaugagcuuaggcgccgagaacagcguggccuacagcaacaacagcaucgcgaucccuaccaacuucaccaucagcgugaccaccgagauacugcccgugagcaugaccaagaccagcguggacuguaccauguacaucugcggcgacagcaccgagugcagcaaccugcugcugcaguacggcagcuucugcacccagcugaaccgggcccugaccggcaucgccguggagcaggacaagaacacccaagagguguucgcccaggugaagcagaucuacaagacucccccaaucaaggacuucggcggcuucaacuucagccagauccugcccgaccccagcaagcccagcaagcggagcuucaucgaggaccugcuguucaacaaggugacccuggccgacgccggcuucaucaagcaguacggcgauugccugggcgacaucgccgcucgggaccugaucugcgcccagaaguucaacgggcugaccgugcugcccccucugcugaccgacgagaugaucgcccaguacaccagcgcccugcuugccggcaccaucaccagcggcuggaccuucggcgccggcgcagcccugcagauccccuucgccaugcagauggccuaccgguucaacggcaucggcgugacccagaacgugcuguacgagaaccagaagcugaucgccaaccaguucaacagcgccaucggcaagauccaggacagccugagcagcaccgccagcgcccugggcaagcugcaggacguggugaaccagaacgcucaggcccugaacacccuggugaagcagcugagcagcaacuucggcgccaucagcucagugcugaaugacauccugagcaggcuggaucccccagaggccgaggugcagaucgaccggcugaucaccggccggcugcagagccugcagaccuacgugacccagcagcugauccgggccgccgagauccgggccagcgccaaccuggcagccaccaagaugagcgagugcgugcugggccagagcaagcggguggacuuuugcggcaagggcuaccaccugaugagcuucccccagagcgcuccccacggcgugguguuccuccacgugacauacguccccgcccaggagaagaacuucaccaccgcccccgccauuugccacgacggcaaggcccacuucccccgggagggcguguucgugagcaacggaacccacugguucgugacccagcggaacuucuacgagccucagaucaucaccaccgacaacaccuucgugagcggcaacugcgacguggugaucggcaucgugaacaacaccguguacgacccccugcagcccgagcuggacagcuucaaggaggagcuggacaaguacuucaagaaccacaccagcccagacguggaccugggcgacaucagcggcaucaacgccagcguggugaacauccagaaggagaucgaccggcugaacgagguggccaagaaccugaacgagagccugaucgaccugcaggagcugggcaaguacgagcaguacaucaaguggcccugguacaucuggcugggcuucaucgccggccugaucgccaucgugauggugaccaucaugcugugcugcaugaccagcugcuguagcugccugaagggcugcugcagcugcggcagcugcugcaaguucgacgaggacgacagcgagcccgugcugaagggcgugaagcugcacuacaccugauaauaggcuggagccucgguggccuagcuucuugccccuugggccuccccccagccccuccuccccuuccugcacccguacccccguggucuuugaauaaagucugagugggcggcaaaaaaaaaaaaaaaaaaaaaaaaaaaaaaaaaaaaaaaaaaaaaaaaaaaaaaaaaaaaaaaaaaaaaaaaaaaaaaaaaaaaaaaaaaaaaaaaaaaa

SEQ ID NO: 26212 - RNA, 4095 nt, Artificial Sequence
  SARS-CoV-2/Wuhan/WIV05/2019__EPI_ISL_402128 spike protein mRNA gc (1-1273)(K986P_V987P_ D614G)
gggaaauaagagagaaaagaagaguaagaagaaauauaagaccccggcgccgccaccauguucguguuccuggugcugcugccccuggugagcagccagugcgugaaccugaccacccggacccagcugcccccugccuacaccaacagcuucacccggggcguguacuaccccgacaagguguuccggagcagcgugcugcacagcacccaggaccuguuccugcccuucuucagcaacgugaccugguuccacgccauccacgugagcggcaccaacggcaccaagcgguucgacaacccagugcugcccuucaacgacggcguguacuucgccagcaccgagaagucaaacaucauccggggcuggaucuucggcaccacccuggacagcaagacacagagccugcugaucgugaacaacgccaccaacguggugaucaaggugugcgaguuucaguucugcaacgaccccuuccugggcguguacuaccacaagaacaacaagagcuggauggagagcgaguuccgggucuacagcagcgcuaacaauugcaccuucgaguacgugagccagcccuuccugauggaccucgagggcaagcagggcaacuucaagaaccugcgggaguucguguucaagaacaucgauggcuacuucaagaucuacagcaagcacacccccaucaaccuggugcgggaccugccccagggauucagcgcccuggagccucugguggaccugcccaucggcaucaacaucaccagguuccagacccugcuggcccugcaccggagcuaccugacccccggcgacagcagcagcggcuggaccgccggcgccgccgcauacuacgugggcuaccugcagccacggaccuuccugcugaaguacaacgagaacggcaccaucaccgacgccguggacugcgcccuggacccccugagcgagaccaagugcacccuaaagagcuucaccguggagaagggcaucuaccagaccagcaacuuccgggugcagcccacugagagcaucgugcgguuccccaacauuaccaaccugugucccuucggcgagguguucaacgccacccgguucgccagcguguacgccuggaaccggaagcggaucagcaacugcguggccgacuacagcgugcuguacaacagcgccagcuucagcaccuucaagugcuacggcgugagcccuaccaagcugaacgaccugugcuucaccaacguguacgcugacagcuucgugauccggggcgacgaggugcggcagaucgcccccggccagaccggcaagaucgccgacuacaacuacaagcugcccgacgacuucaccggcugcgugaucgccuggaacagcaacaaccuggacagcaaggugggcggcaacuacaacuaccuguaccggcuguuccguaagagcaaccugaagccauucgagcgggacaucagcaccgagaucuaccaggccggcagcacccccugcaacgguguggagggcuuuaacugcuacuucccccugcagagcuacggcuuccagcccaccaacggcgugggcuaccagcccuaccgggugguggugcugagcuucgagcugcugcacgcccccgccaccgugugcggcccuaaaaagagcaccaaccuggugaagaacaagugcgugaacuucaauuucaacggccugaccggcaccggcgugcugaccgagagcaacaagaaguuccugcccuuccagcaguucggccgggauaucgccgacaccaccgacgcagugcgggacccccagacccuggagauccuggacaucaccccaugcagcuucggcggcgugagcgucaucacccccggcacaaacaccagcaaccagguggccgugcuguaccagggagugaacugcaccgaggugcccguggccauccacgccgaccagcugacccccaccuggcggguguacagcaccggcagcaacguguuccagacccgggccggcugccugaucggcgccgagcacgugaacaacuccuacgagugcgacauccccaucggcgcuggcaucugcgccagcuaccagacccagaccaacagcccccggcgggcccggagcguggccagccagagcaucaucgccuacaccaugagcuuaggcgccgagaacagcguggccuacagcaacaacagcaucgcgaucccuaccaacuucaccaucagcgugaccaccgagauacugcccgugagcaugaccaagaccagcguggacuguaccauguacaucugcggcgacagcaccgagugcagcaaccugcugcugcaguacggcagcuucugcacccagcugaaccgggcccugaccggcaucgccguggagcaggacaagaacacccaagagguguucgcccaggugaagcagaucuacaagacucccccaaucaaggacuucggcggcuucaacuucagccagauccugcccgaccccagcaagcccagcaagcggagcuucaucgaggaccugcuguucaacaaggugacccuggccgacgccggcuucaucaagcaguacggcgacugccugggggauaucgccgcucgggaccugaucugcgcccagaaguucaacggccugaccgugcugcccccucugcugaccgacgagaugaucgcccaguacaccagcgcccugcuugccggcaccaucaccagcggcuggaccuucggcgccggcgcagcccugcagauccccuucgccaugcagauggccuaccgguucaacggcaucggcgugacccagaacgugcuguacgagaaccagaagcugaucgccaaccaguucaacagcgccaucggcaagauccaggacagccugagcagcaccgccagcgcccugggcaagcugcaggacguggugaaccagaacgcucaggcccugaacacccuggugaagcagcugagcagcaacuucggcgccaucagcucagugcugaaugacauccugagcaggcuggaucccccagaggccgaggugcagaucgaccggcugaucaccggccggcugcagagccugcagaccuacgugacccagcagcugauccgggccgccgagauccgggccagcgccaaccuggcagccaccaagaugagcgagugcgugcugggccagagcaagcggguggacuuuugcggcaagggcuaccaccugaugagcuucccccagagcgcuccccacggcgugguguuccuccacgugacauacguccccgcccaggagaagaacuucaccaccgcccccgccauuugccacgacggcaaggcccacuucccccgggagggaguguucgugagcaacggcacccacugguucgugacccagcggaacuucuacgagccucagaucaucaccaccgacaacaccuucgugagcggcaacugcgacguggugaucggcaucgugaacaacaccguguacgacccccugcagcccgagcuggacagcuucaaggaggagcuggacaaguacuucaagaaccacaccagcccagacguggaccugggcgacaucagcggcaucaacgccagcguggugaacauccagaaggagaucgaccggcugaacgagguggccaagaaccugaacgagagccugaucgaccugcaggagcugggcaaguacgagcaguacaucaaguggcccugguacaucuggcugggcuucaucgccggccugaucgccaucgugauggugaccaucaugcugugcugcaugaccagcugcuguagcugccugaagggcugcugcagcugcggcagcugcugcaaguucgacgaggacgacagcgagcccgugcugaagggcgugaagcugcacuacaccugauaauaggcuggagccucgguggccuagcuucuugccccuugggccuccccccagccccuccuccccuuccugcacccguacccccguggucuuugaauaaagucugagugggcggcaaaaaaaaaaaaaaaaaaaaaaaaaaaaaaaaaaaaaaaaaaaaaaaaaaaaaaaaaaaaaaaaaaaaaaaaaaaaaaaaaaaaaaaaaaaaaaaaaaaa

SEQ ID NO: 26213 - RNA, 4095 nt, Artificial Sequence
  SARS-CoV-2/Wuhan/WIV05/2019__EPI_ISL_402128 spike protein mRNA gc (1-1273)(K986P_V987P_A222V_D614G)
gggaaauaagagagaaaagaagaguaagaagaaauauaagaccccggcgccgccaccauguucguguuccuggugcugcugccccuggugagcagccagugcgugaaccugaccacccggacccagcugcccccugccuacaccaacagcuucacccggggcguguacuaccccgacaagguguuccggagcagcgugcugcacagcacccaggaccuguuccugcccuucuucagcaacgugaccugguuccacgccauccacgugagcggcaccaacggcaccaagcgguucgacaacccagugcugcccuucaacgacggcguguacuucgccagcaccgagaagucaaacaucauccggggcuggaucuucggcaccacccuggacagcaagacacagagccugcugaucgugaacaacgccaccaacguggugaucaaggugugcgaguuucaguucugcaacgaccccuuccugggcguguacuaccacaagaacaacaagagcuggauggagagcgaguuccgggucuacagcagcgcuaacaauugcaccuucgaguacgugagccagcccuuccugauggaccucgagggcaagcagggcaacuucaagaaccugcgggaguucguguucaagaacaucgauggcuacuucaagaucuacagcaagcacacccccaucaaccuggugcgggaccugccccagggauucagcgugcuggagccucugguggaccugcccaucggcaucaacaucaccagguuccagacccugcuggcccugcaccggagcuaccugacccccggcgacagcagcagcggcuggaccgccggcgccgccgccuacuacgugggcuaccugcagccacggaccuuccugcugaaguacaacgagaacggcaccaucaccgacgcaguggacugcgcccuggacccccugagcgagaccaagugcacccuaaagagcuucaccguggagaagggcaucuaccagaccagcaacuuccgggugcagcccacugagagcaucgugcgguuccccaacauuaccaaccugugucccuucggcgagguguucaacgccacccgguucgccagcguguacgccuggaaccggaagcggaucagcaacugcguggccgacuacagcgugcuguacaacagcgccagcuucagcaccuucaagugcuacggcgugagcccuaccaagcugaacgaccugugcuucaccaacguguacgccgacagcuucgugauccggggcgacgaggugcggcagaucgcucccggccagaccggcaagaucgccgacuacaacuacaagcugcccgacgacuucaccggcugcgugaucgccuggaacagcaacaaccuggacagcaaggugggcggcaacuacaacuaccuguaccggcuguuccguaagagcaaccugaagccauucgagcgggacaucagcaccgagaucuaccaggccggcagcacccccugcaacgguguggagggcuuuaacugcuacuucccccugcagagcuacggcuuccagcccaccaacggcgugggcuaccagcccuaccgggugguggugcugagcuucgagcugcugcacgcccccgccaccgugugcggcccuaaaaagagcaccaaccuggugaagaacaagugcgugaacuucaauuucaacggccugaccggcaccggcgugcugaccgagagcaacaagaaguuccugcccuuccagcaguucggccgggauaucgccgacaccaccgacgccgugcgggacccccagacccuggagauccuggacaucaccccaugcagcuucggcggcgucagcgugaucacccccggcacaaacaccagcaaccagguggcagugcuguaccagggagugaacugcaccgaggugcccguggccauccacgccgaccagcugacccccaccuggcggguguacagcaccggcagcaacguguuccagacccgggccggcugccugaucggcgccgagcacgugaacaacuccuacgagugcgacauccccaucggcgccggcaucugcgcuagcuaccagacccagaccaacagcccccggcgggcccggagcguggccagccagagcaucaucgccuacaccaugagcuuaggcgccgagaacagcguggccuacagcaacaacagcaucgccaucccuaccaacuucaccaucagcgugaccaccgagauacugcccgugagcaugaccaagaccagcguggacuguaccauguacaucugcggcgacagcaccgagugcagcaaccugcugcugcaguacggcagcuucugcacccagcugaaccgggcgcugaccggcaucgccguggagcaggacaagaacacccaagagguguucgcccaggugaagcagaucuacaagacucccccaaucaaggacuucggcggcuucaacuucagccagauccugcccgaccccagcaagcccagcaagcggagcuucaucgaggaccugcuguucaacaaggugacccuggccgacgccggcuucaucaagcaguacggcgacugccugggggauaucgccgcccgggaccugaucugcgcucagaaguucaacggccugaccgugcugcccccucugcugaccgacgagaugaucgcccaguacaccagcgcccugcuugccggcaccaucaccagcggcuggaccuucggcgccggcgccgcacugcagauccccuucgccaugcagauggccuaccgguucaacggcaucggcgugacccagaacgugcuguacgagaaccagaagcugaucgccaaccaguucaacagcgccaucggcaagauccaggacagccugagcagcaccgccagcgcccugggcaagcugcaggacguggugaaccagaacgcccaggcucugaacacccuggugaagcagcugagcagcaacuucggcgccaucagcucagugcugaaugacauccugagcaggcuggaucccccagaggccgaggugcagaucgaccggcugaucaccggccggcugcagagccugcagaccuacgugacccagcagcugauccgggccgccgagauccgggccagcgccaaccuggccgcaaccaagaugagcgagugcgugcugggccagagcaagcggguggacuuuugcggcaagggcuaccaccugaugagcuucccccagagcgcuccccacggcgugguguuccuccacgucacauacgugcccgcccaggagaagaacuucaccaccgcccccgccauuugccacgacggcaaggcccacuucccccgggagggaguguucgugagcaacggcacccacugguucgugacccagcggaacuucuacgagccucagaucaucaccaccgacaacaccuucgugagcggcaacugcgacguggugaucggcaucgugaacaacaccguguacgacccccugcagcccgagcuggacagcuucaaggaggagcuggacaaguacuucaagaaccacaccagcccagacguggaccugggcgacaucagcggcaucaacgccagcguggugaacauccagaaggagaucgaccggcugaacgagguggccaagaaccugaacgagagccugaucgaccugcaggagcugggcaaguacgagcaguacaucaaguggcccugguacaucuggcugggcuucaucgccggccugaucgccaucgugauggugaccaucaugcugugcugcaugaccagcugcuguagcugccugaagggcugcugcagcugcggcagcugcugcaaguucgacgaggacgacagcgagcccgugcugaagggcgugaagcugcacuacaccugauaauaggcuggagccucgguggccuagcuucuugccccuugggccuccccccagccccuccuccccuuccugcacccguacccccguggucuuugaauaaagucugagugggcggcaaaaaaaaaaaaaaaaaaaaaaaaaaaaaaaaaaaaaaaaaaaaaaaaaaaaaaaaaaaaaaaaaaaaaaaaaaaaaaaaaaaaaaaaaaaaaaaaaaaa

SEQ ID NO: 26214 - RNA, 4095 nt, Artificial Sequence
  SARS-CoV-2/Wuhan/WIV05/2019__EPI_ISL_402128 spike protein mRNA gc (1-1273)(K986P_V987P_N439K_D614G)
gggaaauaagagagaaaagaagaguaagaagaaauauaagaccccggcgccgccaccauguucguguuccuggugcugcugccccuggugagcagccagugcgugaaccugaccacccggacccagcugcccccugccuacaccaacagcuucacccggggcguguacuaccccgacaagguguuccggagcagcgugcugcacagcacccaggaccuguuccugcccuucuucagcaacgugaccugguuccacgccauccacgugagcggcaccaacggcaccaagcgguucgacaacccagugcugcccuucaacgacggcguguacuucgccagcaccgagaagucaaacaucauccggggcuggaucuucggcaccacccuggacagcaagacacagagccugcugaucgugaacaacgccaccaacguggugaucaaggugugcgaguuucaguucugcaacgaccccuuccugggcguguacuaccacaagaacaacaagagcuggauggagagcgaguuccgggucuacagcagcgcuaacaauugcaccuucgaguacgugagccagcccuuccugauggaccucgagggcaagcagggcaacuucaagaaccugcgggaguucguguucaagaacaucgauggcuacuucaagaucuacagcaagcacacccccaucaaccuggugcgggaccugccccagggauucagcgcccuggagccucugguggaccugcccaucggcaucaacaucaccagguuccagacccugcuggcccugcaccggagcuaccugacccccggcgacagcagcagcggcuggaccgccggcgccgccgcauacuacgugggcuaccugcagccacggaccuuccugcugaaguacaacgagaacggcaccaucaccgacgccguggacugcgcccuggacccccugagcgagaccaagugcacccuaaagagcuucaccguggagaagggcaucuaccagaccagcaacuuccgggugcagcccacugagagcaucgugcgguuccccaacauuaccaaccugugucccuucggcgagguguucaacgccacccgguucgccagcguguacgccuggaaccggaagcggaucagcaacugcguggccgacuacagcgugcuguacaacagcgccagcuucagcaccuucaagugcuacggcgugagcccuaccaagcugaacgaccugugcuucaccaacguguacgcugacagcuucgugauccggggcgacgaggugcggcagaucgcccccggccagaccggcaagaucgccgacuacaacuacaagcugcccgacgacuucaccggcugcgugaucgccuggaacagcaagaaccuggacagcaaggugggcggcaacuacaacuaccuguaccggcuguuccguaagagcaaccugaagccauucgagcgggacaucagcaccgagaucuaccaggccggcagcacccccugcaacgguguggagggcuuuaacugcuacuucccccugcagagcuacggcuuccagcccaccaacggcgugggcuaccagcccuaccgggugguggugcugagcuucgagcugcugcacgcccccgccaccgugugcggcccuaaaaagagcaccaaccuggugaagaacaagugcgugaacuucaacuucaauggccugaccggcaccggcgugcugaccgagagcaacaagaaguuccugcccuuccagcaguucggccgggauaucgccgacaccaccgacgcagugcgggacccccagacccuggagauccuggacaucaccccaugcagcuucggcggcgugagcgucaucacccccggcacaaacaccagcaaccagguggccgugcuguaccagggagugaacugcaccgaggugcccguggccauccacgccgaccagcugacccccaccuggcggguguacagcaccggcagcaacguguuccagacccgggccggcugccugaucggcgccgagcacgugaacaacuccuacgagugcgacauccccaucggcgcuggcaucugcgccagcuaccagacccagaccaacagcccccggcgggcccggagcguggccagccagagcaucaucgccuacaccaugagcuuaggcgccgagaacagcguggccuacagcaacaacagcaucgcgaucccuaccaacuucaccaucagcgugaccaccgagauacugcccgugagcaugaccaagaccagcguggacuguaccauguacaucugcggcgacagcaccgagugcagcaaccugcugcugcaguacggcagcuucugcacccagcugaaccgggcccugaccggcaucgccguggagcaggacaagaacacccaagagguguucgcccaggugaagcagaucuacaagacucccccaaucaaggacuucggcggcuucaacuucagccagauccugcccgaccccagcaagcccagcaagcggagcuucaucgaggaccugcuguucaacaaggugacccuggccgacgccggcuucaucaagcaguacggcgacugccugggggauaucgccgcucgggaccugaucugcgcccagaaguucaacggccugaccgugcugcccccucugcugaccgacgagaugaucgcccaguacaccagcgcccugcuugccggcaccaucaccagcggcuggaccuucggcgccggcgcagcccugcagauccccuucgccaugcagauggccuaccgguucaacggcaucggcgugacccagaacgugcuguacgagaaccagaagcugaucgccaaccaguucaacagcgccaucggcaagauccaggacagccugagcagcaccgccagcgcccugggcaagcugcaggacguggugaaccagaacgcucaggcccugaacacccuggugaagcagcugagcagcaacuucggcgccaucagcucagugcugaacgacauccugagcaggcuggaucccccagaggccgaggugcagaucgaccggcugaucaccggccggcugcagagccugcagaccuacgugacccagcagcugauccgggccgccgagauccgggccagcgccaaucuggcagccaccaagaugagcgagugcgugcugggccagagcaagcggguggacuuuugcggcaagggcuaccaccugaugagcuucccccagagcgcuccccacggcgugguguuccuccacgugacauacguccccgcccaggagaagaacuucaccaccgcccccgccauuugccacgacggcaaggcccacuucccccgggagggaguguucgugagcaacggcacccacugguucgugacccagcggaacuucuacgagccucagaucaucaccaccgacaacaccuucgugagcggcaacugcgacguggugaucggcaucgugaacaacaccguguacgacccccugcagcccgagcuggacagcuucaaggaggagcuggacaaguacuucaagaaccacaccagcccagacguggaccugggcgacaucagcggcaucaacgccagcguggugaacauccagaaggagaucgaccggcugaacgagguggccaagaaccugaacgagagccugaucgaccugcaggagcugggcaaguacgagcaguacaucaaguggcccugguacaucuggcugggcuucaucgccggccugaucgccaucgugauggugaccaucaugcugugcugcaugaccagcugcuguagcugccugaagggcugcugcagcugcggcagcugcugcaaguucgacgaggacgacagcgagcccgugcugaagggcgugaagcugcacuacaccugauaauaggcuggagccucgguggccuagcuucuugccccuugggccuccccccagccccuccuccccuuccugcacccguacccccguggucuuugaauaaagucugagugggcggcaaaaaaaaaaaaaaaaaaaaaaaaaaaaaaaaaaaaaaaaaaaaaaaaaaaaaaaaaaaaaaaaaaaaaaaaaaaaaaaaaaaaaaaaaaaaaaaaaaaa

SEQ ID NO: 26215 - RNA, 4095 nt, Artificial Sequence
  SARS-CoV-2/Wuhan/WIV05/2019__EPI_ISL_402128 spike protein mRNA gc (1-1273)(K986P_V987P_S477N_D614G)
gggaaauaagagagaaaagaagaguaagaagaaauauaagaccccggcgccgccaccauguucguguuccuggugcugcugccccuggugagcagccagugcgugaaccugaccacccggacccagcugcccccugccuacaccaacagcuucacccggggcguguacuaccccgacaagguguuccggagcagcgugcugcacagcacccaggaccuguuccugcccuucuucagcaacgugaccugguuccacgccauccacgugagcggcaccaacggcaccaagcgguucgacaacccagugcugcccuucaacgacggcguguacuucgccagcaccgagaagucaaacaucauccggggcuggaucuucggcaccacccuggacagcaagacacagagccugcugaucgugaacaacgccaccaacguggugaucaaggugugcgaguuucaguucugcaacgaccccuuccugggcguguacuaccacaagaacaacaagagcuggauggagagcgaguuccgggucuacagcagcgcuaacaauugcaccuucgaguacgugagccagcccuuccugauggaccucgagggcaagcagggcaacuucaagaaccugcgggaguucguguucaagaacaucgauggcuacuucaagaucuacagcaagcacacccccaucaaccuggugcgggaccugccccagggauucagcgcccuggagccucugguggaccugcccaucggcaucaacaucaccagguuccagacccugcuggcccugcaccggagcuaccugacccccggcgacagcagcagcggcuggaccgccggcgccgccgcauacuacgugggcuaccugcagccacggaccuuccugcugaaguacaacgagaacggcaccaucaccgacgccguggacugcgcccuggacccccugagcgagaccaagugcacccuaaagagcuucaccguggagaagggcaucuaccagaccagcaacuuccgggugcagcccacugagagcaucgugcgguuccccaacauuaccaaccugugucccuucggcgagguguucaacgccacccgguucgccagcguguacgccuggaaccggaagcggaucagcaacugcguggccgacuacagcgugcuguacaacagcgccagcuucagcaccuucaagugcuacggcgugagcccuaccaagcugaacgaccugugcuucaccaacguguacgcugacagcuucgugauccggggcgacgaggugcggcagaucgcccccggccagaccggcaagaucgccgacuacaacuacaagcugcccgacgacuucaccggcugcgugaucgccuggaacagcaacaaccuggacagcaaggugggcggcaacuacaacuaccuguaccggcuguuccguaagagcaaccugaagccauucgagcgggacaucagcaccgagaucuaccaggccggcaacacccccugcaacgguguggagggcuuuaacugcuacuucccccugcagagcuacggcuuccagcccaccaacggcgugggcuaccagcccuaccgggugguggugcugagcuucgagcugcugcacgcccccgccaccgugugcggcccuaaaaagagcaccaaccuggugaagaacaagugcgugaauuucaacuucaacggccugaccggcaccggcgugcugaccgagagcaacaagaaguuccugcccuuccagcaguucggccgggauaucgccgacaccaccgacgcagugcgggacccccagacccuggagauccuggacaucaccccaugcagcuucggcggcgugagcgucaucacccccggcacaaacaccagcaaccagguggccgugcuguaccagggagugaacugcaccgaggugcccguggccauccacgccgaccagcugacccccaccuggcggguguacagcaccggcagcaacguguuccagacccgggccggcugccugaucggcgccgagcacgugaacaacagcuacgagugcgacauccccaucggcgcuggcaucugcgccuccuaccagacccagaccaacagcccccggcgggcccggagcguggccagccagagcaucaucgccuacaccaugagcuuaggcgccgagaacagcguggccuacagcaacaacagcaucgcgaucccuaccaacuucaccaucagcgugaccaccgagauacugcccgugagcaugaccaagaccagcguggacuguaccauguacaucugcggcgacagcaccgagugcagcaaccugcugcugcaguacggcagcuucugcacccagcugaaccgggcccugaccggcaucgccguggagcaggacaagaacacccaagagguguucgcccaggugaagcagaucuacaagacucccccaaucaaggacuucggcggcuucaacuucagccagauccugcccgaccccagcaagcccagcaagcggagcuucaucgaggaccugcuguucaacaaggugacccuggccgacgccggcuucaucaagcaguacggcgacugccugggggauaucgccgcucgggaccugaucugcgcccagaaguucaacggccugaccgugcugcccccucugcugaccgacgagaugaucgcccaguacaccagcgcccugcuugccggcaccaucaccagcggcuggaccuucggcgccggcgcagcccugcagauccccuucgccaugcagauggccuaccgguucaacggcaucggcgugacccagaacgugcuguacgagaaccagaagcugaucgccaaccaguucaacagcgccaucggcaagauccaggacagccugagcagcaccgccagcgcccugggcaagcugcaggacguggugaaccagaacgcucaggcccugaacacccuggugaagcagcugagcagcaauuucggcgccaucagcagcgugcugaacgacauccugucaaggcuggaucccccagaggccgaggugcagaucgaccggcugaucaccggccggcugcagagccugcagaccuacgugacccagcagcugauccgggccgccgagauccgggccagcgccaaccuggcagccaccaagaugagcgagugcgugcugggccagagcaagcggguggacuuuugcggcaagggcuaccaccugaugagcuucccccagagcgcuccccacggcgugguguuccuccacgugacauacguccccgcccaggagaagaacuucaccaccgcccccgccauuugccacgacggcaaggcccacuucccccgggagggaguguucgugagcaacggcacccacugguucgugacccagcggaacuucuacgagccucagaucaucaccaccgacaacaccuucgugagcggcaacugcgacguggugaucggcaucgugaacaacaccguguacgacccccugcagcccgagcuggacagcuucaaggaggagcuggacaaguacuucaagaaccacaccagcccagacguggaccugggcgacaucagcggcaucaacgccagcguggugaacauccagaaggagaucgaccggcugaacgagguggccaagaaccugaacgagagccugaucgaccugcaggagcugggcaaguacgagcaguacaucaaguggcccugguacaucuggcugggcuucaucgccggccugaucgccaucgugauggugaccaucaugcugugcugcaugaccagcugcuguagcugccugaagggcugcugcagcugcggcagcugcugcaaguucgacgaggacgacagcgagcccgugcugaagggcgugaagcugcacuacaccugauaauaggcuggagccucgguggccuagcuucuugccccuugggccuccccccagccccuccuccccuuccugcacccguacccccguggucuuugaauaaagucugagugggcggcaaaaaaaaaaaaaaaaaaaaaaaaaaaaaaaaaaaaaaaaaaaaaaaaaaaaaaaaaaaaaaaaaaaaaaaaaaaaaaaaaaaaaaaaaaaaaaaaaaaa

SEQ ID NO: 26216 - RNA, 4095 nt, Artificial Sequence
  SARS-CoV-2/Wuhan/WIV05/2019__EPI_ISL_402128 spike protein mRNA gc (1-1273)(K986P_V987P_N501Y_D614G)
gggaaauaagagagaaaagaagaguaagaagaaauauaagaccccggcgccgccaccauguucguguuccuggugcugcugccccuggugagcagccagugcgugaaccugaccacccggacccagcugcccccugccuacaccaacagcuucacccggggcguguacuaccccgacaagguguuccggagcagcgugcugcacagcacccaggaccuguuccugcccuucuucagcaacgugaccugguuccacgccauccacgugagcggcaccaacggcaccaagcgguucgacaacccagugcugcccuucaacgacggcguguacuucgccagcaccgagaagucaaacaucauccggggcuggaucuucggcaccacccuggacagcaagacacagagccugcugaucgugaacaacgccaccaacguggugaucaaggugugcgaguuucaguucugcaacgaccccuuccugggcguguacuaccacaagaacaacaagagcuggauggagagcgaguuccgggucuacagcagcgcuaacaauugcaccuucgaguacgugagccagcccuuccugauggaccucgagggcaagcagggcaacuucaagaaccugcgggaguucguguucaagaacaucgauggcuacuucaagaucuacagcaagcacacccccaucaaccuggugcgggaccugccccagggauucagcgcccuggagccucugguggaccugcccaucggcaucaacaucaccagguuccagacccugcuggcccugcaccggagcuaccugacccccggcgacagcagcagcggcuggaccgccggcgccgccgcauacuacgugggcuaccugcagccacggaccuuccugcugaaguacaacgagaacggcaccaucaccgacgccguggacugcgcccuggacccccugagcgagaccaagugcacccuaaagagcuucaccguggagaagggcaucuaccagaccagcaacuuccgggugcagcccacugagagcaucgugcgguuccccaacauuaccaaccugugucccuucggcgagguguucaacgccacccgguucgccagcguguacgccuggaaccggaagcggaucagcaacugcguggccgacuacagcgugcuguacaacagcgccagcuucagcaccuucaagugcuacggcgugagcccuaccaagcugaacgaccugugcuucaccaacguguacgcugacagcuucgugauccggggcgacgaggugcggcagaucgcccccggccagaccggcaagaucgccgacuacaacuacaagcugcccgacgacuucaccggcugcgugaucgccuggaacagcaacaaccuggacagcaaggugggcggcaacuacaacuaccuguaccggcuguuccguaagagcaaccugaagccauucgagcgggacaucagcaccgagaucuaccaggccggcagcacccccugcaacgguguggagggcuuuaacugcuacuucccccugcagagcuacggcuuccagcccaccuacggcgugggcuaccagcccuaccgggugguggugcugagcuucgagcugcugcacgcccccgccaccgugugcggcccuaaaaagagcaccaaccuggugaagaacaagugcgugaacuucaacuucaauggccugaccggcaccggcgugcugaccgagagcaacaagaaguuccugcccuuccagcaguucggccgggauaucgccgacaccaccgacgcagugcgggacccccagacccuggagauccuggacaucaccccaugcagcuucggcggcgugagcgucaucacccccggcacaaacaccagcaaccagguggccgugcuguaccagggagugaacugcaccgaggugcccguggccauccacgccgaccagcugacccccaccuggcggguguacagcaccggcagcaacguguuccagacccgggccggcugccugaucggcgccgagcacgugaacaacuccuacgagugcgacauccccaucggcgcuggcaucugcgccagcuaccagacccagaccaacagcccccggcgggcccggagcguggccagccagagcaucaucgccuacaccaugagcuuaggcgccgagaacagcguggccuacagcaacaacagcaucgcgaucccuaccaacuucaccaucagcgugaccaccgagauacugcccgugagcaugaccaagaccagcguggacuguaccauguacaucugcggcgacagcaccgagugcagcaaccugcugcugcaguacggcagcuucugcacccagcugaaccgggcccugaccggcaucgccguggagcaggacaagaacacccaagagguguucgcccaggugaagcagaucuacaagacucccccaaucaaggacuucggcggcuucaacuucagccagauccugcccgaccccagcaagcccagcaagcggagcuucaucgaggaccugcuguucaacaaggugacccuggccgacgccggcuucaucaagcaguacggcgacugccugggggauaucgccgcucgggaccugaucugcgcccagaaguucaacggccugaccgugcugcccccucugcugaccgacgagaugaucgcccaguacaccagcgcccugcuugccggcaccaucaccagcggcuggaccuucggcgccggcgcagcccugcagauccccuucgccaugcagauggccuaccgguucaacggcaucggcgugacccagaacgugcuguacgagaaccagaagcugaucgccaaccaguucaacagcgccaucggcaagauccaggacagccugagcagcaccgccagcgcccugggcaagcugcaggacguggugaaccagaacgcucaggcccugaacacccuggugaagcagcugagcagcaacuucggcgccaucagcucagugcugaacgacauccugagcaggcuggaucccccagaggccgaggugcagaucgaccggcugaucaccggccggcugcagagccugcagaccuacgugacccagcagcugauccgggccgccgagauccgggccagcgccaaucuggcagccaccaagaugagcgagugcgugcugggccagagcaagcggguggacuuuugcggcaagggcuaccaccugaugagcuucccccagagcgcuccccacggcgugguguuccuccacgugacauacguccccgcccaggagaagaacuucaccaccgcccccgccauuugccacgacggcaaggcccacuucccccgggagggaguguucgugagcaacggcacccacugguucgugacccagcggaacuucuacgagccucagaucaucaccaccgacaacaccuucgugagcggcaacugcgacguggugaucggcaucgugaacaacaccguguacgacccccugcagcccgagcuggacagcuucaaggaggagcuggacaaguacuucaagaaccacaccagcccagacguggaccugggcgacaucagcggcaucaacgccagcguggugaacauccagaaggagaucgaccggcugaacgagguggccaagaaccugaacgagagccugaucgaccugcaggagcugggcaaguacgagcaguacaucaaguggcccugguacaucuggcugggcuucaucgccggccugaucgccaucgugauggugaccaucaugcugugcugcaugaccagcugcuguagcugccugaagggcugcugcagcugcggcagcugcugcaaguucgacgaggacgacagcgagcccgugcugaagggcgugaagcugcacuacaccugauaauaggcuggagccucgguggccuagcuucuugccccuugggccuccccccagccccuccuccccuuccugcacccguacccccguggucuuugaauaaagucugagugggcggcaaaaaaaaaaaaaaaaaaaaaaaaaaaaaaaaaaaaaaaaaaaaaaaaaaaaaaaaaaaaaaaaaaaaaaaaaaaaaaaaaaaaaaaaaaaaaaaaaaaa

SEQ ID NO: 26217 - RNA, 4089 nt, Artificial Sequence
  SARS-CoV-2/Wuhan/WIV05/2019__EPI_ISL_402128 spike protein mRNA gc (1-1273)(K986P_V987P_H69del_V70del_D614G)
gggaaauaagagagaaaagaagaguaagaagaaauauaagaccccggcgccgccaccauguucguguuccuggugcugcugccccuggugagcagccagugcgugaaccugaccacccggacccagcugcccccugccuacaccaacagcuucacccggggcguguacuaccccgacaagguguuccggagcagcgugcugcacagcacccaggaccuguuccugcccuucuucagcaacgugaccugguuccacgccaucagcggcaccaacggcaccaagcgguucgacaacccagugcugcccuucaacgacggcguguacuucgccagcaccgagaagucaaacaucauccggggcuggaucuucggcaccacccuggacagcaagacacagagccugcugaucgugaacaacgccaccaacguggugaucaaggugugcgaguuucaguucugcaacgaccccuuccugggcguguacuaccacaagaacaacaagagcuggauggagagcgaguuccggguguacagcagcgcuaacaauugcaccuucgaguacgucagccagcccuuccugauggaccucgagggcaagcagggcaacuucaagaaccugcgggaguucguguucaagaacaucgauggcuacuucaagaucuacagcaagcacacccccaucaaccuggugcgggaccugccccagggauucagcgcccuggagccucugguggaccugcccaucggcaucaacaucaccagguuccagacccugcuggcccugcaccggagcuaccugacccccggcgacagcagcagcggcuggaccgccggcgccgccgcauacuacgugggcuaccugcagccacggaccuuccugcugaaguacaacgagaacggcaccaucaccgacgccguggacugcgcccuggacccccugagcgagaccaagugcacccuaaagagcuucaccguggagaagggcaucuaccagaccagcaacuuccgggugcagcccacugagagcaucgugcgguuccccaacauuaccaaccugugucccuucggcgagguguucaacgccacccgguucgccagcguguacgccuggaaccggaagcggaucagcaacugcguggccgacuacagcgugcuguacaacagcgccagcuucagcaccuucaagugcuacggcgugagcccuaccaagcugaacgaccugugcuucaccaacguguacgcugacagcuucgugauccggggcgacgaggugcggcagaucgcccccggccagaccggcaagaucgccgacuacaacuacaagcugcccgacgacuucaccggcugcgugaucgccuggaacagcaacaaccuggacagcaaggugggcggcaacuacaacuaccuguaccggcuguuccguaagagcaaccugaagccauucgagcgggacaucagcaccgagaucuaccaggccggcagcacccccugcaacgguguggagggcuuuaacugcuacuucccccugcagagcuacggcuuccagcccaccaacggcgugggcuaccagcccuaccgggugguggugcugagcuucgagcugcugcacgcccccgccaccgugugcggcccuaaaaagagcaccaaccuggugaagaacaagugcgugaacuucaauuucaacggccugaccggcaccggcgugcugaccgagagcaacaagaaguuccugcccuuccagcaguucggccgggauaucgccgacaccaccgacgcagugcgggacccccagacccuggagauccuggacaucaccccaugcagcuucggcggcgugagcgugaucacccccggcacaaacaccagcaaccaggucgccgugcuguaccagggagugaacugcaccgaggugcccguggccauccacgccgaccagcugacccccaccuggcggguguacagcaccggcagcaacguguuccagacccgggccggcugccugaucggcgccgagcacgugaacaacuccuacgagugcgacauccccaucggcgcuggcaucugcgccagcuaccagacccagaccaacagcccccggcgggcccggagcguggccagccagagcaucaucgccuacaccaugagcuuaggcgccgagaacagcguggccuacagcaacaacagcaucgcgaucccuaccaacuucaccaucagcgugaccaccgagauacugcccgugagcaugaccaagaccagcguggacuguaccauguacaucugcggcgacagcaccgagugcagcaaccugcugcugcaguacggcagcuucugcacccagcugaaccgggcccugaccggcaucgccguggagcaggacaagaacacccaagagguguucgcccaggugaagcagaucuacaagacucccccaaucaaggacuucggcggcuucaacuucagccagauccugcccgaccccagcaagcccagcaagcggagcuucaucgaggaccugcuguucaacaaggugacccuggccgacgccggcuucaucaagcaguacggcgacugccugggggauaucgccgcucgggaccugaucugcgcccagaaguucaacggccugaccgugcugcccccucugcugaccgacgagaugaucgcccaguacaccagcgcccugcuugccggcaccaucaccagcggcuggaccuucggcgccggcgcagcccugcagauccccuucgccaugcagauggccuaccgguucaacggcaucggcgugacccagaacgugcuguacgagaaccagaagcugaucgccaaccaguucaacagcgccaucggcaagauccaggacagccugagcagcaccgccagcgcccugggcaagcugcaggacguggugaaccagaacgcucaggcccugaacacccuggugaagcagcugagcagcaacuucggcgccaucagcucagugcugaaugacauccugagcaggcuggaucccccagaggccgaggugcagaucgaccggcugaucaccggccggcugcagagccugcagaccuacgugacccagcagcugauccgggccgccgagauccgggccagcgccaaccuggcagccaccaagaugagcgagugcgugcugggccagagcaagcggguggacuuuugcggcaagggcuaccaccugaugagcuucccccagagcgcuccccacggcgugguguuccuccacgugacauacgugcccgcccaggagaagaacuucaccaccgcccccgccauuugccacgacggcaaggcccacuucccccgggagggagucuucgugagcaacggcacccacugguucgugacccagcggaacuucuacgagccucagaucaucaccaccgacaacaccuucgugagcggcaacugcgacguggugaucggcaucgugaacaacaccguguacgacccccugcagcccgagcuggacagcuucaaggaggagcuggacaaguacuucaagaaccacaccagcccagacguggaccugggcgacaucagcggcaucaacgccagcguggugaacauccagaaggagaucgaccggcugaacgagguggccaagaaccugaacgagagccugaucgaccugcaggagcugggcaaguacgagcaguacaucaaguggcccugguacaucuggcugggcuucaucgccggccugaucgccaucgugauggugaccaucaugcugugcugcaugaccagcugcuguagcugccugaagggcugcugcagcugcggcagcugcugcaaguucgacgaggacgacagcgagcccgugcugaagggcgugaagcugcacuacaccugauaauaggcuggagccucgguggccuagcuucuugccccuugggccuccccccagccccuccuccccuuccugcacccguacccccguggucuuugaauaaagucugagugggcggcaaaaaaaaaaaaaaaaaaaaaaaaaaaaaaaaaaaaaaaaaaaaaaaaaaaaaaaaaaaaaaaaaaaaaaaaaaaaaaaaaaaaaaaaaaaaaaaaaaaa

SEQ ID NO: 26218 - RNA, 4095 nt, Artificial Sequence
  SARS-CoV-2/Wuhan/WIV05/2019__EPI_ISL_402128 spike protein mRNA gc (1-1273)(K986P_V987P_Y453F_D614G)
gggaaauaagagagaaaagaagaguaagaagaaauauaagaccccggcgccgccaccauguucguguuccuggugcugcugccccuggugagcagccagugcgugaaccugaccacccggacccagcugcccccugccuacaccaacagcuucacccggggcguguacuaccccgacaagguguuccggagcagcgugcugcacagcacccaggaccuguuccugcccuucuucagcaacgugaccugguuccacgccauccacgugagcggcaccaacggcaccaagcgguucgacaacccagugcugcccuucaacgacggcguguacuucgccagcaccgagaagucaaacaucauccggggcuggaucuucggcaccacccuggacagcaagacacagagccugcugaucgugaacaacgccaccaacguggugaucaaggugugcgaguuucaguucugcaacgaccccuuccugggcguguacuaccacaagaacaacaagagcuggauggagagcgaguuccgggucuacagcagcgcuaacaauugcaccuucgaguacgugagccagcccuuccugauggaccucgagggcaagcagggcaacuucaagaaccugcgggaguucguguucaagaacaucgauggcuacuucaagaucuacagcaagcacacccccaucaaccuggugcgggaccugccccagggauucagcgcccuggagccucugguggaccugcccaucggcaucaacaucaccagguuccagacccugcuggcccugcaccggagcuaccugacccccggcgacagcagcagcggcuggaccgccggcgccgccgcauacuacgugggcuaccugcagccacggaccuuccugcugaaguacaacgagaacggcaccaucaccgacgccguggacugcgcccuggacccccugagcgagaccaagugcacccuaaagagcuucaccguggagaagggcaucuaccagaccagcaacuuccgggugcagcccacugagagcaucgugcgguuccccaacauuaccaaccugugucccuucggcgagguguucaacgccacccgguucgccagcguguacgccuggaaccggaagcggaucagcaacugcguggccgacuacagcgugcuguacaacagcgccagcuucagcaccuucaagugcuacggcgugagcccuaccaagcugaacgaccugugcuucaccaacguguacgcugacagcuucgugauccggggcgacgaggugcggcagaucgcccccggccagaccggcaagaucgccgacuacaacuacaagcugcccgacgacuucaccggcugcgugaucgccuggaacagcaacaaccuggacagcaaggugggcggcaacuacaacuaccuguuccggcuguuccguaagagcaaccugaagccauuugagcgggacaucagcaccgagaucuaccaggccggcagcacccccugcaacgguguggagggcuucaacugcuacuucccccugcagagcuacggcuuccagcccaccaacggcgugggcuaccagcccuaccgggugguggugcugagcuucgagcugcugcacgcccccgccaccgugugcggcccuaaaaagagcaccaaccuggugaagaacaagugcgugaacuucaauuucaacggccugaccggcaccggcgugcugaccgagagcaacaagaaguuccugcccuuccagcaguucggccgggauaucgccgacaccaccgacgcagugcgggacccccagacccuggagauccuggacaucaccccaugcagcuucggcggcgugagcgucaucacccccggcacaaacaccagcaaccagguggccgugcuguaccagggagugaacugcaccgaggugcccguggccauccacgccgaccagcugacccccaccuggcggguguacagcaccggcagcaacguguuccagacccgggccggcugccugaucggcgccgagcacgugaacaacuccuacgagugcgacauccccaucggcgcuggcaucugcgccagcuaccagacccagaccaacagcccccggcgggcccggagcguggccagccagagcaucaucgccuacaccaugagcuuaggcgccgagaacagcguggccuacagcaacaacagcaucgcgaucccuaccaacuucaccaucagcgugaccaccgagauacugcccgugagcaugaccaagaccagcguggacuguaccauguacaucugcggcgacagcaccgagugcagcaaccugcugcugcaguacggcagcuucugcacccagcugaaccgggcccugaccggcaucgccguggagcaggacaagaacacccaagagguguucgcccaggugaagcagaucuacaagacucccccaaucaaggacuucggcggcuucaacuucagccagauccugcccgaccccagcaagcccagcaagcggagcuucaucgaggaccugcuguucaacaaggugacccuggccgacgccggcuucaucaagcaguacggcgacugccugggggauaucgccgcucgggaccugaucugcgcccagaaguucaacggccugaccgugcugcccccucugcugaccgacgagaugaucgcccaguacaccagcgcccugcuugccggcaccaucaccagcggcuggaccuucggcgccggcgcagcccugcagauccccuucgccaugcagauggccuaccgguucaacggcaucggcgugacccagaacgugcuguacgagaaccagaagcugaucgccaaccaguucaacagcgccaucggcaagauccaggacagccugagcagcaccgccagcgcccugggcaagcugcaggacguggugaaccagaacgcucaggcccugaacacccuggugaagcagcugagcagcaacuuuggcgccaucagcucagugcugaaugacauccugagcaggcuggaucccccagaggccgaggugcagaucgaccggcugaucaccggccggcugcagagccugcagaccuacgugacccagcagcugauccgggccgccgagauccgggccagcgccaaccuggcagccaccaagaugagcgagugcgugcugggccagagcaagcggguggacuucugcggcaagggcuaccaccugaugagcuucccccagagcgcuccccacggcgugguguuccuccacgugacauacguccccgcccaggagaagaacuucaccaccgcccccgccauuugccacgacggcaaggcccacuucccccgggagggaguguucgugagcaacggcacccacugguucgugacccagcggaacuucuacgagccucagaucaucaccaccgacaacaccuucgugagcggcaacugcgacguggugaucggcaucgugaacaacaccguguacgacccccugcagcccgagcuggacagcuucaaggaggagcuggacaaguacuucaagaaccacaccagcccagacguggaccugggcgacaucagcggcaucaacgccagcguggugaacauccagaaggagaucgaccggcugaacgagguggccaagaaccugaacgagagccugaucgaccugcaggagcugggcaaguacgagcaguacaucaaguggcccugguacaucuggcugggcuucaucgccggccugaucgccaucgugauggugaccaucaugcugugcugcaugaccagcugcuguagcugccugaagggcugcugcagcugcggcagcugcugcaaguucgacgaggacgacagcgagcccgugcugaagggcgugaagcugcacuacaccugauaauaggcuggagccucgguggccuagcuucuugccccuugggccuccccccagccccuccuccccuuccugcacccguacccccguggucuuugaauaaagucugagugggcggcaaaaaaaaaaaaaaaaaaaaaaaaaaaaaaaaaaaaaaaaaaaaaaaaaaaaaaaaaaaaaaaaaaaaaaaaaaaaaaaaaaaaaaaaaaaaaaaaaaaa

SEQ ID NO: 26219 - RNA, 4095 nt, Artificial Sequence
  SARS-CoV-2/Wuhan/WIV05/2019__EPI_ISL_402128 spike protein mRNA gc (1-1273)(K986P_V987P_D614G_I692V)
gggaaauaagagagaaaagaagaguaagaagaaauauaagaccccggcgccgccaccauguucguguuccuggugcugcugccccuggugagcagccagugcgugaaccugaccacccggacccagcugcccccugccuacaccaacagcuucacccggggcguguacuaccccgacaagguguuccggagcagcgugcugcacagcacccaggaccuguuccugcccuucuucagcaacgugaccugguuccacgccauccacgugagcggcaccaacggcaccaagcgguucgacaacccagugcugcccuucaacgacggcguguacuucgccagcaccgagaagucaaacaucauccggggcuggaucuucggcaccacccuggacagcaagacacagagccugcugaucgugaacaacgccaccaacguggugaucaaggugugcgaguuucaguucugcaacgaccccuuccugggcguguacuaccacaagaacaacaagagcuggauggagagcgaguuccgggucuacagcagcgcuaacaauugcaccuucgaguacgugagccagcccuuccugauggaccucgagggcaagcagggcaacuucaagaaccugcgggaguucguguucaagaacaucgauggcuacuucaagaucuacagcaagcacacccccaucaaccuggugcgggaccugccccagggauucagcgcccuggagccucugguggaccugcccaucggcaucaacaucaccagguuccagacccugcuggcccugcaccggagcuaccugacccccggcgacagcagcagcggcuggaccgccggcgccgccgcauacuacgugggcuaccugcagccacggaccuuccugcugaaguacaacgagaacggcaccaucaccgacgccguggacugcgcccuggacccccugagcgagaccaagugcacccuaaagagcuucaccguggagaagggcaucuaccagaccagcaacuuccgggugcagcccacugagagcaucgugcgguuccccaacauuaccaaccugugucccuucggcgagguguucaacgccacccgguucgccagcguguacgccuggaaccggaagcggaucagcaacugcguggccgacuacagcgugcuguacaacagcgccagcuucagcaccuucaagugcuacggcgugagcccuaccaagcugaacgaccugugcuucaccaacguguacgcugacagcuucgugauccggggcgacgaggugcggcagaucgcccccggccagaccggcaagaucgccgacuacaacuacaagcugcccgacgacuucaccggcugcgugaucgccuggaacagcaacaaccuggacagcaaggugggcggcaacuacaacuaccuguaccggcuguuccguaagagcaaccugaagccauucgagcgggacaucagcaccgagaucuaccaggccggcagcacccccugcaacgguguggagggcuuuaacugcuacuucccccugcagagcuacggcuuccagcccaccaacggcgugggcuaccagcccuaccgggugguggugcugagcuucgagcugcugcacgcccccgccaccgugugcggcccuaaaaagagcaccaaccuggugaagaacaagugcgugaacuucaauuucaacggccugaccggcaccggcgugcugaccgagagcaacaagaaguuccugcccuuccagcaguucggccgggauaucgccgacaccaccgacgcagugcgggacccccagacccuggagauccuggacaucaccccaugcagcuucggcggcgugagcgucaucacccccggcacaaacaccagcaaccagguggccgugcuguaccagggagugaacugcaccgaggugcccguggccauccacgccgaccagcugacccccaccuggcggguguacagcaccggcagcaacguguuccagacccgggccggcugccugaucggcgccgagcacgugaacaacuccuacgagugcgacauccccaucggcgcuggcaucugcgccagcuaccagacccagaccaacagcccccggcgggcccggagcguggccagccagagcgugaucgccuacaccaugagcuuaggcgccgagaacagcguggccuacagcaacaacagcaucgcgaucccuaccaacuucaccaucagcgugaccaccgagauccugcccgugagcaugaccaagaccagcguggacuguaccauguacauaugcggcgacagcaccgagugcagcaaccugcugcugcaguacggcagcuucugcacccagcugaaccgggcccugaccggcaucgccguggagcaggacaagaacacccaagagguguucgcccaggugaagcagaucuacaagacucccccaaucaaggacuucggcggcuucaacuucagccagauccugcccgaccccagcaagcccagcaagcggagcuucaucgaggaccugcuguucaacaaggugacccuggccgacgccggcuucaucaagcaguacggcgacugccugggggauaucgccgcucgggaccugaucugcgcccagaaguucaacggccugaccgugcugcccccucugcugaccgacgagaugaucgcccaguacaccagcgcccugcuugccggcaccaucaccagcggcuggaccuucggcgccggcgcagcccugcagauccccuucgccaugcagauggccuaccgguucaacggcaucggcgugacccagaacgugcuguacgagaaccagaagcugaucgccaaccaguucaacagcgccaucggcaagauccaggacagccugagcagcaccgccagcgcccugggcaagcugcaggacguggugaaccagaacgcucaggcccugaacacccuggugaagcagcugagcagcaacuucggcgccaucagcucagugcugaaugacauccugagcaggcuggaucccccagaggccgaggugcagaucgaccggcugaucaccggccggcugcagagccugcagaccuacgugacccagcagcugauccgggccgccgagauccgggccagcgccaaccuggcagccaccaagaugagcgagugcgugcugggccagagcaagcggguggacuuuugcggcaagggcuaccaccugaugagcuucccccagagcgcuccccacggcgugguguuccuccacgucacauacgugcccgcccaggagaagaacuucaccaccgcccccgccaucugccacgacggcaaggcccacuucccccgggagggaguguucgugagcaacggcacccacugguucgugacccagcggaacuucuacgagccucagauuaucaccaccgacaacaccuucgugagcggcaacugcgacguggugaucggcaucgugaacaacaccguguacgacccccugcagcccgagcuggacagcuucaaggaggagcuggacaaguacuucaagaaccacaccagcccagacguggaccugggcgacaucagcggcaucaacgccagcguggugaacauccagaaggagaucgaccggcugaacgagguggccaagaaccugaacgagagccugaucgaccugcaggagcugggcaaguacgagcaguacaucaaguggcccugguacaucuggcugggcuucaucgccggccugaucgccaucgugauggugaccaucaugcugugcugcaugaccagcugcuguagcugccugaagggcugcugcagcugcggcagcugcugcaaguucgacgaggacgacagcgagcccgugcugaagggcgugaagcugcacuacaccugauaauaggcuggagccucgguggccuagcuucuugccccuugggccuccccccagccccuccuccccuuccugcacccguacccccguggucuuugaauaaagucugagugggcggcaaaaaaaaaaaaaaaaaaaaaaaaaaaaaaaaaaaaaaaaaaaaaaaaaaaaaaaaaaaaaaaaaaaaaaaaaaaaaaaaaaaaaaaaaaaaaaaaaaaa

SEQ ID NO: 26220 - RNA, 4095 nt, Artificial Sequence
  SARS-CoV-2/Wuhan/WIV05/2019__EPI_ISL_402128 spike protein mRNA gc (1-1273)(K986P_V987P_D614G_M1229I)
gggaaauaagagagaaaagaagaguaagaagaaauauaagaccccggcgccgccaccauguucguguuccuggugcugcugccccuggugagcagccagugcgugaaccugaccacccggacccagcugcccccugccuacaccaacagcuucacccggggcguguacuaccccgacaagguguuccggagcagcgugcugcacagcacccaggaccuguuccugcccuucuucagcaacgugaccugguuccacgccauccacgugagcggcaccaacggcaccaagcgguucgacaacccagugcugcccuucaacgacggcguguacuucgccagcaccgagaagucaaacaucauccggggcuggaucuucggcaccacccuggacagcaagacacagagccugcugaucgugaacaacgccaccaacguggugaucaaggugugcgaguuucaguucugcaacgaccccuuccugggcguguacuaccacaagaacaacaagagcuggauggagagcgaguuccgggucuacagcagcgcuaacaauugcaccuucgaguacgugagccagcccuuccugauggaccucgagggcaagcagggcaacuucaagaaccugcgggaguucguguucaagaacaucgauggcuacuucaagaucuacagcaagcacacccccaucaaccuggugcgggaccugccccagggauucagcgcccuggagccucugguggaccugcccaucggcaucaacaucaccagguuccagacccugcuggcccugcaccggagcuaccugacccccggcgacagcagcagcggcuggaccgccggcgccgccgcauacuacgugggcuaccugcagccacggaccuuccugcugaaguacaacgagaacggcaccaucaccgacgccguggacugcgcccuggacccccugagcgagaccaagugcacccuaaagagcuucaccguggagaagggcaucuaccagaccagcaacuuccgggugcagcccacugagagcaucgugcgguuccccaacauuaccaaccugugucccuucggcgagguguucaacgccacccgguucgccagcguguacgccuggaaccggaagcggaucagcaacugcguggccgacuacagcgugcuguacaacagcgccagcuucagcaccuucaagugcuacggcgugagcccuaccaagcugaacgaccugugcuucaccaacguguacgcugacagcuucgugauccggggcgacgaggugcggcagaucgcccccggccagaccggcaagaucgccgacuacaacuacaagcugcccgacgacuucaccggcugcgugaucgccuggaacagcaacaaccuggacagcaaggugggcggcaacuacaacuaccuguaccggcuguuccguaagagcaaccugaagccauucgagcgggacaucagcaccgagaucuaccaggccggcagcacccccugcaacgguguggagggcuuuaacugcuacuucccccugcagagcuacggcuuccagcccaccaacggcgugggcuaccagcccuaccgggugguggugcugagcuucgagcugcugcacgcccccgccaccgugugcggcccuaaaaagagcaccaaccuggugaagaacaagugcgugaacuucaauuucaacggccugaccggcaccggcgugcugaccgagagcaacaagaaguuccugcccuuccagcaguucggccgggauaucgccgacaccaccgacgcagugcgggacccccagacccuggagauccuggacaucaccccaugcagcuucggcggcgugagcgucaucacccccggcacaaacaccagcaaccagguggccgugcuguaccagggagugaacugcaccgaggugcccguggccauccacgccgaccagcugacccccaccuggcggguguacagcaccggcagcaacguguuccagacccgggccggcugccugaucggcgccgagcacgugaacaacuccuacgagugcgacauccccaucggcgcuggcaucugcgccagcuaccagacccagaccaacagcccccggcgggcccggagcguggccagccagagcaucaucgccuacaccaugagcuuaggcgccgagaacagcguggccuacagcaacaacagcaucgcgaucccuaccaacuucaccaucagcgugaccaccgagauacugcccgugagcaugaccaagaccagcguggacuguaccauguacaucugcggcgacagcaccgagugcagcaaccugcugcugcaguacggcagcuucugcacccagcugaaccgggcccugaccggcaucgccguggagcaggacaagaacacccaagagguguucgcccaggugaagcagaucuacaagacucccccaaucaaggacuucggcggcuucaacuucagccagauccugcccgaccccagcaagcccagcaagcggagcuucaucgaggaccugcuguucaacaaggugacccuggccgacgccggcuucaucaagcaguacggcgacugccugggggauaucgccgcucgggaccugaucugcgcccagaaguucaacggccugaccgugcugcccccucugcugaccgacgagaugaucgcccaguacaccagcgcccugcuugccggcaccaucaccagcggcuggaccuucggcgccggcgcagcccugcagauccccuucgccaugcagauggccuaccgguucaacggcaucggcgugacccagaacgugcuguacgagaaccagaagcugaucgccaaccaguucaacagcgccaucggcaagauccaggacagccugagcagcaccgccagcgcccugggcaagcugcaggacguggugaaccagaacgcucaggcccugaacacccuggugaagcagcugagcagcaacuucggcgccaucagcucagugcugaaugacauccugagcaggcuggaucccccagaggccgaggugcagaucgaccggcugaucaccggccggcugcagagccugcagaccuacgugacccagcagcugauccgggccgccgagauccgggccagcgccaaccuggcagccaccaagaugagcgagugcgugcugggccagagcaagcggguggacuuuugcggcaagggcuaccaccugaugagcuucccccagagcgcuccccacggcgugguguuccuccacgugacauacguccccgcccaggagaagaacuucaccaccgcccccgccauuugccacgacggcaaggcccacuucccccgggagggaguguucgugagcaacggcacccacugguucgugacccagcggaacuucuacgagccucagaucaucaccaccgacaacaccuucgugagcggcaacugcgacguggugaucggcaucgugaacaacaccguguacgacccccugcagcccgagcuggacagcuucaaggaggagcuggacaaguacuucaagaaccacaccagcccagacguggaccugggcgacaucagcggcaucaacgccagcguggugaacauccagaaggagaucgaccggcugaacgagguggccaagaaccugaacgagagccugaucgaccugcaggagcugggcaaguacgagcaguacaucaaguggcccugguacaucuggcugggcuucaucgccggccugaucgccaucgugaucgugaccaucaugcugugcugcaugaccagcugcuguagcugccugaagggcugcugcagcugcggcagcugcugcaaguucgacgaggacgacagcgagcccgugcugaagggcgugaagcugcacuacaccugauaauaggcuggagccucgguggccuagcuucuugccccuugggccuccccccagccccuccuccccuuccugcacccguacccccguggucuuugaauaaagucugagugggcggcaaaaaaaaaaaaaaaaaaaaaaaaaaaaaaaaaaaaaaaaaaaaaaaaaaaaaaaaaaaaaaaaaaaaaaaaaaaaaaaaaaaaaaaaaaaaaaaaaaaa

SEQ ID NO: 26221 - RNA, 4089 nt, Artificial Sequence
  SARS-CoV-2/Wuhan/WIV05/2019__EPI_ISL_402128 spike protein mRNA gc (1-1273)(K986P_V987P_H69del_V70del_A222V_Y453F_S477N_D614G_I692V)
gggaaauaagagagaaaagaagaguaagaagaaauauaagaccccggcgccgccaccauguucguguuccuggugcugcugccccuggugagcagccagugcgugaaccugaccacccggacccagcugcccccugccuacaccaacagcuucacccggggcguguacuaccccgacaagguguuccggagcagcgugcugcacagcacccaggaccuguuccugcccuucuucagcaacgugaccugguuccacgccaucagcggcaccaacggcaccaagcgguucgacaacccagugcugcccuucaacgacggcguguacuucgccagcaccgagaagucaaacaucauccggggcuggaucuucggcaccacccuggacagcaagacacagagccugcugaucgugaacaacgccaccaacguggugaucaaggugugcgaguuucaguucugcaacgaccccuuccugggcguguacuaccacaagaacaacaagagcuggauggagagcgaguuccggguguacagcagcgcuaacaauugcaccuucgaguacgucagccagcccuuccugauggaccucgagggcaagcagggcaacuucaagaaccugcgggaguucguguucaagaacaucgauggcuacuucaagaucuacagcaagcacacccccaucaaccuggugcgggaccugccccagggauucagcgugcuggagccucugguggaccugcccaucggcaucaacaucaccagguuccagacccugcuggcccugcaccggagcuaccugacccccggcgacagcagcagcggcuggaccgccggcgccgccgccuacuacgugggcuaccugcagccacggaccuuccugcugaaguacaacgagaacggcaccaucaccgacgcaguggacugcgcccuggacccccugagcgagaccaagugcacccuaaagagcuucaccguggagaagggcaucuaccagaccagcaacuuccgggugcagcccacugagagcaucgugcgguuccccaacauuaccaaccugugucccuucggcgagguguucaacgccacccgguucgccagcguguacgccuggaaccggaagcggaucagcaacugcguggccgacuacagcgugcuguacaacagcgccagcuucagcaccuucaagugcuacggcgugagcccuaccaagcugaacgaccugugcuucaccaacguguacgccgacagcuucgugauccggggcgacgaggugcggcagaucgcucccggccagaccggcaagaucgccgacuacaacuacaagcugcccgacgacuucaccggcugcgugaucgccuggaacagcaacaaccuggacagcaaggugggcggcaacuacaacuaccuguuccggcuguuccguaagagcaaccugaagccauuugagcgggacaucagcaccgagaucuaccaggccggcaacacccccugcaacgguguggagggcuucaacugcuacuucccccugcagagcuacggcuuccagcccaccaacggcgugggcuaccagcccuaccgggugguggugcugagcuucgagcugcugcacgcccccgccaccgugugcggcccuaaaaagagcaccaaccuggugaagaacaagugcgugaauuucaacuucaacggccugaccggcaccggcgugcugaccgagagcaacaagaaguuccugcccuuccagcaguucggccgggauaucgccgacaccaccgacgccgugcgggacccccagacccuggagauccuggacaucaccccaugcagcuucggcggcgugagcgucaucacccccggcacaaacaccagcaaccagguggcagugcuguaccagggagugaacugcaccgaggugcccguggccauccacgccgaccagcugacccccaccuggcggguguacagcaccggcagcaacguguuccagacccgggccggcugccugaucggcgccgagcacgugaacaacagcuacgagugcgacauccccaucggcgccggcaucugcgcuuccuaccagacccagaccaacagcccccggcgggcccggagcguggccagccagagcgugaucgccuacaccaugagcuuaggcgccgagaacagcguggccuacagcaacaacagcaucgccaucccuaccaacuucaccaucagcgugaccaccgagauccugcccgugagcaugaccaagaccagcguggacuguaccauguacauaugcggcgacagcaccgagugcagcaaccugcugcugcaguacggcagcuucugcacccagcugaaccgggcgcugaccggcaucgccguggagcaggacaagaacacccaagagguguucgcccaggugaagcagaucuacaagacucccccaaucaaggacuucggcggcuucaacuucagccagauccugcccgaccccagcaagcccagcaagcggagcuucaucgaggaccugcuguucaacaaggugacccuggccgacgccggcuucaucaagcaguacggcgacugccugggggauaucgccgcccgggaccugaucugcgcucagaaguucaacggccugaccgugcugcccccucugcugaccgacgagaugaucgcccaguacaccagcgcccugcuugccggcaccaucaccagcggcuggaccuucggcgccggcgccgcacugcagauccccuucgccaugcagauggccuaccgguucaacggcaucggcgugacccagaacgugcuguacgagaaccagaagcugaucgccaaccaguucaacagcgccaucggcaagauccaggacagccugagcagcaccgccagcgcccugggcaagcugcaggacguggugaaccagaacgcccaggcucugaacacccuggugaagcagcugagcagcaauuuuggcgccaucagcagcgugcugaacgacauccugucaaggcuggaucccccagaggccgaggugcagaucgaccggcugaucaccggccggcugcagagccugcagaccuacgugacccagcagcugauccgggccgccgagauccgggccagcgccaaccuggccgcaaccaagaugagcgagugcgugcugggccagagcaagcggguggacuucugcggcaagggcuaccaccugaugagcuucccccagagcgcuccccacggcgugguguuccuccacgucacauacgugcccgcccaggagaagaacuucaccaccgcccccgccaucugccacgacggcaaggcccacuucccccgggagggaguguucgugagcaacggcacccacugguucgugacccagcggaacuucuacgagccucagauuaucaccaccgacaacaccuucgugagcggcaacugcgacguggugaucggcaucgugaacaacaccguguacgacccccugcagcccgagcuggacagcuucaaggaggagcuggacaaguacuucaagaaccacaccagcccagacguggaccugggcgacaucagcggcaucaacgccagcguggugaacauccagaaggagaucgaccggcugaacgagguggccaagaaccugaacgagagccugaucgaccugcaggagcugggcaaguacgagcaguacaucaaguggcccugguacaucuggcugggcuucaucgccggccugaucgccaucgugauggugaccaucaugcugugcugcaugaccagcugcuguagcugccugaagggcugcugcagcugcggcagcugcugcaaguucgacgaggacgacagcgagcccgugcugaagggcgugaagcugcacuacaccugauaauaggcuggagccucgguggccuagcuucuugccccuugggccuccccccagccccuccuccccuuccugcacccguacccccguggucuuugaauaaagucugagugggcggcaaaaaaaaaaaaaaaaaaaaaaaaaaaaaaaaaaaaaaaaaaaaaaaaaaaaaaaaaaaaaaaaaaaaaaaaaaaaaaaaaaaaaaaaaaaaaaaaaaaa

SEQ ID NO: 26222 - RNA, 4089 nt, Artificial Sequence
  SARS-CoV-2/Wuhan/WIV05/2019__EPI_ISL_402128 spike protein mRNA gc (1-1273)(K986P_V987P_H69del_V70del_Y453F_D614G_I692V_M1229I)
gggaaauaagagagaaaagaagaguaagaagaaauauaagaccccggcgccgccaccauguucguguuccuggugcugcugccccuggugagcagccagugcgugaaccugaccacccggacccagcugcccccugccuacaccaacagcuucacccggggcguguacuaccccgacaagguguuccggagcagcgugcugcacagcacccaggaccuguuccugcccuucuucagcaacgugaccugguuccacgccaucagcggcaccaacggcaccaagcgguucgacaacccagugcugcccuucaacgacggcguguacuucgccagcaccgagaagucaaacaucauccggggcuggaucuucggcaccacccuggacagcaagacacagagccugcugaucgugaacaacgccaccaacguggugaucaaggugugcgaguuucaguucugcaacgaccccuuccugggcguguacuaccacaagaacaacaagagcuggauggagagcgaguuccggguguacagcagcgcuaacaauugcaccuucgaguacgucagccagcccuuccugauggaccucgagggcaagcagggcaacuucaagaaccugcgggaguucguguucaagaacaucgauggcuacuucaagaucuacagcaagcacacccccaucaaccuggugcgggaccugccccagggauucagcgcccuggagccucugguggaccugcccaucggcaucaacaucaccagguuccagacccugcuggcccugcaccggagcuaccugacccccggcgacagcagcagcggcuggaccgccggcgccgccgcauacuacgugggcuaccugcagccacggaccuuccugcugaaguacaacgagaacggcaccaucaccgacgccguggacugcgcccuggacccccugagcgagaccaagugcacccuaaagagcuucaccguggagaagggcaucuaccagaccagcaacuuccgggugcagcccacugagagcaucgugcgguuccccaacauuaccaaccugugucccuucggcgagguguucaacgccacccgguucgccagcguguacgccuggaaccggaagcggaucagcaacugcguggccgacuacagcgugcuguacaacagcgccagcuucagcaccuucaagugcuacggcgugagcccuaccaagcugaacgaccugugcuucaccaacguguacgcugacagcuucgugauccggggcgacgaggugcggcagaucgcccccggccagaccggcaagaucgccgacuacaacuacaagcugcccgacgacuucaccggcugcgugaucgccuggaacagcaacaaccuggacagcaaggugggcggcaacuacaacuaccuguuccggcuguuccguaagagcaaccugaagccauuugagcgggacaucagcaccgagaucuaccaggccggcagcacccccugcaacgguguggagggcuucaacugcuacuucccccugcagagcuacggcuuccagcccaccaacggcgugggcuaccagcccuaccgggugguggugcugagcuucgagcugcugcacgcccccgccaccgugugcggcccuaaaaagagcaccaaccuggugaagaacaagugcgugaacuucaauuucaacggccugaccggcaccggcgugcugaccgagagcaacaagaaguuccugcccuuccagcaguucggccgggauaucgccgacaccaccgacgcagugcgggacccccagacccuggagauccuggacaucaccccaugcagcuucggcggcgugagcgugaucacccccggcacaaacaccagcaaccaggucgccgugcuguaccagggagugaacugcaccgaggugcccguggccauccacgccgaccagcugacccccaccuggcggguguacagcaccggcagcaacguguuccagacccgggccggcugccugaucggcgccgagcacgugaacaacuccuacgagugcgacauccccaucggcgcuggcaucugcgccagcuaccagacccagaccaacagcccccggcgggcccggagcguggccagccagagcgugaucgccuacaccaugagcuuaggcgccgagaacagcguggccuacagcaacaacagcaucgcgaucccuaccaacuucaccaucagcgugaccaccgagauccugcccgugagcaugaccaagaccagcguggacuguaccauguacauaugcggcgacagcaccgagugcagcaaccugcugcugcaguacggcagcuucugcacccagcugaaccgggcccugaccggcaucgccguggagcaggacaagaacacccaagagguguucgcccaggugaagcagaucuacaagacucccccaaucaaggacuucggcggcuucaacuucagccagauccugcccgaccccagcaagcccagcaagcggagcuucaucgaggaccugcuguucaacaaggugacccuggccgacgccggcuucaucaagcaguacggcgacugccugggggauaucgccgcucgggaccugaucugcgcccagaaguucaacggccugaccgugcugcccccucugcugaccgacgagaugaucgcccaguacaccagcgcccugcuugccggcaccaucaccagcggcuggaccuucggcgccggcgcagcccugcagauccccuucgccaugcagauggccuaccgguucaacggcaucggcgugacccagaacgugcuguacgagaaccagaagcugaucgccaaccaguucaacagcgccaucggcaagauccaggacagccugagcagcaccgccagcgcccugggcaagcugcaggacguggugaaccagaacgcucaggcccugaacacccuggugaagcagcugagcagcaacuuuggcgccaucagcucagugcugaaugacauccugagcaggcuggaucccccagaggccgaggugcagaucgaccggcugaucaccggccggcugcagagccugcagaccuacgugacccagcagcugauccgggccgccgagauccgggccagcgccaaccuggcagccaccaagaugagcgagugcgugcugggccagagcaagcggguggacuucugcggcaagggcuaccaccugaugagcuucccccagagcgcuccccacggcgugguguuccuccacgugacauacguccccgcccaggagaagaacuucaccaccgcccccgccaucugccacgacggcaaggcccacuucccccgggagggaguguucgugagcaacggcacccacugguucgugacccagcggaacuucuacgagccucagauuaucaccaccgacaacaccuucgugagcggcaacugcgacguggugaucggcaucgugaacaacaccguguacgacccccugcagcccgagcuggacagcuucaaggaggagcuggacaaguacuucaagaaccacaccagcccagacguggaccugggcgacaucagcggcaucaacgccagcguggugaacauccagaaggagaucgaccggcugaacgagguggccaagaaccugaacgagagccugaucgaccugcaggagcugggcaaguacgagcaguacaucaaguggcccugguacaucuggcugggcuucaucgccggccugaucgccaucgugaucgugaccaucaugcugugcugcaugaccagcugcuguagcugccugaagggcugcugcagcugcggcagcugcugcaaguucgacgaggacgacagcgagcccgugcugaagggcgugaagcugcacuacaccugauaauaggcuggagccucgguggccuagcuucuugccccuugggccuccccccagccccuccuccccuuccugcacccguacccccguggucuuugaauaaagucugagugggcggcaaaaaaaaaaaaaaaaaaaaaaaaaaaaaaaaaaaaaaaaaaaaaaaaaaaaaaaaaaaaaaaaaaaaaaaaaaaaaaaaaaaaaaaaaaaaaaaaaaaa

SEQ ID NO: 26223 - RNA, 4086 nt, Artificial Sequence
  SARS-CoV-2/Wuhan/WIV05/2019__EPI_ISL_402128 spike protein mRNA gc (1-1273)(K986P_V987P_K986P_V987P_H69del_V70del_Y144del_N501Y_A570 D_D614G_P681H_T716I_S982A_D1118H)
gggaaauaagagagaaaagaagaguaagaagaaauauaagaccccggcgccgccaccauguucguguuccuggugcugcugccccuggugagcagccagugcgugaaccugaccacccggacccagcugcccccugccuacaccaacagcuucacccggggcguguacuaccccgacaagguguuccggagcagcgugcugcacagcacccaggaccuguuccugcccuucuucagcaacgugaccugguuccacgccaucagcggcaccaacggcaccaagcgguucgacaacccagugcugcccuucaacgacggcguguacuucgccagcaccgagaagucaaacaucauccggggcuggaucuucggcaccacccuggacagcaagacacagagccugcugaucgugaacaacgccaccaacguggugaucaaggugugcgaguuucaguucugcaacgaccccuuccugggcguguaccacaagaacaacaagagcuggauggagagcgaguuccggguguacagcagcgcuaacaauugcaccuucgaguacgucagccagcccuuccugauggaccucgagggcaagcagggcaacuucaagaaccugcgggaguucguguucaagaacaucgauggcuacuucaagaucuacagcaagcacacccccaucaaccuggugcgggaccugccccagggauucagcgcccuggagccucugguggaccugcccaucggcaucaacaucaccagguuccagacccugcuggcccugcaccggagcuaccugacccccggcgacagcagcagcggcuggaccgccggcgccgccgcauacuacgugggcuaccugcagccacggaccuuccugcugaaguacaacgagaacggcaccaucaccgacgccguggacugcgcccuggacccccugagcgagaccaagugcacccuaaagagcuucaccguggagaagggcaucuaccagaccagcaacuuccgggugcagcccacugagagcaucgugcgguuccccaacauuaccaaccugugucccuucggcgagguguucaacgccacccgguucgccagcguguacgccuggaaccggaagcggaucagcaacugcguggccgacuacagcgugcuguacaacagcgccagcuucagcaccuucaagugcuacggcgugagcccuaccaagcugaacgaccugugcuucaccaacguguacgcugacagcuucgugauccggggcgacgaggugcggcagaucgcccccggccagaccggcaagaucgccgacuacaacuacaagcugcccgacgacuucaccggcugcgugaucgccuggaacagcaacaaccuggacagcaaggugggcggcaacuacaacuaccuguaccggcuguuccguaagagcaaccugaagccauucgagcgggacaucagcaccgagaucuaccaggccggcagcacccccugcaacgguguggagggcuuuaacugcuacuucccccugcagagcuacggcuuccagcccaccuacggcgugggcuaccagcccuaccgggugguggugcugagcuucgagcugcugcacgcccccgccaccgugugcggcccuaaaaagagcaccaaccuggugaagaacaagugcgugaacuucaacuucaauggccugaccggcaccggcgugcugaccgagagcaacaagaaguuccugcccuuccagcaguucggccgggauaucgacgacaccaccgacgccgugcgggacccccagacccuggagauccuggacaucaccccaugcagcuucggcggcgugagcgugaucacccccggcacaaacaccagcaaccaggucgcagugcuguaccagggagugaacugcaccgaggugcccguggccauccacgccgaccagcugacccccaccuggcggguguacagcaccggcagcaacguguuccagacccgggccggcugccugaucggcgccgagcacgugaacaacuccuacgagugcgacauccccaucggcgccggcaucugcgcuagcuaccagacccagaccaacagccaccggcgggcccggagcguggccagccagagcaucaucgccuacaccaugagcuuaggcgccgagaacagcguggccuacagcaacaacagcaucgccauccccaucaacuucaccauaagcgugaccaccgagauccugccugugagcaugaccaagaccagcguggacuguaccauguacaucugcggcgacagcaccgagugcagcaaccugcugcugcaguacggcagcuucugcacccagcugaaccgggcgcugaccggcaucgccguggagcaggacaagaacacccaagagguguucgcccaggugaagcagaucuacaagaccccacccaucaaggacuucggcggcuucaacuucagccagauccugcccgaccccagcaagcccagcaagcggagcuucaucgaggaccugcuguucaacaaggugacucuggccgacgccggcuucaucaagcaguacggcgauugccugggggacaucgccgcccgggaccugaucugcgcucagaaguucaacggccugaccgugcugccuccccugcugaccgacgagaugaucgcccaguacaccagcgcccugcuugccggcaccaucaccagcggcuggaccuucggcgccggcgccgcacugcagauccccuucgccaugcagauggccuaccgguucaacggcaucggcgugacccagaacgugcuguacgagaaccagaagcugaucgccaaccaguucaacagcgccaucggcaagauccaggacagccugagcagcaccgccagcgcccugggcaagcugcaggacguggugaaccagaacgcccaggcucugaacacccuggugaagcagcugagcagcaacuucggcgccaucagcucagugcugaacgacauccuggccaggcuggacccacccgaggccgaggugcagaucgaccggcugaucaccggccggcugcagagccugcagaccuacgugacccagcagcugauccgggccgccgagauucgggccagcgccaaucuggcagccaccaagaugagcgagugcgugcugggccagagcaagcggguggacuuuugcggcaagggcuaccaccugaugagcuucccccagagcgcuccccacggcgugguguuccuccacgugaccuacgugcccgcccaggagaagaacuucacaaccgcccccgccaucugccacgacggcaaggcccacuucccccgggagggagucuucgugagcaacggcacccacugguucgugacccagcggaacuucuacgagccccagaucaucaccacccacaacaccuucgugagcggcaacugcgacguggugaucggcaucgugaacaacaccguguacgacccucugcagcccgagcuggacagcuucaaggaggagcuggacaaguacuucaagaaccacaccagccccgacguggaucugggcgacaucagcggcaucaacgccagcguggugaacauccagaaggagaucgaccggcugaacgagguggccaagaaccugaacgagagccugaucgaccugcaggagcugggcaaguacgagcaguacaucaaguggccaugguacaucuggcugggcuucaucgccggccugaucgccaucgugauggugaccaucaugcugugcugcaugaccagcugcuguagcugccugaagggcugcugcagcugcggcagcugcugcaaguucgacgaggacgacagcgagcccgugcugaagggcgugaagcugcacuacaccugauaauaggcuggagccucgguggccuagcuucuugccccuugggccuccccccagccccuccuccccuuccugcacccguacccccguggucuuugaauaaagucugagugggcggcaaaaaaaaaaaaaaaaaaaaaaaaaaaaaaaaaaaaaaaaaaaaaaaaaaaaaaaaaaaaaaaaaaaaaaaaaaaaaaaaaaaaaaaaaaaaaaaaaaaa

SEQ ID NO: 26224 - RNA, 4095 nt, Artificial Sequence
  SARS-CoV-2/Wuhan/WIV05/2019__EPI_ISL_402128 spike protein mRNA gc (1-1273)(K986P_V987P_K986P_V987P_K417N_E484K_N501Y_D614G)
gggaaauaagagagaaaagaagaguaagaagaaauauaagaccccggcgccgccaccauguucguguuccuggugcugcugccccuggugagcagccagugcgugaaccugaccacccggacccagcugcccccugccuacaccaacagcuucacccggggcguguacuaccccgacaagguguuccggagcagcgugcugcacagcacccaggaccuguuccugcccuucuucagcaacgugaccugguuccacgccauccacgugagcggcaccaacggcaccaagcgguucgacaacccagugcugcccuucaacgacggcguguacuucgccagcaccgagaagucaaacaucauccggggcuggaucuucggcaccacccuggacagcaagacacagagccugcugaucgugaacaacgccaccaacguggugaucaaggugugcgaguuucaguucugcaacgaccccuuccugggcguguacuaccacaagaacaacaagagcuggauggagagcgaguuccgggucuacagcagcgcuaacaauugcaccuucgaguacgugagccagcccuuccugauggaccucgagggcaagcagggcaacuucaagaaccugcgggaguucguguucaagaacaucgauggcuacuucaagaucuacagcaagcacacccccaucaaccuggugcgggaccugccccagggauucagcgcccuggagccucugguggaccugcccaucggcaucaacaucaccagguuccagacccugcuggcccugcaccggagcuaccugacccccggcgacagcagcagcggcuggaccgccggcgccgccgcauacuacgugggcuaccugcagccacggaccuuccugcugaaguacaacgagaacggcaccaucaccgacgccguggacugcgcccuggacccccugagcgagaccaagugcacccuaaagagcuucaccguggagaagggcaucuaccagaccagcaacuuccgggugcagcccacugagagcaucgugcgguuccccaacauuaccaaccugugucccuucggcgagguguucaacgccacccgguucgccagcguguacgccuggaaccggaagcggaucagcaacugcguggccgacuacagcgugcuguacaacagcgccagcuucagcaccuucaagugcuacggcgugagcccuaccaagcugaacgaccugugcuucaccaacguguacgcugacagcuucgugauccggggcgacgaggugcggcagaucgcccccggccagaccggcaacaucgccgacuacaacuacaagcugcccgacgacuucaccggcugcgugaucgccuggaacagcaacaaccuggacagcaaggugggcggcaacuacaacuaccuguaccggcuguuccguaagagcaaccugaagccauucgagcgggacaucagcaccgagaucuaccaggccggcagcacccccugcaacggugugaagggcuuuaacugcuacuucccccugcagagcuacggcuuccagcccaccuacggcgugggcuaccagcccuaccgggugguggugcugagcuucgagcugcugcacgcccccgccaccgugugcggcccuaaaaagagcaccaaccuggugaagaacaagugcgugaacuucaauuucaacggccugaccggcaccggcgugcugaccgagagcaacaagaaguuccugcccuuccagcaguucggccgggauaucgccgacaccaccgacgcagugcgggacccccagacccuggagauccuggacaucaccccaugcagcuucggcggcgugagcgucaucacccccggcacaaacaccagcaaccagguggccgugcuguaccagggagugaacugcaccgaggugcccguggccauccacgccgaccagcugacccccaccuggcggguguacagcaccggcagcaacguguuccagacccgggccggcugccugaucggcgccgagcacgugaacaacuccuacgagugcgacauccccaucggcgcuggcaucugcgccagcuaccagacccagaccaacagcccccggcgggcccggagcguggccagccagagcaucaucgccuacaccaugagcuuaggcgccgagaacagcguggccuacagcaacaacagcaucgcgaucccuaccaacuucaccaucagcgugaccaccgagauacugcccgugagcaugaccaagaccagcguggacuguaccauguacaucugcggcgacagcaccgagugcagcaaccugcugcugcaguacggcagcuucugcacccagcugaaccgggcccugaccggcaucgccguggagcaggacaagaacacccaagagguguucgcccaggugaagcagaucuacaagacucccccaaucaaggacuucggcggcuucaacuucagccagauccugcccgaccccagcaagcccagcaagcggagcuucaucgaggaccugcuguucaacaaggugacccuggccgacgccggcuucaucaagcaguacggcgacugccugggggauaucgccgcucgggaccugaucugcgcccagaaguucaacggccugaccgugcugcccccucugcugaccgacgagaugaucgcccaguacaccagcgcccugcuugccggcaccaucaccagcggcuggaccuucggcgccggcgcagcccugcagauccccuucgccaugcagauggccuaccgguucaacggcaucggcgugacccagaacgugcuguacgagaaccagaagcugaucgccaaccaguucaacagcgccaucggcaagauccaggacagccugagcagcaccgccagcgcccugggcaagcugcaggacguggugaaccagaacgcucaggcccugaacacccuggugaagcagcugagcagcaacuucggcgccaucagcucagugcugaaugacauccugagcaggcuggaucccccagaggccgaggugcagaucgaccggcugaucaccggccggcugcagagccugcagaccuacgugacccagcagcugauccgggccgccgagauccgggccagcgccaaccuggcagccaccaagaugagcgagugcgugcugggccagagcaagcggguggacuuuugcggcaagggcuaccaccugaugagcuucccccagagcgcuccccacggcgugguguuccuccacgugacauacguccccgcccaggagaagaacuucaccaccgcccccgccauuugccacgacggcaaggcccacuucccccgggagggaguguucgugagcaacggcacccacugguucgugacccagcggaacuucuacgagccucagaucaucaccaccgacaacaccuucgugagcggcaacugcgacguggugaucggcaucgugaacaacaccguguacgacccccugcagcccgagcuggacagcuucaaggaggagcuggacaaguacuucaagaaccacaccagcccagacguggaccugggcgacaucagcggcaucaacgccagcguggugaacauccagaaggagaucgaccggcugaacgagguggccaagaaccugaacgagagccugaucgaccugcaggagcugggcaaguacgagcaguacaucaaguggcccugguacaucuggcugggcuucaucgccggccugaucgccaucgugauggugaccaucaugcugugcugcaugaccagcugcuguagcugccugaagggcugcugcagcugcggcagcugcugcaaguucgacgaggacgacagcgagcccgugcugaagggcgugaagcugcacuacaccugauaauaggcuggagccucgguggccuagcuucuugccccuugggccuccccccagccccuccuccccuuccugcacccguacccccguggucuuugaauaaagucugagugggcggcaaaaaaaaaaaaaaaaaaaaaaaaaaaaaaaaaaaaaaaaaaaaaaaaaaaaaaaaaaaaaaaaaaaaaaaaaaaaaaaaaaaaaaaaaaaaaaaaaaaa

SEQ ID NO: 26225 - RNA, 4086 nt, Artificial Sequence
  SARS-CoV-2/Wuhan/WIV05/2019__EPI_ISL_402128 spike protein mRNA gc (1-1273)(K986P_V987P_K986P_V987P_L18F_D80A_D215G_L242del_A243del_ L244del_R246I_K417N_E484K_N501Y_D614G_A701V)
gggaaauaagagagaaaagaagaguaagaagaaauauaagaccccggcgccgccaccauguucguguuccuggugcugcugccccuggugagcagccagugcgugaacuucaccacccggacccagcugcccccugccuacaccaacagcuucacccggggcguguacuaccccgacaagguguuccggagcagcgugcugcacagcacccaggaccuguuccugcccuucuucagcaacgugaccugguuccacgccauccacgugagcggcaccaacggcaccaagcgguucgccaacccagugcugcccuucaacgacggcguguacuucgccagcaccgagaagucaaacaucauccggggcuggaucuuuggcaccacccuggacagcaagacacagagccugcugaucgugaacaacgcuaccaacguggugaucaaggugugcgaguuccaguucugcaacgaccccuuccugggcguguacuaccacaagaacaacaagagcuggauggagagcgaguuccgggucuacagcagcgccaacaauugcaccuucgaguacgugagccagcccuuccugauggaccuggagggcaagcagggcaacuucaagaaccuccgggaguucguguucaagaacaucgacggcuacuucaagaucuacagcaagcacacccccaucaaccuggugcggggacugccccagggcuucagcgcccuggagccucugguggaucugcccaucggcaucaacaucaccagguuccagacccugcacaucagcuaccugacccccggcgacagcagcagcggcuggaccgccggcgccgccgcauacuacgugggcuaccugcagccacggaccuuccugcugaaguacaacgagaacggcaccaucaccgacgccguggacugcgcccuggacccccugagcgagaccaagugcacccuuaagagcuucaccguggagaagggcaucuaccagaccagcaacuuccgggugcagcccacugagagcauugugcgguuccccaacaucaccaaccugugucccuucggcgagguguucaacgccacccgguucgccagcguguacgccuggaaccggaagcggaucagcaacugcguggccgacuacagcgugcuguacaacagcgccagcuucagcaccuucaagugcuacggcgugagcccuaccaagcugaacgaccugugcuucaccaacguguacgcugacagcuucgugauccggggcgacgaggugcggcagaucgcccccggccagaccggcaacaucgccgacuacaacuacaagcugcccgacgacuucaccggcugcgugaucgccuggaacagcaacaaccuggacagcaaggugggcggcaacuacaacuaccuguaccggcuauuccguaagagcaaccugaagccauuugagcgggacaucagcaccgagaucuaccaggccgguagcacccccugcaacggcgugaagggcuucaacugcuacuucccccugcagagcuacggcuuccagcccaccuacggcgugggcuaccagcccuaccgggugguggugcugagcuucgagcugcugcacgcccccgccaccgugugcggcccuaaaaagagcaccaaccuggugaagaacaagugcgugaacuucaauuucaacggccugaccggcaccggcgugcugaccgagagcaacaagaaguuccugcccuuccagcaguucggccgggacaucgccgacaccaccgaugcagugcgggacccccagacccuggagauccuggacaucaccccaugcagcuucggcggcgugagcgucaucacccccggaacaaacaccagcaaccagguggccgugcuguaccagggcgugaacugcaccgaggugcccguggccauccacgccgaccagcugacccccaccuggcggguguacagcaccggcagcaacguguuccagacccgggccggcugccugaucggcgccgagcacgugaacaacuccuacgagugcgacauccccaucggcgcuggcaucugcgccagcuaccagacccagaccaacagcccccggcgggcccggagcguggccagccagagcaucaucgccuacaccaugagccugggcguggagaacagcguggccuacagcaacaacagcaucgccaucccuaccaacuucaccauaagcgugaccaccgagauccugcccgugagcaugaccaagaccagcguggacuguaccauguacaucugcggcgacagcaccgagugcagcaaccuguuacugcaguacggcagcuucugcacccagcugaaccgggcgcugaccggcaucgccguggagcaggacaagaacacccaagagguguucgcccaggugaagcagaucuacaagacucccccaaucaaggacuucggcggcuucaacuucagccagauccugcccgaccccagcaagcccagcaagcggagcuucaucgaggaccugcuguucaacaaggugacccuggccgacgccggcuucaucaagcaguacggggacugccugggcgacaucgccgcccgggaccugaucugcgcucagaaguucaacggccugaccgugcugcccccucugcugaccgaugagaugaucgcccaguacaccagcgcccugcuggccggcaccaucaccagcggcuggaccuucggcgccggcgccgcacugcagauccccuucgccaugcagauggccuaccgguucaacggcaucggcgugacccagaacgugcuguacgagaaccagaagcugaucgccaaccaguucaacagcgccaucggcaagauccaggacagccugagcagcaccgccagcgcccugggcaagcugcaggacguggugaaccagaacgcccaggcucugaacacccuggugaagcagcugagcagcaacuuuggcgccaucagcucagugcugaaugacauccugagccggcuggaucccccagaggccgaggugcagaucgacaggcugaucaccggccggcugcagagccugcagaccuacgugacccagcagcugauccgggccgccgagauucgggccagcgccaaccuggccgcaaccaagaugagcgagugcgugcugggccagagcaagcggguggacuucugcggcaagggcuaccaccugaugagcuucccccagagcgcuccccacggcgugguguuccugcacgucacauacgugcccgcccaggagaagaacuucaccaccgcccccgccaucugccacgacggaaaggcccacuucccccgggagggcguguucgugagcaacggcacccacugguucgugacccagcggaacuucuacgagccucagaucaucaccaccgacaacaccuucgugagcggcaacugcgacguggugaucggcaucgugaacaacaccguguacgacccccugcagcccgagcuggacagcuucaaggaggagcucgacaaguacuucaagaaccacaccagcccagacguggaccugggcgacaucagcggcaucaacgccagcguggugaacauccagaaggagaucgaccggcugaacgagguggccaagaaccugaacgagagccugaucgaccugcaggagcugggcaaguacgagcaguacaucaaguggcccugguacaucuggcugggcuucaucgccggccugaucgccaucgugauggugaccaucaugcugugcugcaugaccagcugcuguagcugccugaagggcugcugcagcugcggcagcugcugcaaguucgacgaggacgacagcgagcccgugcugaagggcgugaagcugcacuacaccugauaauaggcuggagccucgguggccuagcuucuugccccuugggccuccccccagccccuccuccccuuccugcacccguacccccguggucuuugaauaaagucugagugggcggcaaaaaaaaaaaaaaaaaaaaaaaaaaaaaaaaaaaaaaaaaaaaaaaaaaaaaaaaaaaaaaaaaaaaaaaaaaaaaaaaaaaaaaaaaaaaaaaaaaaa

SEQ ID NO: 26226 - RNA, 4095 nt, Artificial Sequence
  SARS-CoV-2/Wuhan/WIV05/2019__EPI_ISL_402128 spike protein mRNA gc (1-1273)(K986P_V987P_K986P_V987P_E484K_D614G)
gggaaauaagagagaaaagaagaguaagaagaaauauaagaccccggcgccgccaccauguucguguuccuggugcugcugccccuggugagcagccagugcgugaaccugaccacccggacccagcugcccccugccuacaccaacagcuucacccggggcguguacuaccccgacaagguguuccggagcagcgugcugcacagcacccaggaccuguuccugcccuucuucagcaacgugaccugguuccacgccauccacgugagcggcaccaacggcaccaagcgguucgacaacccagugcugcccuucaacgacggcguguacuucgccagcaccgagaagucaaacaucauccggggcuggaucuucggcaccacccuggacagcaagacacagagccugcugaucgugaacaacgccaccaacguggugaucaaggugugcgaguuucaguucugcaacgaccccuuccugggcguguacuaccacaagaacaacaagagcuggauggagagcgaguuccgggucuacagcagcgcuaacaauugcaccuucgaguacgugagccagcccuuccugauggaccucgagggcaagcagggcaacuucaagaaccugcgggaguucguguucaagaacaucgauggcuacuucaagaucuacagcaagcacacccccaucaaccuggugcgggaccugccccagggauucagcgcccuggagccucugguggaccugcccaucggcaucaacaucaccagguuccagacccugcuggcccugcaccggagcuaccugacccccggcgacagcagcagcggcuggaccgccggcgccgccgcauacuacgugggcuaccugcagccacggaccuuccugcugaaguacaacgagaacggcaccaucaccgacgccguggacugcgcccuggacccccugagcgagaccaagugcacccuaaagagcuucaccguggagaagggcaucuaccagaccagcaacuuccgggugcagcccacugagagcaucgugcgguuccccaacauuaccaaccugugucccuucggcgagguguucaacgccacccgguucgccagcguguacgccuggaaccggaagcggaucagcaacugcguggccgacuacagcgugcuguacaacagcgccagcuucagcaccuucaagugcuacggcgugagcccuaccaagcugaacgaccugugcuucaccaacguguacgcugacagcuucgugauccggggcgacgaggugcggcagaucgcccccggccagaccggcaagaucgccgacuacaacuacaagcugcccgacgacuucaccggcugcgugaucgccuggaacagcaacaaccuggacagcaaggugggcggcaacuacaacuaccuguaccggcuguuccguaagagcaaccugaagccauucgagcgggacaucagcaccgagaucuaccaggccggcagcacccccugcaacggugugaagggcuuuaacugcuacuucccccugcagagcuacggcuuccagcccaccaacggcgugggcuaccagcccuaccgggugguggugcugagcuucgagcugcugcacgcccccgccaccgugugcggcccuaaaaagagcaccaaccuggugaagaacaagugcgugaacuucaauuucaacggccugaccggcaccggcgugcugaccgagagcaacaagaaguuccugcccuuccagcaguucggccgggauaucgccgacaccaccgacgcagugcgggacccccagacccuggagauccuggacaucaccccaugcagcuucggcggcgugagcgucaucacccccggcacaaacaccagcaaccagguggccgugcuguaccagggagugaacugcaccgaggugcccguggccauccacgccgaccagcugacccccaccuggcggguguacagcaccggcagcaacguguuccagacccgggccggcugccugaucggcgccgagcacgugaacaacuccuacgagugcgacauccccaucggcgcuggcaucugcgccagcuaccagacccagaccaacagcccccggcgggcccggagcguggccagccagagcaucaucgccuacaccaugagcuuaggcgccgagaacagcguggccuacagcaacaacagcaucgcgaucccuaccaacuucaccaucagcgugaccaccgagauacugcccgugagcaugaccaagaccagcguggacuguaccauguacaucugcggcgacagcaccgagugcagcaaccugcugcugcaguacggcagcuucugcacccagcugaaccgggcccugaccggcaucgccguggagcaggacaagaacacccaagagguguucgcccaggugaagcagaucuacaagacucccccaaucaaggacuucggcggcuucaacuucagccagauccugcccgaccccagcaagcccagcaagcggagcuucaucgaggaccugcuguucaacaaggugacccuggccgacgccggcuucaucaagcaguacggcgacugccugggggauaucgccgcucgggaccugaucugcgcccagaaguucaacggccugaccgugcugcccccucugcugaccgacgagaugaucgcccaguacaccagcgcccugcuugccggcaccaucaccagcggcuggaccuucggcgccggcgcagcccugcagauccccuucgccaugcagauggccuaccgguucaacggcaucggcgugacccagaacgugcuguacgagaaccagaagcugaucgccaaccaguucaacagcgccaucggcaagauccaggacagccugagcagcaccgccagcgcccugggcaagcugcaggacguggugaaccagaacgcucaggcccugaacacccuggugaagcagcugagcagcaacuucggcgccaucagcucagugcugaaugacauccugagcaggcuggaucccccagaggccgaggugcagaucgaccggcugaucaccggccggcugcagagccugcagaccuacgugacccagcagcugauccgggccgccgagauccgggccagcgccaaccuggcagccaccaagaugagcgagugcgugcugggccagagcaagcggguggacuuuugcggcaagggcuaccaccugaugagcuucccccagagcgcuccccacggcgugguguuccuccacgugacauacguccccgcccaggagaagaacuucaccaccgcccccgccauuugccacgacggcaaggcccacuucccccgggagggaguguucgugagcaacggcacccacugguucgugacccagcggaacuucuacgagccucagaucaucaccaccgacaacaccuucgugagcggcaacugcgacguggugaucggcaucgugaacaacaccguguacgacccccugcagcccgagcuggacagcuucaaggaggagcuggacaaguacuucaagaaccacaccagcccagacguggaccugggcgacaucagcggcaucaacgccagcguggugaacauccagaaggagaucgaccggcugaacgagguggccaagaaccugaacgagagccugaucgaccugcaggagcugggcaaguacgagcaguacaucaaguggcccugguacaucuggcugggcuucaucgccggccugaucgccaucgugauggugaccaucaugcugugcugcaugaccagcugcuguagcugccugaagggcugcugcagcugcggcagcugcugcaaguucgacgaggacgacagcgagcccgugcugaagggcgugaagcugcacuacaccugauaauaggcuggagccucgguggccuagcuucuugccccuugggccuccccccagccccuccuccccuuccugcacccguacccccguggucuuugaauaaagucugagugggcggcaaaaaaaaaaaaaaaaaaaaaaaaaaaaaaaaaaaaaaaaaaaaaaaaaaaaaaaaaaaaaaaaaaaaaaaaaaaaaaaaaaaaaaaaaaaaaaaaaaaa

SEQ ID NO: 26227 - RNA, 4095 nt, Artificial Sequence
  SARS-CoV-2/Wuhan/WIV05/2019__EPI_ISL_402128 spike protein mRNA gc (1-1273)(K986P_V987P_K986P_V987P_L18F_T20N_P26S_D138Y_R190S_K417T _E484K_N501Y_D614G_H655Y_T1027I)
gggaaauaagagagaaaagaagaguaagaagaaauauaagaccccggcgccgccaccauguucguguuccuggugcugcugccccuggugagcagccagugcgugaacuucaccaaccggacccagcugcccagcgccuacaccaacagcuucacccggggcguguacuacccugacaagguguuccggagcagcgugcugcacagcacccaggaccuguuccugcccuucuucagcaacgugaccugguuccacgccauccacgugagcggcaccaacggcaccaagcgguucgacaaccccgugcugccauucaacgacggcguguacuucgccagcaccgagaagucaaacaucauccggggcuggaucuuuggcaccacccuggacagcaagacccagagccugcugaucgugaacaacgccacaaacguggugaucaaggugugcgaguuccaguucugcaacuaccccuuccugggcguguacuaccacaagaacaacaagagcuggauggagagcgaguuccgggucuacagcagcgcuaauaacugcaccuucgaguacgugagccagcccuuccugauggaccuggagggcaagcagggcaacuucaagaaccucagcgaguucguguucaagaacaucgacggcuacuucaagaucuacagcaagcacacccccaucaaccuggugcgggaucugccccagggauucagcgcccuggagccccugguggaccugccuaucggcaucaacaucacccgguuccagacccugcuggcccugcacaggagcuaccugacccccggcgacagcagcagcggcuggaccgccggcgccgccgcauacuacgugggcuaccugcagccccggaccuuccugcugaaguacaacgagaacggcaccaucaccgacgccguggacugcgcccuggacccacugagcgagaccaagugcacccuaaagagcuucaccguggagaagggcaucuaccagaccagcaacuuccgggugcagcccaccgagagcaucgugcgguuccccaacauuacuaaccugugucccuucggcgagguguucaacgccacccgguucgccagcguguacgccuggaaccggaagcggaucagcaacugcguggccgacuacagcgugcuguacaacagcgccagcuucagcaccuucaagugcuacggcgugagccccaccaagcugaacgaccugugcuucaccaacguguacgcugacagcuucgugauccggggcgacgaggugcggcagaucgccccuggccagaccggcaccaucgccgacuacaacuacaagcugcccgacgacuucaccggcugcgugaucgccuggaacagcaacaaccuggacagcaaggugggcggcaacuacaacuaccuguaccggcuguuccguaagagcaaccugaagcccuuugagcgggacaucagcaccgagaucuaccaggccggcagcaccccaugcaacggugugaagggcuucaacugcuacuucccccugcagagcuacggcuuccagcccaccuacggcgugggcuaccagcccuaccgggugguggugcugagcuucgagcugcugcacgcccccgccaccgugugcggccccaaaaagagcaccaaccuggugaagaacaagugcgugaacuucaauuucaacggccugaccggcaccggcgugcugaccgagagcaacaagaaguuccugccuuuccagcaguucggccgggacaucgccgauaccaccgacgcagugcgggacccccagacccuggagauccuggacaucacccccugcagcuucggcggcgugagcgucaucaccccaggcacaaacaccagcaaccagguggccgugcuguaccagggagugaacugcaccgaggugcccguggccauccacgccgaccagcugacccccaccuggcggguguacuccaccggcagcaacguguuccagacccgggccggcugccugaucggcgccgaguacgugaacaacagcuacgagugcgacauccccaucggcgcuggcaucugcgccagcuaccagacccagaccaacagcccccggcgggcccggagcguggccagccagagcaucaucgccuacaccaugagccugggcgccgagaacagcguggccuacagcaacaacagcaucgcgauccccaccaacuucaccaucagcgugaccaccgagauauuaccugugagcaugaccaagaccagcguggacuguaccauguacaucugcggcgacagcaccgagugcagcaaccugcugcugcaguacggcagcuucugcacccagcugaaccgggcccugaccggcaucgccguggagcaggacaagaacacccaagagguguucgcccaggugaagcagaucuacaagacuccacccaucaaggacuucggcggcuucaacuucagccagauccugcccgaccccagcaagcccagcaagcggagcuucaucgaggaccugcuguucaacaaggugacccuggccgacgccggcuucaucaagcaguacggcgacugccugggggacaucgccgcucgggaucugaucugcgcccagaaguucaacggccugaccgugcugccuccccugcugaccgacgagaugaucgcccaguacaccagcgcccugcuggccggcaccaucaccagcggcuggaccuucggcgccggcgcagcccuucagauccccuucgccaugcagauggccuaccgguucaacggcaucggcgugacccagaacgugcuguacgagaaccagaagcugaucgccaaccaguucaacagcgccaucggcaagauccaggacagccugagcagcaccgccagcgcccugggcaagcugcaggacguggugaaccagaacgcucaggcccugaacacccuggugaagcagcugagcucaaacuuuggcgccaucagcagcgugcugaaugacauccugagccggcuggacccacccgaggccgaggugcagaucgacaggcugaucaccggccggcugcagagccugcagaccuacgugacccagcagcugauccgggccgccgagauccgggccagcgccaaccuggcagccauuaagaugagcgagugcgugcugggccagagcaagcggguggacuucugcggcaagggcuaccaccugaugagcuucccccagagcgcuccccacggcgugguguuccugcacgugaccuacguccccgcccaggagaagaacuucacaaccgcccccgccaucugccacgacggcaaggcccacuucccccgggagggaguguucgugagcaacggcacccacugguucgugacccagcggaacuucuacgagccccagaucaucaccaccgacaacaccuucgugagcggcaacugcgacguggugaucggcaucgugaacaacaccguguacgacccucuccagcccgagcuggacagcuucaaggaggagcuggacaaguacuucaagaaccacaccagccccgacguggaccugggcgauaucagcggcaucaacgccagcguggugaacauccagaaggagaucgaccggcugaacgagguggccaagaaccugaacgagagccugaucgaccugcaggagcugggcaaguacgagcaguacaucaaguggccaugguacaucuggcugggcuucaucgccggccugaucgccaucgugauggugaccaucaugcugugcugcaugaccagcugcuguagcugccugaagggcugcugcagcugcggcagcugcugcaaguucgacgaggacgacagcgagcccgugcugaagggcgugaagcugcacuacaccugauaauaggcuggagccucgguggccuagcuucuugccccuugggccuccccccagccccuccuccccuuccugcacccguacccccguggucuuugaauaaagucugagugggcggcaaaaaaaaaaaaaaaaaaaaaaaaaaaaaaaaaaaaaaaaaaaaaaaaaaaaaaaaaaaaaaaaaaaaaaaaaaaaaaaaaaaaaaaaaaaaaaaaaaaa

SEQ ID NO: 26228 - RNA, 4095 nt, Artificial Sequence
  SARS-CoV-2/Wuhan/WIV05/2019__EPI_ISL_402128 spike protein mRNA gc (1-1273)(K986P_V987P_K986P_V987P_S13I_W152C_L452R_D614G)
gggaaauaagagagaaaagaagaguaagaagaaauauaagaccccggcgccgccaccauguucguguuccuggugcugcugccccuggugagcauccagugcgugaaccugaccacccggacccagcugcccccugccuacaccaacagcuucacccggggcguguacuaccccgacaagguguuccggagcagcgugcugcacagcacccaggaccuguuccugcccuucuucagcaacgugaccugguuccacgccauccacgugagcggcaccaacggcaccaagcgguucgacaacccagugcugcccuucaacgacggcguguacuucgccagcaccgagaagucaaacaucauccggggcuggaucuucggcaccacccuggacagcaagacacagagccugcugaucgugaacaacgccaccaacguggugaucaaggugugcgaguuucaguucugcaacgaccccuuccugggcguguacuaccacaagaacaacaagagcugcauggagagcgaguuccgggucuacagcagcgcuaacaauugcaccuucgaguacgugagccagcccuuccugauggaccucgagggcaagcagggcaacuucaagaaccugcgggaguucguguucaagaacaucgauggcuacuucaagaucuacagcaagcacacccccaucaaccuggugcgggaccugccccagggauucagcgcccuggagccucugguggaccugcccaucggcaucaacaucaccagguuccagacccugcuggcccugcaccggagcuaccugacccccggcgacagcagcagcggcuggaccgccggcgccgccgcauacuacgugggcuaccugcagccacggaccuuccugcugaaguacaacgagaacggcaccaucaccgacgccguggacugcgcccuggacccccugagcgagaccaaguguacccuaaagagcuucaccguggagaagggcaucuaccagaccagcaacuuccgggugcagcccacugagagcauugugcgguuccccaacaucaccaaccugugccccuucggcgagguguucaacgccacccgguucgccagcguguacgccuggaaccggaagcggaucagcaacugcguggccgacuacagcgugcuguacaacagcgccagcuucagcaccuucaagugcuacggcgugagcccuaccaagcugaacgaccugugcuucaccaacguguacgcugacagcuucgugauccggggcgacgaggugcggcagaucgcccccggccagaccggcaagaucgccgacuacaacuacaagcugcccgacgacuucaccggcugcgugaucgccuggaacagcaacaaccuggacagcaaggugggcggcaacuacaacuaccgguaccggcuguuccguaagagcaaccugaagccauucgagcgggacaucagcaccgagaucuaccaggccggcagcacccccugcaacgguguggagggcuuuaacugcuacuucccccugcagagcuacggcuuccagcccaccaacggcgugggcuaccagcccuaccgggugguggugcugagcuucgagcugcugcacgcccccgccaccgugugcggcccuaaaaagagcaccaaccuggugaagaacaagugcgugaacuucaauuucaacggccugaccggcaccggcgugcugaccgagagcaacaagaaguuccugcccuuccagcaguucggccgggauaucgccgacaccaccgacgcagugcgggacccccagacccuggagauccuggacaucaccccaugcagcuucggcggcgugagcgucaucacccccggcacaaacaccagcaaccagguggccgugcuguaccagggagugaacugcaccgaggugcccguggccauccacgccgaccagcugacccccaccuggcggguguacagcaccggcagcaacguguuccagacccgggccggcugccugaucggcgccgagcacgugaacaacagcuacgagugcgacauccccaucggcgcuggcaucugugccuccuaccagacccagaccaacagcccccggcgggcccggagcguggccagccagagcaucaucgccuacaccaugagccugggcgccgagaacagcguggccuacagcaacaacagcaucgcgaucccuaccaacuucaccauaagcgugaccaccgagaucuuacccgugagcaugaccaagaccagcguggacugcaccauguacaucugcggcgacagcaccgagugcagcaaccugcugcugcaguacggcagcuucugcacccagcugaaccgggcccugaccggcaucgccguggagcaggacaagaacacccaagagguguucgcccaggugaagcagaucuacaagacucccccaaucaaggacuucggcggcuucaacuucagccagauccugcccgaccccagcaagcccagcaagcggagcuucaucgaggaccugcuguucaacaaggugacccuggccgacgccggcuucaucaagcaguacggcgacugccugggggauaucgccgcucgggaccugaucugcgcccagaaguucaacggccugaccgugcugcccccucugcugaccgacgagaugaucgcccaguacaccagcgcccugcuggccggcaccaucaccagcggcuggaccuucggcgccggcgcagcccuucagauccccuucgccaugcagauggccuacagguucaacggcaucggcgugacccagaacgugcuguacgagaaccagaagcugaucgccaaccaguucaacagcgccaucggcaagauccaggacagccugagcagcaccgccagcgcccugggcaagcugcaggacguggugaaccagaacgcucaggcccugaacacccuggugaagcagcugagcagcaacuucggcgccaucagcagcgugcugaaugacauccugucacggcuggaucccccagaggccgaggugcagaucgaccggcugaucaccggccggcugcagagccugcagaccuacgugacccagcagcugauccgggccgccgagauucgggccagcgccaaccuggcagccaccaagaugagcgagugcgugcugggccagagcaagcggguggacuuuugcggcaagggcuaccaccugaugagcuucccccagagcgcuccccacggcgugguguuccugcacgugacauacguccccgcccaggagaagaacuucaccaccgcccccgccaucugccacgacggcaaggcccacuucccccgggagggaguguucgugagcaacggcacccacugguucgugacccagcggaacuucuacgagccucagaucaucaccaccgacaacaccuucgugagcggcaacugcgacguggugaucggcaucgugaacaacaccguguacgacccccuccagcccgagcuggacagcuucaaggaggagcuggacaaguacuucaagaaccacaccagcccagacguggaccugggcgacaucagcggcaucaacgccagcguggugaacauccagaaggagaucgaccggcugaacgagguggccaagaaccugaacgagagccugaucgaccugcaggagcugggcaaguacgagcaguacaucaaguggcccugguacaucuggcugggcuucaucgccggccugaucgccaucgugauggugaccaucaugcugugcugcaugaccagcuguugcagcugccugaagggcugcugcagcugcggcagcugcugcaaguucgacgaggacgacagcgagcccgugcugaagggcgugaagcugcacuacaccugauaauaggcuggagccucgguggccuagcuucuugccccuugggccuccccccagccccuccuccccuuccugcacccguacccccguggucuuugaauaaagucugagugggcggcaaaaaaaaaaaaaaaaaaaaaaaaaaaaaaaaaaaaaaaaaaaaaaaaaaaaaaaaaaaaaaaaaaaaaaaaaaaaaaaaaaaaaaaaaaaaaaaaaaaa

SEQ ID NO: 26229 - RNA, 4095 nt, Artificial Sequence
  SARS-CoV-2/Wuhan/WIV05/2019__EPI_ISL_402128 spike protein mRNA gc mod (1-1273)(K986P_V987P)
gggaaauaagagagaaaagaagaguaagaagaaauauaagaccccggcgccgccaccauguucguguuucuggugcugcugccccugguguccagccagugugugaaccugaccaccagaacacagcugccuccagccuacaccaacagcuucaccagaggcguguacuaccccgacaagguguucagauccagcgugcugcacucuacccaggaccuguuccugccuuucuucagcaacgugaccugguuccacgccauccacguguccggcaccaauggcaccaagagauucgacaaccccgugcugcccuucaacgacgggguguacuuugccagcaccgagaaguccaacaucaucagaggcuggaucuucggcaccacacuggacagcaagacccagagccugcugaucgugaacaacgccaccaacguggucaucaaagugugcgaguuccaguucugcaacgaccccuuccugggcgucuacuaccacaagaacaacaagagcuggauggaaagcgaguuccggguguacagcagcgccaacaacugcaccuucgaguacgugucccagccuuuccugauggaccuggaaggcaagcagggcaacuucaagaaccugcgcgaguucguguucaagaacaucgacggcuacuucaaaaucuacagcaagcacaccccuaucaaccucgugcgggaucugccucagggcuucucugcucuggaaccccugguggaucugcccaucggcaucaacaucacccgguuucagacacugcuggcccugcacagaagcuaccugacaccuggcgauagcagcagcggauggacagcuggugccgccgcuuacuaugugggcuaccugcagccuagaaccuuccugcugaaguacaacgagaacggcaccaucaccgacgccguggauugugcucuggauccucugagcgagacaaagugcacccugaaguccuucaccguggaaaagggcaucuaccagaccagcaacuuccgggugcagcccaccgaauccaucgugcgguuccccaauaucaccaaucugugccccuucggcgagguguucaaugccaccagauucgccucuguguacgccuggaaccggaagcggaucagcaauugcguggccgacuacuccgugcuguacaacuccgccagcuucagcaccuucaagugcuacggcguguccccuaccaagcugaacgaccugugcuucacaaacguguacgccgacagcuucgugauccggggagaugaagugcggcagauugccccuggacagacaggcaagaucgccgacuacaacuacaagcugcccgacgacuucaccggcugugugauugccuggaacagcaacaaccuggacuccaaagucggcggcaacuacaauuaccuguaccggcuguuccggaaguccaaucugaagcccuucgagcgggacaucagcaccgaaaucuaucaggccggcagcaccccuugcaacggcguggaaggcuucaacugcuacuucccacugcaguccuacggcuuucagcccacaaauggcgugggcuaucagcccuacagagugguggugcugagcuucgaacugcugcaugcuccugccacagugugcggcccuaagaaaagcaccaaucucgugaagaacaaaugcgugaacuucaacuucaacggccugaccggcaccggcgugcugacagagagcaacaagaaguuccugccauuccagcaguuuggccgggauaucgccgauaccacagacgccguuagagauccccagacacuggaaauccuggacaucaccccaugcagcuucggcggagugucugugaucaccccuggcaccaacaccagcaaucagguggcagugcuguaccaggacgugaacuguaccgaagugcccguggccauucacgccgaucagcugacaccuacauggcggguguacuccaccggcagcaauguguuucagaccagagccggcugucugaucggagccgagcacgugaacaauagcuacgagugcgacauccccaucggcgcuggcaucugugccagcuaccagacacagacaaacagccccagacgggcuagaagcguggccagccagagcaucauugccuacacaaugucucugggcgccgagaacagcguggccuacuccaacaacucuaucgcuauccccaccaacuucaccaucagcgugaccaccgagauccugccuguguccaugaccaagaccagcguggacugcaccauguacaucugcggcgauuccaccgagugcuccaaccugcugcugcaguacggcagcuucugcacccagcugaauagagcccugacagggaucgccguggaacaggacaagaacacccaagagguguucgcccaagugaagcaaaucuacaagaccccuccuaucaaggacuucggcggcuucaauuucagccagauucugcccgauccuagcaagcccagcaagcggagcuucaucgaggaccugcuguucaacaaagugacacuggccgacgccggcuucaucaagcaguauggcgauugucugggcgacauugccgccagggaucugauuugcgcccagaaguuuaacggacugacagugcugccuccucugcugaccgaugagaugaucgcccaguacacaucugcccugcuggccggcacaaucacaagcggcuggacauuuggagcuggcgccgcucugcagauccccuuugcuaugcagauggccuaccgguucaacggcaucggagugacccagaaugugcuguacgagaaccagaagcugaucgccaaccaguucaacagcgccaucggcaagauccaggacagccugagcagcacagcaagcgcccugggaaagcugcaggacguggucaaccagaaugcccaggcacugaacacccuggucaagcagcuguccuccaacuucggcgccaucagcucugugcugaacgauauccugagcagacuggacccuccugaggccgaggugcagaucgacagacugaucacaggcagacugcagagccuccagacauacgugacccagcagcugaucagagccgccgagauuagagccucugccaaucuggccgccaccaagaugucugagugugugcugggccagagcaagagaguggacuuuugcggcaagggcuaccaccugaugagcuucccucagucugccccucacggcgugguguuucugcacgugacauaugugcccgcucaagagaagaauuucaccaccgcuccagccaucugccacgacggcaaagcccacuuuccuagagaaggcguguucguguccaacggcacccauugguucgugacacagcggaacuucuacgagccccagaucaucaccaccgacaacaccuucgugucuggcaacugcgacguugugaucggcauugugaacaauaccguguacgacccucugcagcccgagcuggacagcuucaaagaggaacuggacaaguacuuuaagaaccacacaagccccgacguggaccugggcgauaucagcggaaucaaugccagcgucgugaacauccagaaagagaucgaccggcugaacgagguggccaagaaucugaacgagagccugaucgaccugcaagaacuggggaaguacgagcaguacaucaaguggcccugguacaucuggcugggcuuuaucgccggacugauugccaucgugauggucacaaucaugcuguguugcaugaccagcugcuguagcugccugaagggcuguuguagcuguggcagcugcugcaaguucgacgaggacgauucugagcccgugcugaagggcgugaaacugcacuacaccugauaauaggcuggagccucgguggccuagcuucuugccccuugggccuccccccagccccuccuccccuuccugcacccguacccccguggucuuugaauaaagucugagugggcggcaaaaaaaaaaaaaaaaaaaaaaaaaaaaaaaaaaaaaaaaaaaaaaaaaaaaaaaaaaaaaaaaaaaaaaaaaaaaaaaaaaaaaaaaaaaaaaaaaaaa

SEQ ID NO: 26230 - RNA, 4095 nt, Artificial Sequence
  SARS-CoV-2/Wuhan/WIV05/2019__EPI_ISL_402128 spike protein mRNA gc mod (1-1273)(K986P_V987P_ D614G)
gggaaauaagagagaaaagaagaguaagaagaaauauaagaccccggcgccgccaccauguucguguuucuggugcugcugccccugguguccagccagugugugaaccugaccaccagaacacagcugccuccagccuacaccaacagcuucaccagaggcguguacuaccccgacaagguguucagauccagcgugcugcacucuacccaggaccuguuccugccuuucuucagcaacgugaccugguuccacgccauccacguguccggcaccaauggcaccaagagauucgacaaccccgugcugcccuucaacgacgggguguacuuugccagcaccgagaaguccaacaucaucagaggcuggaucuucggcaccacacuggacagcaagacccagagccugcugaucgugaacaacgccaccaacguggucaucaaagugugcgaguuccaguucugcaacgaccccuuccugggcgucuacuaccacaagaacaacaagagcuggauggaaagcgaguuccggguguacagcagcgccaacaacugcaccuucgaguacgugucccagccuuuccugauggaccuggaaggcaagcagggcaacuucaagaaccugcgcgaguucguguucaagaacaucgacggcuacuucaaaaucuacagcaagcacaccccuaucaaccucgugcgggaucugccucagggcuucucugcucuggaaccccugguggaucugcccaucggcaucaacaucacccgguuucagacacugcuggcccugcacagaagcuaccugacaccuggcgauagcagcagcggauggacagcuggugccgccgcuuacuaugugggcuaccugcagccuagaaccuuccugcugaaguacaacgagaacggcaccaucaccgacgccguggauugugcucuggauccucugagcgagacaaagugcacccugaaguccuucaccguggaaaagggcaucuaccagaccagcaacuuccgggugcagcccaccgaauccaucgugcgguuccccaauaucaccaaucugugccccuucggcgagguguucaaugccaccagauucgccucuguguacgccuggaaccggaagcggaucagcaauugcguggccgacuacuccgugcuguacaacuccgccagcuucagcaccuucaagugcuacggcguguccccuaccaagcugaacgaccugugcuucacaaacguguacgccgacagcuucgugauccggggagaugaagugcggcagauugccccuggacagacaggcaagaucgccgacuacaacuacaagcugcccgacgacuucaccggcugugugauugccuggaacagcaacaaccuggacuccaaagucggcggcaacuacaauuaccuguaccggcuguuccggaaguccaaucugaagcccuucgagcgggacaucagcaccgaaaucuaucaggccggcagcaccccuugcaacggcguggaaggcuucaacugcuacuucccacugcaguccuacggcuuucagcccacaaauggcgugggcuaucagcccuacagagugguggugcugagcuucgaacugcugcaugcuccugccacagugugcggcccuaagaaaagcaccaaucucgugaagaacaaaugcgugaacuucaacuucaacggccugaccggcaccggcgugcugacagagagcaacaagaaguuccugccauuccagcaguuuggccgggauaucgccgauaccacagacgccguuagagauccccagacacuggaaauccuggacaucaccccaugcagcuucggcggagugucugugaucaccccuggcaccaacaccagcaaucagguggcagugcuguaccagggcgugaacuguaccgaagugcccguggccauucacgccgaucagcugacaccuacauggcggguguacuccaccggcagcaauguguuucagaccagagccggcugucugaucggagccgagcacgugaacaauagcuacgagugcgacauccccaucggcgcuggcaucugugccagcuaccagacacagacaaacagccccagacgggcuagaagcguggccagccagagcaucauugccuacacaaugucucugggcgccgagaacagcguggccuacuccaacaacucuaucgcuauccccaccaacuucaccaucagcgugaccaccgagauccugccuguguccaugaccaagaccagcguggacugcaccauguacaucugcggcgauuccaccgagugcuccaaccugcugcugcaguacggcagcuucugcacccagcugaauagagcccugacagggaucgccguggaacaggacaagaacacccaagagguguucgcccaagugaagcaaaucuacaagaccccuccuaucaaggacuucggcggcuucaauuucagccagauucugcccgauccuagcaagcccagcaagcggagcuucaucgaggaccugcuguucaacaaagugacacuggccgacgccggcuucaucaagcaguauggcgauugucugggcgacauugccgccagggaucugauuugcgcccagaaguuuaacggacugacagugcugccuccucugcugaccgaugagaugaucgcccaguacacaucugcccugcuggccggcacaaucacaagcggcuggacauuuggagcuggcgccgcucugcagauccccuuugcuaugcagauggccuaccgguucaacggcaucggagugacccagaaugugcuguacgagaaccagaagcugaucgccaaccaguucaacagcgccaucggcaagauccaggacagccugagcagcacagcaagcgcccugggaaagcugcaggacguggucaaccagaaugcccaggcacugaacacccuggucaagcagcuguccuccaacuucggcgccaucagcucugugcugaacgauauccugagcagacuggacccuccugaggccgaggugcagaucgacagacugaucacaggcagacugcagagccuccagacauacgugacccagcagcugaucagagccgccgagauuagagccucugccaaucuggccgccaccaagaugucugagugugugcugggccagagcaagagaguggacuuuugcggcaagggcuaccaccugaugagcuucccucagucugccccucacggcgugguguuucugcacgugacauaugugcccgcucaagagaagaauuucaccaccgcuccagccaucugccacgacggcaaagcccacuuuccuagagaaggcguguucguguccaacggcacccauugguucgugacacagcggaacuucuacgagccccagaucaucaccaccgacaacaccuucgugucuggcaacugcgacguugugaucggcauugugaacaauaccguguacgacccucugcagcccgagcuggacagcuucaaagaggaacuggacaaguacuuuaagaaccacacaagccccgacguggaccugggcgauaucagcggaaucaaugccagcgucgugaacauccagaaagagaucgaccggcugaacgagguggccaagaaucugaacgagagccugaucgaccugcaagaacuggggaaguacgagcaguacaucaaguggcccugguacaucuggcugggcuuuaucgccggacugauugccaucgugauggucacaaucaugcuguguugcaugaccagcugcuguagcugccugaagggcuguuguagcuguggcagcugcugcaaguucgacgaggacgauucugagcccgugcugaagggcgugaaacugcacuacaccugauaauaggcuggagccucgguggccuagcuucuugccccuugggccuccccccagccccuccuccccuuccugcacccguacccccguggucuuugaauaaagucugagugggcggcaaaaaaaaaaaaaaaaaaaaaaaaaaaaaaaaaaaaaaaaaaaaaaaaaaaaaaaaaaaaaaaaaaaaaaaaaaaaaaaaaaaaaaaaaaaaaaaaaaaa

SEQ ID NO: 26231 - RNA, 4095 nt, Artificial Sequence
  SARS-CoV-2/Wuhan/WIV05/2019__EPI_ISL_402128 spike protein mRNA gc mod (1-1273)(K986P_V987P_A222V_D614G)
gggaaauaagagagaaaagaagaguaagaagaaauauaagaccccggcgccgccaccauguucguguuucuggugcugcugccccugguguccagccagugugugaaccugaccaccagaacacagcugccuccagccuacaccaacagcuucaccagaggcguguacuaccccgacaagguguucagauccagcgugcugcacucuacccaggaccuguuccugccuuucuucagcaacgugaccugguuccacgccauccacguguccggcaccaauggcaccaagagauucgacaaccccgugcugcccuucaacgacgggguguacuuugccagcaccgagaaguccaacaucaucagaggcuggaucuucggcaccacacuggacagcaagacccagagccugcugaucgugaacaacgccaccaacguggucaucaaagugugcgaguuccaguucugcaacgaccccuuccugggcgucuacuaccacaagaacaacaagagcuggauggaaagcgaguuccggguguacagcagcgccaacaacugcaccuucgaguacgugucccagccuuuccugauggaccuggaaggcaagcagggcaacuucaagaaccugcgcgaguucguguucaagaacaucgacggcuacuucaaaaucuacagcaagcacaccccuaucaaccucgugcgggaucugccucagggcuucucugugcuggaaccccugguggaucugcccaucggcaucaacaucacccgguuucagacacugcuggcccugcacagaagcuaccugacaccuggcgauagcagcagcggauggacagcuggugccgccgcuuacuaugugggcuaccugcagccuagaaccuuccugcugaaguacaacgagaacggcaccaucaccgacgccguggauugugcucuggauccucugagcgagacaaagugcacccugaaguccuucaccguggaaaagggcaucuaccagaccagcaacuuccgggugcagcccaccgaauccaucgugcgguuccccaauaucaccaaucugugccccuucggcgagguguucaaugccaccagauucgccucuguguacgccuggaaccggaagcggaucagcaauugcguggccgacuacuccgugcuguacaacuccgccagcuucagcaccuucaagugcuacggcguguccccuaccaagcugaacgaccugugcuucacaaacguguacgccgacagcuucgugauccggggagaugaagugcggcagauugccccuggacagacaggcaagaucgccgacuacaacuacaagcugcccgacgacuucaccggcugugugauugccuggaacagcaacaaccuggacuccaaagucggcggcaacuacaauuaccuguaccggcuguuccggaaguccaaucugaagcccuucgagcgggacaucagcaccgaaaucuaucaggccggcagcaccccuugcaacggcguggaaggcuucaacugcuacuucccacugcaguccuacggcuuucagcccacaaauggcgugggcuaucagcccuacagagugguggugcugagcuucgaacugcugcaugcuccugccacagugugcggcccuaagaaaagcaccaaucucgugaagaacaaaugcgugaacuucaacuucaacggccugaccggcaccggcgugcugacagagagcaacaagaaguuccugccauuccagcaguuuggccgggauaucgccgauaccacagacgccguuagagauccccagacacuggaaauccuggacaucaccccaugcagcuucggcggagugucugugaucaccccuggcaccaacaccagcaaucagguggcagugcuguaccagggcgugaacuguaccgaagugcccguggccauucacgccgaucagcugacaccuacauggcggguguacuccaccggcagcaauguguuucagaccagagccggcugucugaucggagccgagcacgugaacaauagcuacgagugcgacauccccaucggcgcuggcaucugugccagcuaccagacacagacaaacagccccagacgggcuagaagcguggccagccagagcaucauugccuacacaaugucucugggcgccgagaacagcguggccuacuccaacaacucuaucgcuauccccaccaacuucaccaucagcgugaccaccgagauccugccuguguccaugaccaagaccagcguggacugcaccauguacaucugcggcgauuccaccgagugcuccaaccugcugcugcaguacggcagcuucugcacccagcugaauagagcccugacagggaucgccguggaacaggacaagaacacccaagagguguucgcccaagugaagcaaaucuacaagaccccuccuaucaaggacuucggcggcuucaauuucagccagauucugcccgauccuagcaagcccagcaagcggagcuucaucgaggaccugcuguucaacaaagugacacuggccgacgccggcuucaucaagcaguauggcgauugucugggcgacauugccgccagggaucugauuugcgcccagaaguuuaacggacugacagugcugccuccucugcugaccgaugagaugaucgcccaguacacaucugcccugcuggccggcacaaucacaagcggcuggacauuuggagcuggcgccgcucugcagauccccuuugcuaugcagauggccuaccgguucaacggcaucggagugacccagaaugugcuguacgagaaccagaagcugaucgccaaccaguucaacagcgccaucggcaagauccaggacagccugagcagcacagcaagcgcccugggaaagcugcaggacguggucaaccagaaugcccaggcacugaacacccuggucaagcagcuguccuccaacuucggcgccaucagcucugugcugaacgauauccugagcagacuggacccuccugaggccgaggugcagaucgacagacugaucacaggcagacugcagagccuccagacauacgugacccagcagcugaucagagccgccgagauuagagccucugccaaucuggccgccaccaagaugucugagugugugcugggccagagcaagagaguggacuuuugcggcaagggcuaccaccugaugagcuucccucagucugccccucacggcgugguguuucugcacgugacauaugugcccgcucaagagaagaauuucaccaccgcuccagccaucugccacgacggcaaagcccacuuuccuagagaaggcguguucguguccaacggcacccauugguucgugacacagcggaacuucuacgagccccagaucaucaccaccgacaacaccuucgugucuggcaacugcgacguugugaucggcauugugaacaauaccguguacgacccucugcagcccgagcuggacagcuucaaagaggaacuggacaaguacuuuaagaaccacacaagccccgacguggaccugggcgauaucagcggaaucaaugccagcgucgugaacauccagaaagagaucgaccggcugaacgagguggccaagaaucugaacgagagccugaucgaccugcaagaacuggggaaguacgagcaguacaucaaguggcccugguacaucuggcugggcuuuaucgccggacugauugccaucgugauggucacaaucaugcuguguugcaugaccagcugcuguagcugccugaagggcuguuguagcuguggcagcugcugcaaguucgacgaggacgauucugagcccgugcugaagggcgugaaacugcacuacaccugauaauaggcuggagccucgguggccuagcuucuugccccuugggccuccccccagccccuccuccccuuccugcacccguacccccguggucuuugaauaaagucugagugggcggcaaaaaaaaaaaaaaaaaaaaaaaaaaaaaaaaaaaaaaaaaaaaaaaaaaaaaaaaaaaaaaaaaaaaaaaaaaaaaaaaaaaaaaaaaaaaaaaaaaaa

SEQ ID NO: 26232 - RNA, 4095 nt, Artificial Sequence
  SARS-CoV-2/Wuhan/WIV05/2019__EPI_ISL_402128 spike protein mRNA gc mod (1-1273)(K986P_V987P_N439K_D614G)
gggaaauaagagagaaaagaagaguaagaagaaauauaagaccccggcgccgccaccauguucguguuucuggugcugcugccccugguguccagccagugugugaaccugaccaccagaacacagcugccuccagccuacaccaacagcuucaccagaggcguguacuaccccgacaagguguucagauccagcgugcugcacucuacccaggaccuguuccugccuuucuucagcaacgugaccugguuccacgccauccacguguccggcaccaauggcaccaagagauucgacaaccccgugcugcccuucaacgacgggguguacuuugccagcaccgagaaguccaacaucaucagaggcuggaucuucggcaccacacuggacagcaagacccagagccugcugaucgugaacaacgccaccaacguggucaucaaagugugcgaguuccaguucugcaacgaccccuuccugggcgucuacuaccacaagaacaacaagagcuggauggaaagcgaguuccggguguacagcagcgccaacaacugcaccuucgaguacgugucccagccuuuccugauggaccuggaaggcaagcagggcaacuucaagaaccugcgcgaguucguguucaagaacaucgacggcuacuucaaaaucuacagcaagcacaccccuaucaaccucgugcgggaucugccucagggcuucucugcucuggaaccccugguggaucugcccaucggcaucaacaucacccgguuucagacacugcuggcccugcacagaagcuaccugacaccuggcgauagcagcagcggauggacagcuggugccgccgcuuacuaugugggcuaccugcagccuagaaccuuccugcugaaguacaacgagaacggcaccaucaccgacgccguggauugugcucuggauccucugagcgagacaaagugcacccugaaguccuucaccguggaaaagggcaucuaccagaccagcaacuuccgggugcagcccaccgaauccaucgugcgguuccccaauaucaccaaucugugccccuucggcgagguguucaaugccaccagauucgccucuguguacgccuggaaccggaagcggaucagcaauugcguggccgacuacuccgugcuguacaacuccgccagcuucagcaccuucaagugcuacggcguguccccuaccaagcugaacgaccugugcuucacaaacguguacgccgacagcuucgugauccggggagaugaagugcggcagauugccccuggacagacaggcaagaucgccgacuacaacuacaagcugcccgacgacuucaccggcugugugauugccuggaacagcaagaaccuggacuccaaagucggcggcaacuacaauuaccuguaccggcuguuccggaaguccaaucugaagcccuucgagcgggacaucagcaccgaaaucuaucaggccggcagcaccccuugcaacggcguggaaggcuucaacugcuacuucccacugcaguccuacggcuuucagcccacaaauggcgugggcuaucagcccuacagagugguggugcugagcuucgaacugcugcaugcuccugccacagugugcggcccuaagaaaagcaccaaucucgugaagaacaaaugcgugaacuucaacuucaacggccugaccggcaccggcgugcugacagagagcaacaagaaguuccugccauuccagcaguuuggccgggauaucgccgauaccacagacgccguuagagauccccagacacuggaaauccuggacaucaccccaugcagcuucggcggagugucugugaucaccccuggcaccaacaccagcaaucagguggcagugcuguaccagggcgugaacuguaccgaagugcccguggccauucacgccgaucagcugacaccuacauggcggguguacuccaccggcagcaauguguuucagaccagagccggcugucugaucggagccgagcacgugaacaauagcuacgagugcgacauccccaucggcgcuggcaucugugccagcuaccagacacagacaaacagccccagacgggcuagaagcguggccagccagagcaucauugccuacacaaugucucugggcgccgagaacagcguggccuacuccaacaacucuaucgcuauccccaccaacuucaccaucagcgugaccaccgagauccugccuguguccaugaccaagaccagcguggacugcaccauguacaucugcggcgauuccaccgagugcuccaaccugcugcugcaguacggcagcuucugcacccagcugaauagagcccugacagggaucgccguggaacaggacaagaacacccaagagguguucgcccaagugaagcaaaucuacaagaccccuccuaucaaggacuucggcggcuucaauuucagccagauucugcccgauccuagcaagcccagcaagcggagcuucaucgaggaccugcuguucaacaaagugacacuggccgacgccggcuucaucaagcaguauggcgauugucugggcgacauugccgccagggaucugauuugcgcccagaaguuuaacggacugacagugcugccuccucugcugaccgaugagaugaucgcccaguacacaucugcccugcuggccggcacaaucacaagcggcuggacauuuggagcuggcgccgcucugcagauccccuuugcuaugcagauggccuaccgguucaacggcaucggagugacccagaaugugcuguacgagaaccagaagcugaucgccaaccaguucaacagcgccaucggcaagauccaggacagccugagcagcacagcaagcgcccugggaaagcugcaggacguggucaaccagaaugcccaggcacugaacacccuggucaagcagcuguccuccaacuucggcgccaucagcucugugcugaacgauauccugagcagacuggacccuccugaggccgaggugcagaucgacagacugaucacaggcagacugcagagccuccagacauacgugacccagcagcugaucagagccgccgagauuagagccucugccaaucuggccgccaccaagaugucugagugugugcugggccagagcaagagaguggacuuuugcggcaagggcuaccaccugaugagcuucccucagucugccccucacggcgugguguuucugcacgugacauaugugcccgcucaagagaagaauuucaccaccgcuccagccaucugccacgacggcaaagcccacuuuccuagagaaggcguguucguguccaacggcacccauugguucgugacacagcggaacuucuacgagccccagaucaucaccaccgacaacaccuucgugucuggcaacugcgacguugugaucggcauugugaacaauaccguguacgacccucugcagcccgagcuggacagcuucaaagaggaacuggacaaguacuuuaagaaccacacaagccccgacguggaccugggcgauaucagcggaaucaaugccagcgucgugaacauccagaaagagaucgaccggcugaacgagguggccaagaaucugaacgagagccugaucgaccugcaagaacuggggaaguacgagcaguacaucaaguggcccugguacaucuggcugggcuuuaucgccggacugauugccaucgugauggucacaaucaugcuguguugcaugaccagcugcuguagcugccugaagggcuguuguagcuguggcagcugcugcaaguucgacgaggacgauucugagcccgugcugaagggcgugaaacugcacuacaccugauaauaggcuggagccucgguggccuagcuucuugccccuugggccuccccccagccccuccuccccuuccugcacccguacccccguggucuuugaauaaagucugagugggcggcaaaaaaaaaaaaaaaaaaaaaaaaaaaaaaaaaaaaaaaaaaaaaaaaaaaaaaaaaaaaaaaaaaaaaaaaaaaaaaaaaaaaaaaaaaaaaaaaaaaa

SEQ ID NO: 26233 - RNA, 4095 nt, Artificial Sequence
  SARS-CoV-2/Wuhan/WIV05/2019__EPI_ISL_402128 spike protein mRNA gc mod (1-1273)(K986P_V987P_S477N_D614G)
gggaaauaagagagaaaagaagaguaagaagaaauauaagaccccggcgccgccaccauguucguguuucuggugcugcugccccugguguccagccagugugugaaccugaccaccagaacacagcugccuccagccuacaccaacagcuucaccagaggcguguacuaccccgacaagguguucagauccagcgugcugcacucuacccaggaccuguuccugccuuucuucagcaacgugaccugguuccacgccauccacguguccggcaccaauggcaccaagagauucgacaaccccgugcugcccuucaacgacgggguguacuuugccagcaccgagaaguccaacaucaucagaggcuggaucuucggcaccacacuggacagcaagacccagagccugcugaucgugaacaacgccaccaacguggucaucaaagugugcgaguuccaguucugcaacgaccccuuccugggcgucuacuaccacaagaacaacaagagcuggauggaaagcgaguuccggguguacagcagcgccaacaacugcaccuucgaguacgugucccagccuuuccugauggaccuggaaggcaagcagggcaacuucaagaaccugcgcgaguucguguucaagaacaucgacggcuacuucaaaaucuacagcaagcacaccccuaucaaccucgugcgggaucugccucagggcuucucugcucuggaaccccugguggaucugcccaucggcaucaacaucacccgguuucagacacugcuggcccugcacagaagcuaccugacaccuggcgauagcagcagcggauggacagcuggugccgccgcuuacuaugugggcuaccugcagccuagaaccuuccugcugaaguacaacgagaacggcaccaucaccgacgccguggauugugcucuggauccucugagcgagacaaagugcacccugaaguccuucaccguggaaaagggcaucuaccagaccagcaacuuccgggugcagcccaccgaauccaucgugcgguuccccaauaucaccaaucugugccccuucggcgagguguucaaugccaccagauucgccucuguguacgccuggaaccggaagcggaucagcaauugcguggccgacuacuccgugcuguacaacuccgccagcuucagcaccuucaagugcuacggcguguccccuaccaagcugaacgaccugugcuucacaaacguguacgccgacagcuucgugauccggggagaugaagugcggcagauugccccuggacagacaggcaagaucgccgacuacaacuacaagcugcccgacgacuucaccggcugugugauugccuggaacagcaacaaccuggacuccaaagucggcggcaacuacaauuaccuguaccggcuguuccggaaguccaaucugaagcccuucgagcgggacaucagcaccgaaaucuaucaggccggcaacaccccuugcaacggcguggaaggcuucaacugcuacuucccacugcaguccuacggcuuucagcccacaaauggcgugggcuaucagcccuacagagugguggugcugagcuucgaacugcugcaugcuccugccacagugugcggcccuaagaaaagcaccaaucucgugaagaacaaaugcgugaacuucaacuucaacggccugaccggcaccggcgugcugacagagagcaacaagaaguuccugccauuccagcaguuuggccgggauaucgccgauaccacagacgccguuagagauccccagacacuggaaauccuggacaucaccccaugcagcuucggcggagugucugugaucaccccuggcaccaacaccagcaaucagguggcagugcuguaccagggcgugaacuguaccgaagugcccguggccauucacgccgaucagcugacaccuacauggcggguguacuccaccggcagcaauguguuucagaccagagccggcugucugaucggagccgagcacgugaacaauagcuacgagugcgacauccccaucggcgcuggcaucugugccagcuaccagacacagacaaacagccccagacgggcuagaagcguggccagccagagcaucauugccuacacaaugucucugggcgccgagaacagcguggccuacuccaacaacucuaucgcuauccccaccaacuucaccaucagcgugaccaccgagauccugccuguguccaugaccaagaccagcguggacugcaccauguacaucugcggcgauuccaccgagugcuccaaccugcugcugcaguacggcagcuucugcacccagcugaauagagcccugacagggaucgccguggaacaggacaagaacacccaagagguguucgcccaagugaagcaaaucuacaagaccccuccuaucaaggacuucggcggcuucaauuucagccagauucugcccgauccuagcaagcccagcaagcggagcuucaucgaggaccugcuguucaacaaagugacacuggccgacgccggcuucaucaagcaguauggcgauugucugggcgacauugccgccagggaucugauuugcgcccagaaguuuaacggacugacagugcugccuccucugcugaccgaugagaugaucgcccaguacacaucugcccugcuggccggcacaaucacaagcggcuggacauuuggagcuggcgccgcucugcagauccccuuugcuaugcagauggccuaccgguucaacggcaucggagugacccagaaugugcuguacgagaaccagaagcugaucgccaaccaguucaacagcgccaucggcaagauccaggacagccugagcagcacagcaagcgcccugggaaagcugcaggacguggucaaccagaaugcccaggcacugaacacccuggucaagcagcuguccuccaacuucggcgccaucagcucugugcugaacgauauccugagcagacuggacccuccugaggccgaggugcagaucgacagacugaucacaggcagacugcagagccuccagacauacgugacccagcagcugaucagagccgccgagauuagagccucugccaaucuggccgccaccaagaugucugagugugugcugggccagagcaagagaguggacuuuugcggcaagggcuaccaccugaugagcuucccucagucugccccucacggcgugguguuucugcacgugacauaugugcccgcucaagagaagaauuucaccaccgcuccagccaucugccacgacggcaaagcccacuuuccuagagaaggcguguucguguccaacggcacccauugguucgugacacagcggaacuucuacgagccccagaucaucaccaccgacaacaccuucgugucuggcaacugcgacguugugaucggcauugugaacaauaccguguacgacccucugcagcccgagcuggacagcuucaaagaggaacuggacaaguacuuuaagaaccacacaagccccgacguggaccugggcgauaucagcggaaucaaugccagcgucgugaacauccagaaagagaucgaccggcugaacgagguggccaagaaucugaacgagagccugaucgaccugcaagaacuggggaaguacgagcaguacaucaaguggcccugguacaucuggcugggcuuuaucgccggacugauugccaucgugauggucacaaucaugcuguguugcaugaccagcugcuguagcugccugaagggcuguuguagcuguggcagcugcugcaaguucgacgaggacgauucugagcccgugcugaagggcgugaaacugcacuacaccugauaauaggcuggagccucgguggccuagcuucuugccccuugggccuccccccagccccuccuccccuuccugcacccguacccccguggucuuugaauaaagucugagugggcggcaaaaaaaaaaaaaaaaaaaaaaaaaaaaaaaaaaaaaaaaaaaaaaaaaaaaaaaaaaaaaaaaaaaaaaaaaaaaaaaaaaaaaaaaaaaaaaaaaaaa

SEQ ID NO: 26234 - RNA, 4095 nt, Artificial Sequence
  SARS-CoV-2/Wuhan/WIV05/2019__EPI_ISL_402128 spike protein mRNA gc mod (1-1273)(K986P_V987P_N501Y_D614G)
gggaaauaagagagaaaagaagaguaagaagaaauauaagaccccggcgccgccaccauguucguguuucuggugcugcugccccugguguccagccagugugugaaccugaccaccagaacacagcugccuccagccuacaccaacagcuucaccagaggcguguacuaccccgacaagguguucagauccagcgugcugcacucuacccaggaccuguuccugccuuucuucagcaacgugaccugguuccacgccauccacguguccggcaccaauggcaccaagagauucgacaaccccgugcugcccuucaacgacgggguguacuuugccagcaccgagaaguccaacaucaucagaggcuggaucuucggcaccacacuggacagcaagacccagagccugcugaucgugaacaacgccaccaacguggucaucaaagugugcgaguuccaguucugcaacgaccccuuccugggcgucuacuaccacaagaacaacaagagcuggauggaaagcgaguuccggguguacagcagcgccaacaacugcaccuucgaguacgugucccagccuuuccugauggaccuggaaggcaagcagggcaacuucaagaaccugcgcgaguucguguucaagaacaucgacggcuacuucaaaaucuacagcaagcacaccccuaucaaccucgugcgggaucugccucagggcuucucugcucuggaaccccugguggaucugcccaucggcaucaacaucacccgguuucagacacugcuggcccugcacagaagcuaccugacaccuggcgauagcagcagcggauggacagcuggugccgccgcuuacuaugugggcuaccugcagccuagaaccuuccugcugaaguacaacgagaacggcaccaucaccgacgccguggauugugcucuggauccucugagcgagacaaagugcacccugaaguccuucaccguggaaaagggcaucuaccagaccagcaacuuccgggugcagcccaccgaauccaucgugcgguuccccaauaucaccaaucugugccccuucggcgagguguucaaugccaccagauucgccucuguguacgccuggaaccggaagcggaucagcaauugcguggccgacuacuccgugcuguacaacuccgccagcuucagcaccuucaagugcuacggcguguccccuaccaagcugaacgaccugugcuucacaaacguguacgccgacagcuucgugauccggggagaugaagugcggcagauugccccuggacagacaggcaagaucgccgacuacaacuacaagcugcccgacgacuucaccggcugugugauugccuggaacagcaacaaccuggacuccaaagucggcggcaacuacaauuaccuguaccggcuguuccggaaguccaaucugaagcccuucgagcgggacaucagcaccgaaaucuaucaggccggcagcaccccuugcaacggcguggaaggcuucaacugcuacuucccacugcaguccuacggcuuucagcccacauacggcgugggcuaucagcccuacagagugguggugcugagcuucgaacugcugcaugcuccugccacagugugcggcccuaagaaaagcaccaaucucgugaagaacaaaugcgugaacuucaacuucaacggccugaccggcaccggcgugcugacagagagcaacaagaaguuccugccauuccagcaguuuggccgggauaucgccgauaccacagacgccguuagagauccccagacacuggaaauccuggacaucaccccaugcagcuucggcggagugucugugaucaccccuggcaccaacaccagcaaucagguggcagugcuguaccagggcgugaacuguaccgaagugcccguggccauucacgccgaucagcugacaccuacauggcggguguacuccaccggcagcaauguguuucagaccagagccggcugucugaucggagccgagcacgugaacaauagcuacgagugcgacauccccaucggcgcuggcaucugugccagcuaccagacacagacaaacagccccagacgggcuagaagcguggccagccagagcaucauugccuacacaaugucucugggcgccgagaacagcguggccuacuccaacaacucuaucgcuauccccaccaacuucaccaucagcgugaccaccgagauccugccuguguccaugaccaagaccagcguggacugcaccauguacaucugcggcgauuccaccgagugcuccaaccugcugcugcaguacggcagcuucugcacccagcugaauagagcccugacagggaucgccguggaacaggacaagaacacccaagagguguucgcccaagugaagcaaaucuacaagaccccuccuaucaaggacuucggcggcuucaauuucagccagauucugcccgauccuagcaagcccagcaagcggagcuucaucgaggaccugcuguucaacaaagugacacuggccgacgccggcuucaucaagcaguauggcgauugucugggcgacauugccgccagggaucugauuugcgcccagaaguuuaacggacugacagugcugccuccucugcugaccgaugagaugaucgcccaguacacaucugcccugcuggccggcacaaucacaagcggcuggacauuuggagcuggcgccgcucugcagauccccuuugcuaugcagauggccuaccgguucaacggcaucggagugacccagaaugugcuguacgagaaccagaagcugaucgccaaccaguucaacagcgccaucggcaagauccaggacagccugagcagcacagcaagcgcccugggaaagcugcaggacguggucaaccagaaugcccaggcacugaacacccuggucaagcagcuguccuccaacuucggcgccaucagcucugugcugaacgauauccugagcagacuggacccuccugaggccgaggugcagaucgacagacugaucacaggcagacugcagagccuccagacauacgugacccagcagcugaucagagccgccgagauuagagccucugccaaucuggccgccaccaagaugucugagugugugcugggccagagcaagagaguggacuuuugcggcaagggcuaccaccugaugagcuucccucagucugccccucacggcgugguguuucugcacgugacauaugugcccgcucaagagaagaauuucaccaccgcuccagccaucugccacgacggcaaagcccacuuuccuagagaaggcguguucguguccaacggcacccauugguucgugacacagcggaacuucuacgagccccagaucaucaccaccgacaacaccuucgugucuggcaacugcgacguugugaucggcauugugaacaauaccguguacgacccucugcagcccgagcuggacagcuucaaagaggaacuggacaaguacuuuaagaaccacacaagccccgacguggaccugggcgauaucagcggaaucaaugccagcgucgugaacauccagaaagagaucgaccggcugaacgagguggccaagaaucugaacgagagccugaucgaccugcaagaacuggggaaguacgagcaguacaucaaguggcccugguacaucuggcugggcuuuaucgccggacugauugccaucgugauggucacaaucaugcuguguugcaugaccagcugcuguagcugccugaagggcuguuguagcuguggcagcugcugcaaguucgacgaggacgauucugagcccgugcugaagggcgugaaacugcacuacaccugauaauaggcuggagccucgguggccuagcuucuugccccuugggccuccccccagccccuccuccccuuccugcacccguacccccguggucuuugaauaaagucugagugggcggcaaaaaaaaaaaaaaaaaaaaaaaaaaaaaaaaaaaaaaaaaaaaaaaaaaaaaaaaaaaaaaaaaaaaaaaaaaaaaaaaaaaaaaaaaaaaaaaaaaaa

SEQ ID NO: 26235 - RNA, 4089 nt, Artificial Sequence
  SARS-CoV-2/Wuhan/WIV05/2019__EPI_ISL_402128 spike protein mRNA gc mod (1-1273)(K986P_V987P_H69del_V70del_D614G)
gggaaauaagagagaaaagaagaguaagaagaaauauaagaccccggcgccgccaccauguucguguuucuggugcugcugccccugguguccagccagugugugaaccugaccaccagaacacagcugccuccagccuacaccaacagcuucaccagaggcguguacuaccccgacaagguguucagauccagcgugcugcacucuacccaggaccuguuccugccuuucuucagcaacgugaccugguuccacgccaucuccggcaccaauggcaccaagagauucgacaaccccgugcugcccuucaacgacgggguguacuuugccagcaccgagaaguccaacaucaucagaggcuggaucuucggcaccacacuggacagcaagacccagagccugcugaucgugaacaacgccaccaacguggucaucaaagugugcgaguuccaguucugcaacgaccccuuccugggcgucuacuaccacaagaacaacaagagcuggauggaaagcgaguuccggguguacagcagcgccaacaacugcaccuucgaguacgugucccagccuuuccugauggaccuggaaggcaagcagggcaacuucaagaaccugcgcgaguucguguucaagaacaucgacggcuacuucaaaaucuacagcaagcacaccccuaucaaccucgugcgggaucugccucagggcuucucugcucuggaaccccugguggaucugcccaucggcaucaacaucacccgguuucagacacugcuggcccugcacagaagcuaccugacaccuggcgauagcagcagcggauggacagcuggugccgccgcuuacuaugugggcuaccugcagccuagaaccuuccugcugaaguacaacgagaacggcaccaucaccgacgccguggauugugcucuggauccucugagcgagacaaagugcacccugaaguccuucaccguggaaaagggcaucuaccagaccagcaacuuccgggugcagcccaccgaauccaucgugcgguuccccaauaucaccaaucugugccccuucggcgagguguucaaugccaccagauucgccucuguguacgccuggaaccggaagcggaucagcaauugcguggccgacuacuccgugcuguacaacuccgccagcuucagcaccuucaagugcuacggcguguccccuaccaagcugaacgaccugugcuucacaaacguguacgccgacagcuucgugauccggggagaugaagugcggcagauugccccuggacagacaggcaagaucgccgacuacaacuacaagcugcccgacgacuucaccggcugugugauugccuggaacagcaacaaccuggacuccaaagucggcggcaacuacaauuaccuguaccggcuguuccggaaguccaaucugaagcccuucgagcgggacaucagcaccgaaaucuaucaggccggcagcaccccuugcaacggcguggaaggcuucaacugcuacuucccacugcaguccuacggcuuucagcccacaaauggcgugggcuaucagcccuacagagugguggugcugagcuucgaacugcugcaugcuccugccacagugugcggcccuaagaaaagcaccaaucucgugaagaacaaaugcgugaacuucaacuucaacggccugaccggcaccggcgugcugacagagagcaacaagaaguuccugccauuccagcaguuuggccgggauaucgccgauaccacagacgccguuagagauccccagacacuggaaauccuggacaucaccccaugcagcuucggcggagugucugugaucaccccuggcaccaacaccagcaaucagguggcagugcuguaccagggcgugaacuguaccgaagugcccguggccauucacgccgaucagcugacaccuacauggcggguguacuccaccggcagcaauguguuucagaccagagccggcugucugaucggagccgagcacgugaacaauagcuacgagugcgacauccccaucggcgcuggcaucugugccagcuaccagacacagacaaacagccccagacgggcuagaagcguggccagccagagcaucauugccuacacaaugucucugggcgccgagaacagcguggccuacuccaacaacucuaucgcuauccccaccaacuucaccaucagcgugaccaccgagauccugccuguguccaugaccaagaccagcguggacugcaccauguacaucugcggcgauuccaccgagugcuccaaccugcugcugcaguacggcagcuucugcacccagcugaauagagcccugacagggaucgccguggaacaggacaagaacacccaagagguguucgcccaagugaagcaaaucuacaagaccccuccuaucaaggacuucggcggcuucaauuucagccagauucugcccgauccuagcaagcccagcaagcggagcuucaucgaggaccugcuguucaacaaagugacacuggccgacgccggcuucaucaagcaguauggcgauugucugggcgacauugccgccagggaucugauuugcgcccagaaguuuaacggacugacagugcugccuccucugcugaccgaugagaugaucgcccaguacacaucugcccugcuggccggcacaaucacaagcggcuggacauuuggagcuggcgccgcucugcagauccccuuugcuaugcagauggccuaccgguucaacggcaucggagugacccagaaugugcuguacgagaaccagaagcugaucgccaaccaguucaacagcgccaucggcaagauccaggacagccugagcagcacagcaagcgcccugggaaagcugcaggacguggucaaccagaaugcccaggcacugaacacccuggucaagcagcuguccuccaacuucggcgccaucagcucugugcugaacgauauccugagcagacuggacccuccugaggccgaggugcagaucgacagacugaucacaggcagacugcagagccuccagacauacgugacccagcagcugaucagagccgccgagauuagagccucugccaaucuggccgccaccaagaugucugagugugugcugggccagagcaagagaguggacuuuugcggcaagggcuaccaccugaugagcuucccucagucugccccucacggcgugguguuucugcacgugacauaugugcccgcucaagagaagaauuucaccaccgcuccagccaucugccacgacggcaaagcccacuuuccuagagaaggcguguucguguccaacggcacccauugguucgugacacagcggaacuucuacgagccccagaucaucaccaccgacaacaccuucgugucuggcaacugcgacguugugaucggcauugugaacaauaccguguacgacccucugcagcccgagcuggacagcuucaaagaggaacuggacaaguacuuuaagaaccacacaagccccgacguggaccugggcgauaucagcggaaucaaugccagcgucgugaacauccagaaagagaucgaccggcugaacgagguggccaagaaucugaacgagagccugaucgaccugcaagaacuggggaaguacgagcaguacaucaaguggcccugguacaucuggcugggcuuuaucgccggacugauugccaucgugauggucacaaucaugcuguguugcaugaccagcugcuguagcugccugaagggcuguuguagcuguggcagcugcugcaaguucgacgaggacgauucugagcccgugcugaagggcgugaaacugcacuacaccugauaauaggcuggagccucgguggccuagcuucuugccccuugggccuccccccagccccuccuccccuuccugcacccguacccccguggucuuugaauaaagucugagugggcggcaaaaaaaaaaaaaaaaaaaaaaaaaaaaaaaaaaaaaaaaaaaaaaaaaaaaaaaaaaaaaaaaaaaaaaaaaaaaaaaaaaaaaaaaaaaaaaaaaaaa

SEQ ID NO: 26236 - RNA, 4095 nt, Artificial Sequence
  SARS-CoV-2/Wuhan/WIV05/2019__EPI_ISL_402128 spike protein mRNA gc mod (1-1273)(K986P_V987P_Y453F_D614G)
gggaaauaagagagaaaagaagaguaagaagaaauauaagaccccggcgccgccaccauguucguguuucuggugcugcugccccugguguccagccagugugugaaccugaccaccagaacacagcugccuccagccuacaccaacagcuucaccagaggcguguacuaccccgacaagguguucagauccagcgugcugcacucuacccaggaccuguuccugccuuucuucagcaacgugaccugguuccacgccauccacguguccggcaccaauggcaccaagagauucgacaaccccgugcugcccuucaacgacgggguguacuuugccagcaccgagaaguccaacaucaucagaggcuggaucuucggcaccacacuggacagcaagacccagagccugcugaucgugaacaacgccaccaacguggucaucaaagugugcgaguuccaguucugcaacgaccccuuccugggcgucuacuaccacaagaacaacaagagcuggauggaaagcgaguuccggguguacagcagcgccaacaacugcaccuucgaguacgugucccagccuuuccugauggaccuggaaggcaagcagggcaacuucaagaaccugcgcgaguucguguucaagaacaucgacggcuacuucaaaaucuacagcaagcacaccccuaucaaccucgugcgggaucugccucagggcuucucugcucuggaaccccugguggaucugcccaucggcaucaacaucacccgguuucagacacugcuggcccugcacagaagcuaccugacaccuggcgauagcagcagcggauggacagcuggugccgccgcuuacuaugugggcuaccugcagccuagaaccuuccugcugaaguacaacgagaacggcaccaucaccgacgccguggauugugcucuggauccucugagcgagacaaagugcacccugaaguccuucaccguggaaaagggcaucuaccagaccagcaacuuccgggugcagcccaccgaauccaucgugcgguuccccaauaucaccaaucugugccccuucggcgagguguucaaugccaccagauucgccucuguguacgccuggaaccggaagcggaucagcaauugcguggccgacuacuccgugcuguacaacuccgccagcuucagcaccuucaagugcuacggcguguccccuaccaagcugaacgaccugugcuucacaaacguguacgccgacagcuucgugauccggggagaugaagugcggcagauugccccuggacagacaggcaagaucgccgacuacaacuacaagcugcccgacgacuucaccggcugugugauugccuggaacagcaacaaccuggacuccaaagucggcggcaacuacaauuaccuguuccggcuguuccggaaguccaaucugaagcccuucgagcgggacaucagcaccgaaaucuaucaggccggcagcaccccuugcaacggcguggaaggcuucaacugcuacuucccacugcaguccuacggcuuucagcccacaaauggcgugggcuaucagcccuacagagugguggugcugagcuucgaacugcugcaugcuccugccacagugugcggcccuaagaaaagcaccaaucucgugaagaacaaaugcgugaacuucaacuucaacggccugaccggcaccggcgugcugacagagagcaacaagaaguuccugccauuccagcaguuuggccgggauaucgccgauaccacagacgccguuagagauccccagacacuggaaauccuggacaucaccccaugcagcuucggcggagugucugugaucaccccuggcaccaacaccagcaaucagguggcagugcuguaccagggcgugaacuguaccgaagugcccguggccauucacgccgaucagcugacaccuacauggcggguguacuccaccggcagcaauguguuucagaccagagccggcugucugaucggagccgagcacgugaacaauagcuacgagugcgacauccccaucggcgcuggcaucugugccagcuaccagacacagacaaacagccccagacgggcuagaagcguggccagccagagcaucauugccuacacaaugucucugggcgccgagaacagcguggccuacuccaacaacucuaucgcuauccccaccaacuucaccaucagcgugaccaccgagauccugccuguguccaugaccaagaccagcguggacugcaccauguacaucugcggcgauuccaccgagugcuccaaccugcugcugcaguacggcagcuucugcacccagcugaauagagcccugacagggaucgccguggaacaggacaagaacacccaagagguguucgcccaagugaagcaaaucuacaagaccccuccuaucaaggacuucggcggcuucaauuucagccagauucugcccgauccuagcaagcccagcaagcggagcuucaucgaggaccugcuguucaacaaagugacacuggccgacgccggcuucaucaagcaguauggcgauugucugggcgacauugccgccagggaucugauuugcgcccagaaguuuaacggacugacagugcugccuccucugcugaccgaugagaugaucgcccaguacacaucugcccugcuggccggcacaaucacaagcggcuggacauuuggagcuggcgccgcucugcagauccccuuugcuaugcagauggccuaccgguucaacggcaucggagugacccagaaugugcuguacgagaaccagaagcugaucgccaaccaguucaacagcgccaucggcaagauccaggacagccugagcagcacagcaagcgcccugggaaagcugcaggacguggucaaccagaaugcccaggcacugaacacccuggucaagcagcuguccuccaacuucggcgccaucagcucugugcugaacgauauccugagcagacuggacccuccugaggccgaggugcagaucgacagacugaucacaggcagacugcagagccuccagacauacgugacccagcagcugaucagagccgccgagauuagagccucugccaaucuggccgccaccaagaugucugagugugugcugggccagagcaagagaguggacuuuugcggcaagggcuaccaccugaugagcuucccucagucugccccucacggcgugguguuucugcacgugacauaugugcccgcucaagagaagaauuucaccaccgcuccagccaucugccacgacggcaaagcccacuuuccuagagaaggcguguucguguccaacggcacccauugguucgugacacagcggaacuucuacgagccccagaucaucaccaccgacaacaccuucgugucuggcaacugcgacguugugaucggcauugugaacaauaccguguacgacccucugcagcccgagcuggacagcuucaaagaggaacuggacaaguacuuuaagaaccacacaagccccgacguggaccugggcgauaucagcggaaucaaugccagcgucgugaacauccagaaagagaucgaccggcugaacgagguggccaagaaucugaacgagagccugaucgaccugcaagaacuggggaaguacgagcaguacaucaaguggcccugguacaucuggcugggcuuuaucgccggacugauugccaucgugauggucacaaucaugcuguguugcaugaccagcugcuguagcugccugaagggcuguuguagcuguggcagcugcugcaaguucgacgaggacgauucugagcccgugcugaagggcgugaaacugcacuacaccugauaauaggcuggagccucgguggccuagcuucuugccccuugggccuccccccagccccuccuccccuuccugcacccguacccccguggucuuugaauaaagucugagugggcggcaaaaaaaaaaaaaaaaaaaaaaaaaaaaaaaaaaaaaaaaaaaaaaaaaaaaaaaaaaaaaaaaaaaaaaaaaaaaaaaaaaaaaaaaaaaaaaaaaaaa

SEQ ID NO: 26237 - RNA, 4095 nt, Artificial Sequence
  SARS-CoV-2/Wuhan/WIV05/2019__EPI_ISL_402128 spike protein mRNA gc mod (1-1273)(K986P_V987P_D614G_I692V)
gggaaauaagagagaaaagaagaguaagaagaaauauaagaccccggcgccgccaccauguucguguuucuggugcugcugccccugguguccagccagugugugaaccugaccaccagaacacagcugccuccagccuacaccaacagcuucaccagaggcguguacuaccccgacaagguguucagauccagcgugcugcacucuacccaggaccuguuccugccuuucuucagcaacgugaccugguuccacgccauccacguguccggcaccaauggcaccaagagauucgacaaccccgugcugcccuucaacgacgggguguacuuugccagcaccgagaaguccaacaucaucagaggcuggaucuucggcaccacacuggacagcaagacccagagccugcugaucgugaacaacgccaccaacguggucaucaaagugugcgaguuccaguucugcaacgaccccuuccugggcgucuacuaccacaagaacaacaagagcuggauggaaagcgaguuccggguguacagcagcgccaacaacugcaccuucgaguacgugucccagccuuuccugauggaccuggaaggcaagcagggcaacuucaagaaccugcgcgaguucguguucaagaacaucgacggcuacuucaaaaucuacagcaagcacaccccuaucaaccucgugcgggaucugccucagggcuucucugcucuggaaccccugguggaucugcccaucggcaucaacaucacccgguuucagacacugcuggcccugcacagaagcuaccugacaccuggcgauagcagcagcggauggacagcuggugccgccgcuuacuaugugggcuaccugcagccuagaaccuuccugcugaaguacaacgagaacggcaccaucaccgacgccguggauugugcucuggauccucugagcgagacaaagugcacccugaaguccuucaccguggaaaagggcaucuaccagaccagcaacuuccgggugcagcccaccgaauccaucgugcgguuccccaauaucaccaaucugugccccuucggcgagguguucaaugccaccagauucgccucuguguacgccuggaaccggaagcggaucagcaauugcguggccgacuacuccgugcuguacaacuccgccagcuucagcaccuucaagugcuacggcguguccccuaccaagcugaacgaccugugcuucacaaacguguacgccgacagcuucgugauccggggagaugaagugcggcagauugccccuggacagacaggcaagaucgccgacuacaacuacaagcugcccgacgacuucaccggcugugugauugccuggaacagcaacaaccuggacuccaaagucggcggcaacuacaauuaccuguaccggcuguuccggaaguccaaucugaagcccuucgagcgggacaucagcaccgaaaucuaucaggccggcagcaccccuugcaacggcguggaaggcuucaacugcuacuucccacugcaguccuacggcuuucagcccacaaauggcgugggcuaucagcccuacagagugguggugcugagcuucgaacugcugcaugcuccugccacagugugcggcccuaagaaaagcaccaaucucgugaagaacaaaugcgugaacuucaacuucaacggccugaccggcaccggcgugcugacagagagcaacaagaaguuccugccauuccagcaguuuggccgggauaucgccgauaccacagacgccguuagagauccccagacacuggaaauccuggacaucaccccaugcagcuucggcggagugucugugaucaccccuggcaccaacaccagcaaucagguggcagugcuguaccagggcgugaacuguaccgaagugcccguggccauucacgccgaucagcugacaccuacauggcggguguacuccaccggcagcaauguguuucagaccagagccggcugucugaucggagccgagcacgugaacaauagcuacgagugcgacauccccaucggcgcuggcaucugugccagcuaccagacacagacaaacagccccagacgggcuagaagcguggccagccagagcgugauugccuacacaaugucucugggcgccgagaacagcguggccuacuccaacaacucuaucgcuauccccaccaacuucaccaucagcgugaccaccgagauccugccuguguccaugaccaagaccagcguggacugcaccauguacaucugcggcgauuccaccgagugcuccaaccugcugcugcaguacggcagcuucugcacccagcugaauagagcccugacagggaucgccguggaacaggacaagaacacccaagagguguucgcccaagugaagcaaaucuacaagaccccuccuaucaaggacuucggcggcuucaauuucagccagauucugcccgauccuagcaagcccagcaagcggagcuucaucgaggaccugcuguucaacaaagugacacuggccgacgccggcuucaucaagcaguauggcgauugucugggcgacauugccgccagggaucugauuugcgcccagaaguuuaacggacugacagugcugccuccucugcugaccgaugagaugaucgcccaguacacaucugcccugcuggccggcacaaucacaagcggcuggacauuuggagcuggcgccgcucugcagauccccuuugcuaugcagauggccuaccgguucaacggcaucggagugacccagaaugugcuguacgagaaccagaagcugaucgccaaccaguucaacagcgccaucggcaagauccaggacagccugagcagcacagcaagcgcccugggaaagcugcaggacguggucaaccagaaugcccaggcacugaacacccuggucaagcagcuguccuccaacuucggcgccaucagcucugugcugaacgauauccugagcagacuggacccuccugaggccgaggugcagaucgacagacugaucacaggcagacugcagagccuccagacauacgugacccagcagcugaucagagccgccgagauuagagccucugccaaucuggccgccaccaagaugucugagugugugcugggccagagcaagagaguggacuuuugcggcaagggcuaccaccugaugagcuucccucagucugccccucacggcgugguguuucugcacgugacauaugugcccgcucaagagaagaauuucaccaccgcuccagccaucugccacgacggcaaagcccacuuuccuagagaaggcguguucguguccaacggcacccauugguucgugacacagcggaacuucuacgagccccagaucaucaccaccgacaacaccuucgugucuggcaacugcgacguugugaucggcauugugaacaauaccguguacgacccucugcagcccgagcuggacagcuucaaagaggaacuggacaaguacuuuaagaaccacacaagccccgacguggaccugggcgauaucagcggaaucaaugccagcgucgugaacauccagaaagagaucgaccggcugaacgagguggccaagaaucugaacgagagccugaucgaccugcaagaacuggggaaguacgagcaguacaucaaguggcccugguacaucuggcugggcuuuaucgccggacugauugccaucgugauggucacaaucaugcuguguugcaugaccagcugcuguagcugccugaagggcuguuguagcuguggcagcugcugcaaguucgacgaggacgauucugagcccgugcugaagggcgugaaacugcacuacaccugauaauaggcuggagccucgguggccuagcuucuugccccuugggccuccccccagccccuccuccccuuccugcacccguacccccguggucuuugaauaaagucugagugggcggcaaaaaaaaaaaaaaaaaaaaaaaaaaaaaaaaaaaaaaaaaaaaaaaaaaaaaaaaaaaaaaaaaaaaaaaaaaaaaaaaaaaaaaaaaaaaaaaaaaaa

SEQ ID NO: 26238 - RNA, 4095 nt, Artificial Sequence
  SARS-CoV-2/Wuhan/WIV05/2019__EPI_ISL_402128 spike protein mRNA gc mod (1-1273)(K986P_V987P_D614G_M1229I)
gggaaauaagagagaaaagaagaguaagaagaaauauaagaccccggcgccgccaccauguucguguuucuggugcugcugccccugguguccagccagugugugaaccugaccaccagaacacagcugccuccagccuacaccaacagcuucaccagaggcguguacuaccccgacaagguguucagauccagcgugcugcacucuacccaggaccuguuccugccuuucuucagcaacgugaccugguuccacgccauccacguguccggcaccaauggcaccaagagauucgacaaccccgugcugcccuucaacgacgggguguacuuugccagcaccgagaaguccaacaucaucagaggcuggaucuucggcaccacacuggacagcaagacccagagccugcugaucgugaacaacgccaccaacguggucaucaaagugugcgaguuccaguucugcaacgaccccuuccugggcgucuacuaccacaagaacaacaagagcuggauggaaagcgaguuccggguguacagcagcgccaacaacugcaccuucgaguacgugucccagccuuuccugauggaccuggaaggcaagcagggcaacuucaagaaccugcgcgaguucguguucaagaacaucgacggcuacuucaaaaucuacagcaagcacaccccuaucaaccucgugcgggaucugccucagggcuucucugcucuggaaccccugguggaucugcccaucggcaucaacaucacccgguuucagacacugcuggcccugcacagaagcuaccugacaccuggcgauagcagcagcggauggacagcuggugccgccgcuuacuaugugggcuaccugcagccuagaaccuuccugcugaaguacaacgagaacggcaccaucaccgacgccguggauugugcucuggauccucugagcgagacaaagugcacccugaaguccuucaccguggaaaagggcaucuaccagaccagcaacuuccgggugcagcccaccgaauccaucgugcgguuccccaauaucaccaaucugugccccuucggcgagguguucaaugccaccagauucgccucuguguacgccuggaaccggaagcggaucagcaauugcguggccgacuacuccgugcuguacaacuccgccagcuucagcaccuucaagugcuacggcguguccccuaccaagcugaacgaccugugcuucacaaacguguacgccgacagcuucgugauccggggagaugaagugcggcagauugccccuggacagacaggcaagaucgccgacuacaacuacaagcugcccgacgacuucaccggcugugugauugccuggaacagcaacaaccuggacuccaaagucggcggcaacuacaauuaccuguaccggcuguuccggaaguccaaucugaagcccuucgagcgggacaucagcaccgaaaucuaucaggccggcagcaccccuugcaacggcguggaaggcuucaacugcuacuucccacugcaguccuacggcuuucagcccacaaauggcgugggcuaucagcccuacagagugguggugcugagcuucgaacugcugcaugcuccugccacagugugcggcccuaagaaaagcaccaaucucgugaagaacaaaugcgugaacuucaacuucaacggccugaccggcaccggcgugcugacagagagcaacaagaaguuccugccauuccagcaguuuggccgggauaucgccgauaccacagacgccguuagagauccccagacacuggaaauccuggacaucaccccaugcagcuucggcggagugucugugaucaccccuggcaccaacaccagcaaucagguggcagugcuguaccagggcgugaacuguaccgaagugcccguggccauucacgccgaucagcugacaccuacauggcggguguacuccaccggcagcaauguguuucagaccagagccggcugucugaucggagccgagcacgugaacaauagcuacgagugcgacauccccaucggcgcuggcaucugugccagcuaccagacacagacaaacagccccagacgggcuagaagcguggccagccagagcaucauugccuacacaaugucucugggcgccgagaacagcguggccuacuccaacaacucuaucgcuauccccaccaacuucaccaucagcgugaccaccgagauccugccuguguccaugaccaagaccagcguggacugcaccauguacaucugcggcgauuccaccgagugcuccaaccugcugcugcaguacggcagcuucugcacccagcugaauagagcccugacagggaucgccguggaacaggacaagaacacccaagagguguucgcccaagugaagcaaaucuacaagaccccuccuaucaaggacuucggcggcuucaauuucagccagauucugcccgauccuagcaagcccagcaagcggagcuucaucgaggaccugcuguucaacaaagugacacuggccgacgccggcuucaucaagcaguauggcgauugucugggcgacauugccgccagggaucugauuugcgcccagaaguuuaacggacugacagugcugccuccucugcugaccgaugagaugaucgcccaguacacaucugcccugcuggccggcacaaucacaagcggcuggacauuuggagcuggcgccgcucugcagauccccuuugcuaugcagauggccuaccgguucaacggcaucggagugacccagaaugugcuguacgagaaccagaagcugaucgccaaccaguucaacagcgccaucggcaagauccaggacagccugagcagcacagcaagcgcccugggaaagcugcaggacguggucaaccagaaugcccaggcacugaacacccuggucaagcagcuguccuccaacuucggcgccaucagcucugugcugaacgauauccugagcagacuggacccuccugaggccgaggugcagaucgacagacugaucacaggcagacugcagagccuccagacauacgugacccagcagcugaucagagccgccgagauuagagccucugccaaucuggccgccaccaagaugucugagugugugcugggccagagcaagagaguggacuuuugcggcaagggcuaccaccugaugagcuucccucagucugccccucacggcgugguguuucugcacgugacauaugugcccgcucaagagaagaauuucaccaccgcuccagccaucugccacgacggcaaagcccacuuuccuagagaaggcguguucguguccaacggcacccauugguucgugacacagcggaacuucuacgagccccagaucaucaccaccgacaacaccuucgugucuggcaacugcgacguugugaucggcauugugaacaauaccguguacgacccucugcagcccgagcuggacagcuucaaagaggaacuggacaaguacuuuaagaaccacacaagccccgacguggaccugggcgauaucagcggaaucaaugccagcgucgugaacauccagaaagagaucgaccggcugaacgagguggccaagaaucugaacgagagccugaucgaccugcaagaacuggggaaguacgagcaguacaucaaguggcccugguacaucuggcugggcuuuaucgccggacugauugccaucgugaucgucacaaucaugcuguguugcaugaccagcugcuguagcugccugaagggcuguuguagcuguggcagcugcugcaaguucgacgaggacgauucugagcccgugcugaagggcgugaaacugcacuacaccugauaauaggcuggagccucgguggccuagcuucuugccccuugggccuccccccagccccuccuccccuuccugcacccguacccccguggucuuugaauaaagucugagugggcggcaaaaaaaaaaaaaaaaaaaaaaaaaaaaaaaaaaaaaaaaaaaaaaaaaaaaaaaaaaaaaaaaaaaaaaaaaaaaaaaaaaaaaaaaaaaaaaaaaaaa

SEQ ID NO: 26239 - RNA, 4089 nt, Artificial Sequence
  SARS-CoV-2/Wuhan/WIV05/2019__EPI_ISL_402128 spike protein mRNA gc mod (1-1273)(K986P_V987P_H69del_V70del_A222V_Y453F_S477N_D614G_I692V)
gggaaauaagagagaaaagaagaguaagaagaaauauaagaccccggcgccgccaccauguucguguuucuggugcugcugccccugguguccagccagugugugaaccugaccaccagaacacagcugccuccagccuacaccaacagcuucaccagaggcguguacuaccccgacaagguguucagauccagcgugcugcacucuacccaggaccuguuccugccuuucuucagcaacgugaccugguuccacgccaucuccggcaccaauggcaccaagagauucgacaaccccgugcugcccuucaacgacgggguguacuuugccagcaccgagaaguccaacaucaucagaggcuggaucuucggcaccacacuggacagcaagacccagagccugcugaucgugaacaacgccaccaacguggucaucaaagugugcgaguuccaguucugcaacgaccccuuccugggcgucuacuaccacaagaacaacaagagcuggauggaaagcgaguuccggguguacagcagcgccaacaacugcaccuucgaguacgugucccagccuuuccugauggaccuggaaggcaagcagggcaacuucaagaaccugcgcgaguucguguucaagaacaucgacggcuacuucaaaaucuacagcaagcacaccccuaucaaccucgugcgggaucugccucagggcuucucugugcuggaaccccugguggaucugcccaucggcaucaacaucacccgguuucagacacugcuggcccugcacagaagcuaccugacaccuggcgauagcagcagcggauggacagcuggugccgccgcuuacuaugugggcuaccugcagccuagaaccuuccugcugaaguacaacgagaacggcaccaucaccgacgccguggauugugcucuggauccucugagcgagacaaagugcacccugaaguccuucaccguggaaaagggcaucuaccagaccagcaacuuccgggugcagcccaccgaauccaucgugcgguuccccaauaucaccaaucugugccccuucggcgagguguucaaugccaccagauucgccucuguguacgccuggaaccggaagcggaucagcaauugcguggccgacuacuccgugcuguacaacuccgccagcuucagcaccuucaagugcuacggcguguccccuaccaagcugaacgaccugugcuucacaaacguguacgccgacagcuucgugauccggggagaugaagugcggcagauugccccuggacagacaggcaagaucgccgacuacaacuacaagcugcccgacgacuucaccggcugugugauugccuggaacagcaacaaccuggacuccaaagucggcggcaacuacaauuaccuguuccggcuguuccggaaguccaaucugaagcccuucgagcgggacaucagcaccgaaaucuaucaggccggcaacaccccuugcaacggcguggaaggcuucaacugcuacuucccacugcaguccuacggcuuucagcccacaaauggcgugggcuaucagcccuacagagugguggugcugagcuucgaacugcugcaugcuccugccacagugugcggcccuaagaaaagcaccaaucucgugaagaacaaaugcgugaacuucaacuucaacggccugaccggcaccggcgugcugacagagagcaacaagaaguuccugccauuccagcaguuuggccgggauaucgccgauaccacagacgccguuagagauccccagacacuggaaauccuggacaucaccccaugcagcuucggcggagugucugugaucaccccuggcaccaacaccagcaaucagguggcagugcuguaccagggcgugaacuguaccgaagugcccguggccauucacgccgaucagcugacaccuacauggcggguguacuccaccggcagcaauguguuucagaccagagccggcugucugaucggagccgagcacgugaacaauagcuacgagugcgacauccccaucggcgcuggcaucugugccagcuaccagacacagacaaacagccccagacgggcuagaagcguggccagccagagcgugauugccuacacaaugucucugggcgccgagaacagcguggccuacuccaacaacucuaucgcuauccccaccaacuucaccaucagcgugaccaccgagauccugccuguguccaugaccaagaccagcguggacugcaccauguacaucugcggcgauuccaccgagugcuccaaccugcugcugcaguacggcagcuucugcacccagcugaauagagcccugacagggaucgccguggaacaggacaagaacacccaagagguguucgcccaagugaagcaaaucuacaagaccccuccuaucaaggacuucggcggcuucaauuucagccagauucugcccgauccuagcaagcccagcaagcggagcuucaucgaggaccugcuguucaacaaagugacacuggccgacgccggcuucaucaagcaguauggcgauugucugggcgacauugccgccagggaucugauuugcgcccagaaguuuaacggacugacagugcugccuccucugcugaccgaugagaugaucgcccaguacacaucugcccugcuggccggcacaaucacaagcggcuggacauuuggagcuggcgccgcucugcagauccccuuugcuaugcagauggccuaccgguucaacggcaucggagugacccagaaugugcuguacgagaaccagaagcugaucgccaaccaguucaacagcgccaucggcaagauccaggacagccugagcagcacagcaagcgcccugggaaagcugcaggacguggucaaccagaaugcccaggcacugaacacccuggucaagcagcuguccuccaacuucggcgccaucagcucugugcugaacgauauccugagcagacuggacccuccugaggccgaggugcagaucgacagacugaucacaggcagacugcagagccuccagacauacgugacccagcagcugaucagagccgccgagauuagagccucugccaaucuggccgccaccaagaugucugagugugugcugggccagagcaagagaguggacuuuugcggcaagggcuaccaccugaugagcuucccucagucugccccucacggcgugguguuucugcacgugacauaugugcccgcucaagagaagaauuucaccaccgcuccagccaucugccacgacggcaaagcccacuuuccuagagaaggcguguucguguccaacggcacccauugguucgugacacagcggaacuucuacgagccccagaucaucaccaccgacaacaccuucgugucuggcaacugcgacguugugaucggcauugugaacaauaccguguacgacccucugcagcccgagcuggacagcuucaaagaggaacuggacaaguacuuuaagaaccacacaagccccgacguggaccugggcgauaucagcggaaucaaugccagcgucgugaacauccagaaagagaucgaccggcugaacgagguggccaagaaucugaacgagagccugaucgaccugcaagaacuggggaaguacgagcaguacaucaaguggcccugguacaucuggcugggcuuuaucgccggacugauugccaucgugauggucacaaucaugcuguguugcaugaccagcugcuguagcugccugaagggcuguuguagcuguggcagcugcugcaaguucgacgaggacgauucugagcccgugcugaagggcgugaaacugcacuacaccugauaauaggcuggagccucgguggccuagcuucuugccccuugggccuccccccagccccuccuccccuuccugcacccguacccccguggucuuugaauaaagucugagugggcggcaaaaaaaaaaaaaaaaaaaaaaaaaaaaaaaaaaaaaaaaaaaaaaaaaaaaaaaaaaaaaaaaaaaaaaaaaaaaaaaaaaaaaaaaaaaaaaaaaaaa

SEQ ID NO: 26240 - RNA, 4089 nt, Artificial Sequence
  SARS-CoV-2/Wuhan/WIV05/2019__EPI_ISL_402128 spike protein mRNA gc mod (1-1273)(K986P_V987P_H69del_V70del_Y453F_D614G_I692V_M1229I)
gggaaauaagagagaaaagaagaguaagaagaaauauaagaccccggcgccgccaccauguucguguuucuggugcugcugccccugguguccagccagugugugaaccugaccaccagaacacagcugccuccagccuacaccaacagcuucaccagaggcguguacuaccccgacaagguguucagauccagcgugcugcacucuacccaggaccuguuccugccuuucuucagcaacgugaccugguuccacgccaucuccggcaccaauggcaccaagagauucgacaaccccgugcugcccuucaacgacgggguguacuuugccagcaccgagaaguccaacaucaucagaggcuggaucuucggcaccacacuggacagcaagacccagagccugcugaucgugaacaacgccaccaacguggucaucaaagugugcgaguuccaguucugcaacgaccccuuccugggcgucuacuaccacaagaacaacaagagcuggauggaaagcgaguuccggguguacagcagcgccaacaacugcaccuucgaguacgugucccagccuuuccugauggaccuggaaggcaagcagggcaacuucaagaaccugcgcgaguucguguucaagaacaucgacggcuacuucaaaaucuacagcaagcacaccccuaucaaccucgugcgggaucugccucagggcuucucugcucuggaaccccugguggaucugcccaucggcaucaacaucacccgguuucagacacugcuggcccugcacagaagcuaccugacaccuggcgauagcagcagcggauggacagcuggugccgccgcuuacuaugugggcuaccugcagccuagaaccuuccugcugaaguacaacgagaacggcaccaucaccgacgccguggauugugcucuggauccucugagcgagacaaagugcacccugaaguccuucaccguggaaaagggcaucuaccagaccagcaacuuccgggugcagcccaccgaauccaucgugcgguuccccaauaucaccaaucugugccccuucggcgagguguucaaugccaccagauucgccucuguguacgccuggaaccggaagcggaucagcaauugcguggccgacuacuccgugcuguacaacuccgccagcuucagcaccuucaagugcuacggcguguccccuaccaagcugaacgaccugugcuucacaaacguguacgccgacagcuucgugauccggggagaugaagugcggcagauugccccuggacagacaggcaagaucgccgacuacaacuacaagcugcccgacgacuucaccggcugugugauugccuggaacagcaacaaccuggacuccaaagucggcggcaacuacaauuaccuguuccggcuguuccggaaguccaaucugaagcccuucgagcgggacaucagcaccgaaaucuaucaggccggcagcaccccuugcaacggcguggaaggcuucaacugcuacuucccacugcaguccuacggcuuucagcccacaaauggcgugggcuaucagcccuacagagugguggugcugagcuucgaacugcugcaugcuccugccacagugugcggcccuaagaaaagcaccaaucucgugaagaacaaaugcgugaacuucaacuucaacggccugaccggcaccggcgugcugacagagagcaacaagaaguuccugccauuccagcaguuuggccgggauaucgccgauaccacagacgccguuagagauccccagacacuggaaauccuggacaucaccccaugcagcuucggcggagugucugugaucaccccuggcaccaacaccagcaaucagguggcagugcuguaccagggcgugaacuguaccgaagugcccguggccauucacgccgaucagcugacaccuacauggcggguguacuccaccggcagcaauguguuucagaccagagccggcugucugaucggagccgagcacgugaacaauagcuacgagugcgacauccccaucggcgcuggcaucugugccagcuaccagacacagacaaacagccccagacgggcuagaagcguggccagccagagcgugauugccuacacaaugucucugggcgccgagaacagcguggccuacuccaacaacucuaucgcuauccccaccaacuucaccaucagcgugaccaccgagauccugccuguguccaugaccaagaccagcguggacugcaccauguacaucugcggcgauuccaccgagugcuccaaccugcugcugcaguacggcagcuucugcacccagcugaauagagcccugacagggaucgccguggaacaggacaagaacacccaagagguguucgcccaagugaagcaaaucuacaagaccccuccuaucaaggacuucggcggcuucaauuucagccagauucugcccgauccuagcaagcccagcaagcggagcuucaucgaggaccugcuguucaacaaagugacacuggccgacgccggcuucaucaagcaguauggcgauugucugggcgacauugccgccagggaucugauuugcgcccagaaguuuaacggacugacagugcugccuccucugcugaccgaugagaugaucgcccaguacacaucugcccugcuggccggcacaaucacaagcggcuggacauuuggagcuggcgccgcucugcagauccccuuugcuaugcagauggccuaccgguucaacggcaucggagugacccagaaugugcuguacgagaaccagaagcugaucgccaaccaguucaacagcgccaucggcaagauccaggacagccugagcagcacagcaagcgcccugggaaagcugcaggacguggucaaccagaaugcccaggcacugaacacccuggucaagcagcuguccuccaacuucggcgccaucagcucugugcugaacgauauccugagcagacuggacccuccugaggccgaggugcagaucgacagacugaucacaggcagacugcagagccuccagacauacgugacccagcagcugaucagagccgccgagauuagagccucugccaaucuggccgccaccaagaugucugagugugugcugggccagagcaagagaguggacuuuugcggcaagggcuaccaccugaugagcuucccucagucugccccucacggcgugguguuucugcacgugacauaugugcccgcucaagagaagaauuucaccaccgcuccagccaucugccacgacggcaaagcccacuuuccuagagaaggcguguucguguccaacggcacccauugguucgugacacagcggaacuucuacgagccccagaucaucaccaccgacaacaccuucgugucuggcaacugcgacguugugaucggcauugugaacaauaccguguacgacccucugcagcccgagcuggacagcuucaaagaggaacuggacaaguacuuuaagaaccacacaagccccgacguggaccugggcgauaucagcggaaucaaugccagcgucgugaacauccagaaagagaucgaccggcugaacgagguggccaagaaucugaacgagagccugaucgaccugcaagaacuggggaaguacgagcaguacaucaaguggcccugguacaucuggcugggcuuuaucgccggacugauugccaucgugaucgucacaaucaugcuguguugcaugaccagcugcuguagcugccugaagggcuguuguagcuguggcagcugcugcaaguucgacgaggacgauucugagcccgugcugaagggcgugaaacugcacuacaccugauaauaggcuggagccucgguggccuagcuucuugccccuugggccuccccccagccccuccuccccuuccugcacccguacccccguggucuuugaauaaagucugagugggcggcaaaaaaaaaaaaaaaaaaaaaaaaaaaaaaaaaaaaaaaaaaaaaaaaaaaaaaaaaaaaaaaaaaaaaaaaaaaaaaaaaaaaaaaaaaaaaaaaaaaa

SEQ ID NO: 26241 - RNA, 4086 nt, Artificial Sequence
  SARS-CoV-2/Wuhan/WIV05/2019__EPI_ISL_402128 spike protein mRNA gc mod (1-1273)(K986P_V987P_K986P_V987P_H69del_V70del_Y144del_N501Y_A570 D_D614G_P681H_T716I_S982A_D1118H)
gggaaauaagagagaaaagaagaguaagaagaaauauaagaccccggcgccgccaccauguucguguuucuggugcugcugccccugguguccagccagugugugaaccugaccaccagaacacagcugccuccagccuacaccaacagcuucaccagaggcguguacuaccccgacaagguguucagauccagcgugcugcacucuacccaggaccuguuccugccuuucuucagcaacgugaccugguuccacgccaucuccggcaccaauggcaccaagagauucgacaaccccgugcugcccuucaacgacgggguguacuuugccagcaccgagaaguccaacaucaucagaggcuggaucuucggcaccacacuggacagcaagacccagagccugcugaucgugaacaacgccaccaacguggucaucaaagugugcgaguuccaguucugcaacgaccccuuccugggcgucuaccacaagaacaacaagagcuggauggaaagcgaguuccggguguacagcagcgccaacaacugcaccuucgaguacgugucccagccuuuccugauggaccuggaaggcaagcagggcaacuucaagaaccugcgcgaguucguguucaagaacaucgacggcuacuucaaaaucuacagcaagcacaccccuaucaaccucgugcgggaucugccucagggcuucucugcucuggaaccccugguggaucugcccaucggcaucaacaucacccgguuucagacacugcuggcccugcacagaagcuaccugacaccuggcgauagcagcagcggauggacagcuggugccgccgcuuacuaugugggcuaccugcagccuagaaccuuccugcugaaguacaacgagaacggcaccaucaccgacgccguggauugugcucuggauccucugagcgagacaaagugcacccugaaguccuucaccguggaaaagggcaucuaccagaccagcaacuuccgggugcagcccaccgaauccaucgugcgguuccccaauaucaccaaucugugccccuucggcgagguguucaaugccaccagauucgccucuguguacgccuggaaccggaagcggaucagcaauugcguggccgacuacuccgugcuguacaacuccgccagcuucagcaccuucaagugcuacggcguguccccuaccaagcugaacgaccugugcuucacaaacguguacgccgacagcuucgugauccggggagaugaagugcggcagauugccccuggacagacaggcaagaucgccgacuacaacuacaagcugcccgacgacuucaccggcugugugauugccuggaacagcaacaaccuggacuccaaagucggcggcaacuacaauuaccuguaccggcuguuccggaaguccaaucugaagcccuucgagcgggacaucagcaccgaaaucuaucaggccggcagcaccccuugcaacggcguggaaggcuucaacugcuacuucccacugcaguccuacggcuuucagcccacauacggcgugggcuaucagcccuacagagugguggugcugagcuucgaacugcugcaugcuccugccacagugugcggcccuaagaaaagcaccaaucucgugaagaacaaaugcgugaacuucaacuucaacggccugaccggcaccggcgugcugacagagagcaacaagaaguuccugccauuccagcaguuuggccgggauaucgacgauaccacagacgccguuagagauccccagacacuggaaauccuggacaucaccccaugcagcuucggcggagugucugugaucaccccuggcaccaacaccagcaaucagguggcagugcuguaccagggcgugaacuguaccgaagugcccguggccauucacgccgaucagcugacaccuacauggcggguguacuccaccggcagcaauguguuucagaccagagccggcugucugaucggagccgagcacgugaacaauagcuacgagugcgacauccccaucggcgcuggcaucugugccagcuaccagacacagacaaacagccacagacgggcuagaagcguggccagccagagcaucauugccuacacaaugucucugggcgccgagaacagcguggccuacuccaacaacucuaucgcuauccccaucaacuucaccaucagcgugaccaccgagauccugccuguguccaugaccaagaccagcguggacugcaccauguacaucugcggcgauuccaccgagugcuccaaccugcugcugcaguacggcagcuucugcacccagcugaauagagcccugacagggaucgccguggaacaggacaagaacacccaagagguguucgcccaagugaagcaaaucuacaagaccccuccuaucaaggacuucggcggcuucaauuucagccagauucugcccgauccuagcaagcccagcaagcggagcuucaucgaggaccugcuguucaacaaagugacacuggccgacgccggcuucaucaagcaguauggcgauugucugggcgacauugccgccagggaucugauuugcgcccagaaguuuaacggacugacagugcugccuccucugcugaccgaugagaugaucgcccaguacacaucugcccugcuggccggcacaaucacaagcggcuggacauuuggagcuggcgccgcucugcagauccccuuugcuaugcagauggccuaccgguucaacggcaucggagugacccagaaugugcuguacgagaaccagaagcugaucgccaaccaguucaacagcgccaucggcaagauccaggacagccugagcagcacagcaagcgcccugggaaagcugcaggacguggucaaccagaaugcccaggcacugaacacccuggucaagcagcuguccuccaacuucggcgccaucagcucugugcugaacgauauccuggccagacuggacccuccugaggccgaggugcagaucgacagacugaucacaggcagacugcagagccuccagacauacgugacccagcagcugaucagagccgccgagauuagagccucugccaaucuggccgccaccaagaugucugagugugugcugggccagagcaagagaguggacuuuugcggcaagggcuaccaccugaugagcuucccucagucugccccucacggcgugguguuucugcacgugacauaugugcccgcucaagagaagaauuucaccaccgcuccagccaucugccacgacggcaaagcccacuuuccuagagaaggcguguucguguccaacggcacccauugguucgugacacagcggaacuucuacgagccccagaucaucaccacccacaacaccuucgugucuggcaacugcgacguugugaucggcauugugaacaauaccguguacgacccucugcagcccgagcuggacagcuucaaagaggaacuggacaaguacuuuaagaaccacacaagccccgacguggaccugggcgauaucagcggaaucaaugccagcgucgugaacauccagaaagagaucgaccggcugaacgagguggccaagaaucugaacgagagccugaucgaccugcaagaacuggggaaguacgagcaguacaucaaguggcccugguacaucuggcugggcuuuaucgccggacugauugccaucgugauggucacaaucaugcuguguugcaugaccagcugcuguagcugccugaagggcuguuguagcuguggcagcugcugcaaguucgacgaggacgauucugagcccgugcugaagggcgugaaacugcacuacaccugauaauaggcuggagccucgguggccuagcuucuugccccuugggccuccccccagccccuccuccccuuccugcacccguacccccguggucuuugaauaaagucugagugggcggcaaaaaaaaaaaaaaaaaaaaaaaaaaaaaaaaaaaaaaaaaaaaaaaaaaaaaaaaaaaaaaaaaaaaaaaaaaaaaaaaaaaaaaaaaaaaaaaaaaaa

SEQ ID NO: 26242 - RNA, 4095 nt, Artificial Sequence
  SARS-CoV-2/Wuhan/WIV05/2019__EPI_ISL_402128 spike protein mRNA gc mod (1-1273)(K986P_V987P_K986P_V987P_K417N_E484K_N501Y_D614G)
gggaaauaagagagaaaagaagaguaagaagaaauauaagaccccggcgccgccaccauguucguguuucuggugcugcugccccugguguccagccagugugugaaccugaccaccagaacacagcugccuccagccuacaccaacagcuucaccagaggcguguacuaccccgacaagguguucagauccagcgugcugcacucuacccaggaccuguuccugccuuucuucagcaacgugaccugguuccacgccauccacguguccggcaccaauggcaccaagagauucgacaaccccgugcugcccuucaacgacgggguguacuuugccagcaccgagaaguccaacaucaucagaggcuggaucuucggcaccacacuggacagcaagacccagagccugcugaucgugaacaacgccaccaacguggucaucaaagugugcgaguuccaguucugcaacgaccccuuccugggcgucuacuaccacaagaacaacaagagcuggauggaaagcgaguuccggguguacagcagcgccaacaacugcaccuucgaguacgugucccagccuuuccugauggaccuggaaggcaagcagggcaacuucaagaaccugcgcgaguucguguucaagaacaucgacggcuacuucaaaaucuacagcaagcacaccccuaucaaccucgugcgggaucugccucagggcuucucugcucuggaaccccugguggaucugcccaucggcaucaacaucacccgguuucagacacugcuggcccugcacagaagcuaccugacaccuggcgauagcagcagcggauggacagcuggugccgccgcuuacuaugugggcuaccugcagccuagaaccuuccugcugaaguacaacgagaacggcaccaucaccgacgccguggauugugcucuggauccucugagcgagacaaagugcacccugaaguccuucaccguggaaaagggcaucuaccagaccagcaacuuccgggugcagcccaccgaauccaucgugcgguuccccaauaucaccaaucugugccccuucggcgagguguucaaugccaccagauucgccucuguguacgccuggaaccggaagcggaucagcaauugcguggccgacuacuccgugcuguacaacuccgccagcuucagcaccuucaagugcuacggcguguccccuaccaagcugaacgaccugugcuucacaaacguguacgccgacagcuucgugauccggggagaugaagugcggcagauugccccuggacagacaggcaacaucgccgacuacaacuacaagcugcccgacgacuucaccggcugugugauugccuggaacagcaacaaccuggacuccaaagucggcggcaacuacaauuaccuguaccggcuguuccggaaguccaaucugaagcccuucgagcgggacaucagcaccgaaaucuaucaggccggcagcaccccuugcaacggcgugaagggcuucaacugcuacuucccacugcaguccuacggcuuucagcccacauacggcgugggcuaucagcccuacagagugguggugcugagcuucgaacugcugcaugcuccugccacagugugcggcccuaagaaaagcaccaaucucgugaagaacaaaugcgugaacuucaacuucaacggccugaccggcaccggcgugcugacagagagcaacaagaaguuccugccauuccagcaguuuggccgggauaucgccgauaccacagacgccguuagagauccccagacacuggaaauccuggacaucaccccaugcagcuucggcggagugucugugaucaccccuggcaccaacaccagcaaucagguggcagugcuguaccagggcgugaacuguaccgaagugcccguggccauucacgccgaucagcugacaccuacauggcggguguacuccaccggcagcaauguguuucagaccagagccggcugucugaucggagccgagcacgugaacaauagcuacgagugcgacauccccaucggcgcuggcaucugugccagcuaccagacacagacaaacagccccagacgggcuagaagcguggccagccagagcaucauugccuacacaaugucucugggcgccgagaacagcguggccuacuccaacaacucuaucgcuauccccaccaacuucaccaucagcgugaccaccgagauccugccuguguccaugaccaagaccagcguggacugcaccauguacaucugcggcgauuccaccgagugcuccaaccugcugcugcaguacggcagcuucugcacccagcugaauagagcccugacagggaucgccguggaacaggacaagaacacccaagagguguucgcccaagugaagcaaaucuacaagaccccuccuaucaaggacuucggcggcuucaauuucagccagauucugcccgauccuagcaagcccagcaagcggagcuucaucgaggaccugcuguucaacaaagugacacuggccgacgccggcuucaucaagcaguauggcgauugucugggcgacauugccgccagggaucugauuugcgcccagaaguuuaacggacugacagugcugccuccucugcugaccgaugagaugaucgcccaguacacaucugcccugcuggccggcacaaucacaagcggcuggacauuuggagcuggcgccgcucugcagauccccuuugcuaugcagauggccuaccgguucaacggcaucggagugacccagaaugugcuguacgagaaccagaagcugaucgccaaccaguucaacagcgccaucggcaagauccaggacagccugagcagcacagcaagcgcccugggaaagcugcaggacguggucaaccagaaugcccaggcacugaacacccuggucaagcagcuguccuccaacuucggcgccaucagcucugugcugaacgauauccugagcagacuggacccuccugaggccgaggugcagaucgacagacugaucacaggcagacugcagagccuccagacauacgugacccagcagcugaucagagccgccgagauuagagccucugccaaucuggccgccaccaagaugucugagugugugcugggccagagcaagagaguggacuuuugcggcaagggcuaccaccugaugagcuucccucagucugccccucacggcgugguguuucugcacgugacauaugugcccgcucaagagaagaauuucaccaccgcuccagccaucugccacgacggcaaagcccacuuuccuagagaaggcguguucguguccaacggcacccauugguucgugacacagcggaacuucuacgagccccagaucaucaccaccgacaacaccuucgugucuggcaacugcgacguugugaucggcauugugaacaauaccguguacgacccucugcagcccgagcuggacagcuucaaagaggaacuggacaaguacuuuaagaaccacacaagccccgacguggaccugggcgauaucagcggaaucaaugccagcgucgugaacauccagaaagagaucgaccggcugaacgagguggccaagaaucugaacgagagccugaucgaccugcaagaacuggggaaguacgagcaguacaucaaguggcccugguacaucuggcugggcuuuaucgccggacugauugccaucgugauggucacaaucaugcuguguugcaugaccagcugcuguagcugccugaagggcuguuguagcuguggcagcugcugcaaguucgacgaggacgauucugagcccgugcugaagggcgugaaacugcacuacaccugauaauaggcuggagccucgguggccuagcuucuugccccuugggccuccccccagccccuccuccccuuccugcacccguacccccguggucuuugaauaaagucugagugggcggcaaaaaaaaaaaaaaaaaaaaaaaaaaaaaaaaaaaaaaaaaaaaaaaaaaaaaaaaaaaaaaaaaaaaaaaaaaaaaaaaaaaaaaaaaaaaaaaaaaaa

SEQ ID NO: 26243 - RNA, 4086 nt, Artificial Sequence
  SARS-CoV-2/Wuhan/WIV05/2019__EPI_ISL_402128 spike protein mRNA gc mod (1-1273)(K986P_V987P_K986P_V987P_L18F_D80A_D215G_L242del_A243del_ L244del_R246I_K417N_E484K_N501Y_D614G_A701V)
gggaaauaagagagaaaagaagaguaagaagaaauauaagaccccggcgccgccaccauguucguguuucuggugcugcugccccugguguccagccagugugugaacuucaccaccagaacacagcugccuccagccuacaccaacagcuucaccagaggcguguacuaccccgacaagguguucagauccagcgugcugcacucuacccaggaccuguuccugccuuucuucagcaacgugaccugguuccacgccauccacguguccggcaccaauggcaccaagagauucgccaaccccgugcugcccuucaacgacgggguguacuuugccagcaccgagaaguccaacaucaucagaggcuggaucuucggcaccacacuggacagcaagacccagagccugcugaucgugaacaacgccaccaacguggucaucaaagugugcgaguuccaguucugcaacgaccccuuccugggcgucuacuaccacaagaacaacaagagcuggauggaaagcgaguuccggguguacagcagcgccaacaacugcaccuucgaguacgugucccagccuuuccugauggaccuggaaggcaagcagggcaacuucaagaaccugcgcgaguucguguucaagaacaucgacggcuacuucaaaaucuacagcaagcacaccccuaucaaccucgugcggggccugccucagggcuucucugcucuggaaccccugguggaucugcccaucggcaucaacaucacccgguuucagacacugcacaucagcuaccugacaccuggcgauagcagcagcggauggacagcuggugccgccgcuuacuaugugggcuaccugcagccuagaaccuuccugcugaaguacaacgagaacggcaccaucaccgacgccguggauugugcucuggauccucugagcgagacaaagugcacccugaaguccuucaccguggaaaagggcaucuaccagaccagcaacuuccgggugcagcccaccgaauccaucgugcgguuccccaauaucaccaaucugugccccuucggcgagguguucaaugccaccagauucgccucuguguacgccuggaaccggaagcggaucagcaauugcguggccgacuacuccgugcuguacaacuccgccagcuucagcaccuucaagugcuacggcguguccccuaccaagcugaacgaccugugcuucacaaacguguacgccgacagcuucgugauccggggagaugaagugcggcagauugccccuggacagacaggcaacaucgccgacuacaacuacaagcugcccgacgacuucaccggcugugugauugccuggaacagcaacaaccuggacuccaaagucggcggcaacuacaauuaccuguaccggcuguuccggaaguccaaucugaagcccuucgagcgggacaucagcaccgaaaucuaucaggccggcagcaccccuugcaacggcgugaagggcuucaacugcuacuucccacugcaguccuacggcuuucagcccacauacggcgugggcuaucagcccuacagagugguggugcugagcuucgaacugcugcaugcuccugccacagugugcggcccuaagaaaagcaccaaucucgugaagaacaaaugcgugaacuucaacuucaacggccugaccggcaccggcgugcugacagagagcaacaagaaguuccugccauuccagcaguuuggccgggauaucgccgauaccacagacgccguuagagauccccagacacuggaaauccuggacaucaccccaugcagcuucggcggagugucugugaucaccccuggcaccaacaccagcaaucagguggcagugcuguaccagggcgugaacuguaccgaagugcccguggccauucacgccgaucagcugacaccuacauggcggguguacuccaccggcagcaauguguuucagaccagagccggcugucugaucggagccgagcacgugaacaauagcuacgagugcgacauccccaucggcgcuggcaucugugccagcuaccagacacagacaaacagccccagacgggcuagaagcguggccagccagagcaucauugccuacacaaugucucugggcguggagaacagcguggccuacuccaacaacucuaucgcuauccccaccaacuucaccaucagcgugaccaccgagauccugccuguguccaugaccaagaccagcguggacugcaccauguacaucugcggcgauuccaccgagugcuccaaccugcugcugcaguacggcagcuucugcacccagcugaauagagcccugacagggaucgccguggaacaggacaagaacacccaagagguguucgcccaagugaagcaaaucuacaagaccccuccuaucaaggacuucggcggcuucaauuucagccagauucugcccgauccuagcaagcccagcaagcggagcuucaucgaggaccugcuguucaacaaagugacacuggccgacgccggcuucaucaagcaguauggcgauugucugggcgacauugccgccagggaucugauuugcgcccagaaguuuaacggacugacagugcugccuccucugcugaccgaugagaugaucgcccaguacacaucugcccugcuggccggcacaaucacaagcggcuggacauuuggagcuggcgccgcucugcagauccccuuugcuaugcagauggccuaccgguucaacggcaucggagugacccagaaugugcuguacgagaaccagaagcugaucgccaaccaguucaacagcgccaucggcaagauccaggacagccugagcagcacagcaagcgcccugggaaagcugcaggacguggucaaccagaaugcccaggcacugaacacccuggucaagcagcuguccuccaacuucggcgccaucagcucugugcugaacgauauccugagcagacuggacccuccugaggccgaggugcagaucgacagacugaucacaggcagacugcagagccuccagacauacgugacccagcagcugaucagagccgccgagauuagagccucugccaaucuggccgccaccaagaugucugagugugugcugggccagagcaagagaguggacuuuugcggcaagggcuaccaccugaugagcuucccucagucugccccucacggcgugguguuucugcacgugacauaugugcccgcucaagagaagaauuucaccaccgcuccagccaucugccacgacggcaaagcccacuuuccuagagaaggcguguucguguccaacggcacccauugguucgugacacagcggaacuucuacgagccccagaucaucaccaccgacaacaccuucgugucuggcaacugcgacguugugaucggcauugugaacaauaccguguacgacccucugcagcccgagcuggacagcuucaaagaggaacuggacaaguacuuuaagaaccacacaagccccgacguggaccugggcgauaucagcggaaucaaugccagcgucgugaacauccagaaagagaucgaccggcugaacgagguggccaagaaucugaacgagagccugaucgaccugcaagaacuggggaaguacgagcaguacaucaaguggcccugguacaucuggcugggcuuuaucgccggacugauugccaucgugauggucacaaucaugcuguguugcaugaccagcugcuguagcugccugaagggcuguuguagcuguggcagcugcugcaaguucgacgaggacgauucugagcccgugcugaagggcgugaaacugcacuacaccugauaauaggcuggagccucgguggccuagcuucuugccccuugggccuccccccagccccuccuccccuuccugcacccguacccccguggucuuugaauaaagucugagugggcggcaaaaaaaaaaaaaaaaaaaaaaaaaaaaaaaaaaaaaaaaaaaaaaaaaaaaaaaaaaaaaaaaaaaaaaaaaaaaaaaaaaaaaaaaaaaaaaaaaaaa

SEQ ID NO: 26244 - RNA, 4095 nt, Artificial Sequence
  SARS-CoV-2/Wuhan/WIV05/2019__EPI_ISL_402128 spike protein mRNA gc mod (1-1273)(K986P_V987P_K986P_V987P_E484K_D614G)
gggaaauaagagagaaaagaagaguaagaagaaauauaagaccccggcgccgccaccauguucguguuucuggugcugcugccccugguguccagccagugugugaaccugaccaccagaacacagcugccuccagccuacaccaacagcuucaccagaggcguguacuaccccgacaagguguucagauccagcgugcugcacucuacccaggaccuguuccugccuuucuucagcaacgugaccugguuccacgccauccacguguccggcaccaauggcaccaagagauucgacaaccccgugcugcccuucaacgacgggguguacuuugccagcaccgagaaguccaacaucaucagaggcuggaucuucggcaccacacuggacagcaagacccagagccugcugaucgugaacaacgccaccaacguggucaucaaagugugcgaguuccaguucugcaacgaccccuuccugggcgucuacuaccacaagaacaacaagagcuggauggaaagcgaguuccggguguacagcagcgccaacaacugcaccuucgaguacgugucccagccuuuccugauggaccuggaaggcaagcagggcaacuucaagaaccugcgcgaguucguguucaagaacaucgacggcuacuucaaaaucuacagcaagcacaccccuaucaaccucgugcgggaucugccucagggcuucucugcucuggaaccccugguggaucugcccaucggcaucaacaucacccgguuucagacacugcuggcccugcacagaagcuaccugacaccuggcgauagcagcagcggauggacagcuggugccgccgcuuacuaugugggcuaccugcagccuagaaccuuccugcugaaguacaacgagaacggcaccaucaccgacgccguggauugugcucuggauccucugagcgagacaaagugcacccugaaguccuucaccguggaaaagggcaucuaccagaccagcaacuuccgggugcagcccaccgaauccaucgugcgguuccccaauaucaccaaucugugccccuucggcgagguguucaaugccaccagauucgccucuguguacgccuggaaccggaagcggaucagcaauugcguggccgacuacuccgugcuguacaacuccgccagcuucagcaccuucaagugcuacggcguguccccuaccaagcugaacgaccugugcuucacaaacguguacgccgacagcuucgugauccggggagaugaagugcggcagauugccccuggacagacaggcaagaucgccgacuacaacuacaagcugcccgacgacuucaccggcugugugauugccuggaacagcaacaaccuggacuccaaagucggcggcaacuacaauuaccuguaccggcuguuccggaaguccaaucugaagcccuucgagcgggacaucagcaccgaaaucuaucaggccggcagcaccccuugcaacggcgugaagggcuucaacugcuacuucccacugcaguccuacggcuuucagcccacaaauggcgugggcuaucagcccuacagagugguggugcugagcuucgaacugcugcaugcuccugccacagugugcggcccuaagaaaagcaccaaucucgugaagaacaaaugcgugaacuucaacuucaacggccugaccggcaccggcgugcugacagagagcaacaagaaguuccugccauuccagcaguuuggccgggauaucgccgauaccacagacgccguuagagauccccagacacuggaaauccuggacaucaccccaugcagcuucggcggagugucugugaucaccccuggcaccaacaccagcaaucagguggcagugcuguaccagggcgugaacuguaccgaagugcccguggccauucacgccgaucagcugacaccuacauggcggguguacuccaccggcagcaauguguuucagaccagagccggcugucugaucggagccgagcacgugaacaauagcuacgagugcgacauccccaucggcgcuggcaucugugccagcuaccagacacagacaaacagccccagacgggcuagaagcguggccagccagagcaucauugccuacacaaugucucugggcgccgagaacagcguggccuacuccaacaacucuaucgcuauccccaccaacuucaccaucagcgugaccaccgagauccugccuguguccaugaccaagaccagcguggacugcaccauguacaucugcggcgauuccaccgagugcuccaaccugcugcugcaguacggcagcuucugcacccagcugaauagagcccugacagggaucgccguggaacaggacaagaacacccaagagguguucgcccaagugaagcaaaucuacaagaccccuccuaucaaggacuucggcggcuucaauuucagccagauucugcccgauccuagcaagcccagcaagcggagcuucaucgaggaccugcuguucaacaaagugacacuggccgacgccggcuucaucaagcaguauggcgauugucugggcgacauugccgccagggaucugauuugcgcccagaaguuuaacggacugacagugcugccuccucugcugaccgaugagaugaucgcccaguacacaucugcccugcuggccggcacaaucacaagcggcuggacauuuggagcuggcgccgcucugcagauccccuuugcuaugcagauggccuaccgguucaacggcaucggagugacccagaaugugcuguacgagaaccagaagcugaucgccaaccaguucaacagcgccaucggcaagauccaggacagccugagcagcacagcaagcgcccugggaaagcugcaggacguggucaaccagaaugcccaggcacugaacacccuggucaagcagcuguccuccaacuucggcgccaucagcucugugcugaacgauauccugagcagacuggacccuccugaggccgaggugcagaucgacagacugaucacaggcagacugcagagccuccagacauacgugacccagcagcugaucagagccgccgagauuagagccucugccaaucuggccgccaccaagaugucugagugugugcugggccagagcaagagaguggacuuuugcggcaagggcuaccaccugaugagcuucccucagucugccccucacggcgugguguuucugcacgugacauaugugcccgcucaagagaagaauuucaccaccgcuccagccaucugccacgacggcaaagcccacuuuccuagagaaggcguguucguguccaacggcacccauugguucgugacacagcggaacuucuacgagccccagaucaucaccaccgacaacaccuucgugucuggcaacugcgacguugugaucggcauugugaacaauaccguguacgacccucugcagcccgagcuggacagcuucaaagaggaacuggacaaguacuuuaagaaccacacaagccccgacguggaccugggcgauaucagcggaaucaaugccagcgucgugaacauccagaaagagaucgaccggcugaacgagguggccaagaaucugaacgagagccugaucgaccugcaagaacuggggaaguacgagcaguacaucaaguggcccugguacaucuggcugggcuuuaucgccggacugauugccaucgugauggucacaaucaugcuguguugcaugaccagcugcuguagcugccugaagggcuguuguagcuguggcagcugcugcaaguucgacgaggacgauucugagcccgugcugaagggcgugaaacugcacuacaccugauaauaggcuggagccucgguggccuagcuucuugccccuugggccuccccccagccccuccuccccuuccugcacccguacccccguggucuuugaauaaagucugagugggcggcaaaaaaaaaaaaaaaaaaaaaaaaaaaaaaaaaaaaaaaaaaaaaaaaaaaaaaaaaaaaaaaaaaaaaaaaaaaaaaaaaaaaaaaaaaaaaaaaaaaa

SEQ ID NO: 26245 - RNA, 4095 nt, Artificial Sequence
  SARS-CoV-2/Wuhan/WIV05/2019__EPI_ISL_402128 spike protein mRNA gc mod (1-1273)(K986P_V987P_K986P_V987P_L18F_T20N_P26S_D138Y_R190S_K417T _E484K_N501Y_D614G_H655Y_T1027I)
gggaaauaagagagaaaagaagaguaagaagaaauauaagaccccggcgccgccaccauguucguguuucuggugcugcugccccugguguccagccagugugugaacuucaccaacagaacacagcugccuagcgccuacaccaacagcuucaccagaggcguguacuaccccgacaagguguucagauccagcgugcugcacucuacccaggaccuguuccugccuuucuucagcaacgugaccugguuccacgccauccacguguccggcaccaauggcaccaagagauucgacaaccccgugcugcccuucaacgacgggguguacuuugccagcaccgagaaguccaacaucaucagaggcuggaucuucggcaccacacuggacagcaagacccagagccugcugaucgugaacaacgccaccaacguggucaucaaagugugcgaguuccaguucugcaacuaccccuuccugggcgucuacuaccacaagaacaacaagagcuggauggaaagcgaguuccggguguacagcagcgccaacaacugcaccuucgaguacgugucccagccuuuccugauggaccuggaaggcaagcagggcaacuucaagaaccugagcgaguucguguucaagaacaucgacggcuacuucaaaaucuacagcaagcacaccccuaucaaccucgugcgggaucugccucagggcuucucugcucuggaaccccugguggaucugcccaucggcaucaacaucacccgguuucagacacugcuggcccugcacagaagcuaccugacaccuggcgauagcagcagcggauggacagcuggugccgccgcuuacuaugugggcuaccugcagccuagaaccuuccugcugaaguacaacgagaacggcaccaucaccgacgccguggauugugcucuggauccucugagcgagacaaagugcacccugaaguccuucaccguggaaaagggcaucuaccagaccagcaacuuccgggugcagcccaccgaauccaucgugcgguuccccaauaucaccaaucugugccccuucggcgagguguucaaugccaccagauucgccucuguguacgccuggaaccggaagcggaucagcaauugcguggccgacuacuccgugcuguacaacuccgccagcuucagcaccuucaagugcuacggcguguccccuaccaagcugaacgaccugugcuucacaaacguguacgccgacagcuucgugauccggggagaugaagugcggcagauugccccuggacagacaggcaccaucgccgacuacaacuacaagcugcccgacgacuucaccggcugugugauugccuggaacagcaacaaccuggacuccaaagucggcggcaacuacaauuaccuguaccggcuguuccggaaguccaaucugaagcccuucgagcgggacaucagcaccgaaaucuaucaggccggcagcaccccuugcaacggcgugaagggcuucaacugcuacuucccacugcaguccuacggcuuucagcccacauacggcgugggcuaucagcccuacagagugguggugcugagcuucgaacugcugcaugcuccugccacagugugcggcccuaagaaaagcaccaaucucgugaagaacaaaugcgugaacuucaacuucaacggccugaccggcaccggcgugcugacagagagcaacaagaaguuccugccauuccagcaguuuggccgggauaucgccgauaccacagacgccguuagagauccccagacacuggaaauccuggacaucaccccaugcagcuucggcggagugucugugaucaccccuggcaccaacaccagcaaucagguggcagugcuguaccagggcgugaacuguaccgaagugcccguggccauucacgccgaucagcugacaccuacauggcggguguacuccaccggcagcaauguguuucagaccagagccggcugucugaucggagccgaguacgugaacaauagcuacgagugcgacauccccaucggcgcuggcaucugugccagcuaccagacacagacaaacagccccagacgggcuagaagcguggccagccagagcaucauugccuacacaaugucucugggcgccgagaacagcguggccuacuccaacaacucuaucgcuauccccaccaacuucaccaucagcgugaccaccgagauccugccuguguccaugaccaagaccagcguggacugcaccauguacaucugcggcgauuccaccgagugcuccaaccugcugcugcaguacggcagcuucugcacccagcugaauagagcccugacagggaucgccguggaacaggacaagaacacccaagagguguucgcccaagugaagcaaaucuacaagaccccuccuaucaaggacuucggcggcuucaauuucagccagauucugcccgauccuagcaagcccagcaagcggagcuucaucgaggaccugcuguucaacaaagugacacuggccgacgccggcuucaucaagcaguauggcgauugucugggcgacauugccgccagggaucugauuugcgcccagaaguuuaacggacugacagugcugccuccucugcugaccgaugagaugaucgcccaguacacaucugcccugcuggccggcacaaucacaagcggcuggacauuuggagcuggcgccgcucugcagauccccuuugcuaugcagauggccuaccgguucaacggcaucggagugacccagaaugugcuguacgagaaccagaagcugaucgccaaccaguucaacagcgccaucggcaagauccaggacagccugagcagcacagcaagcgcccugggaaagcugcaggacguggucaaccagaaugcccaggcacugaacacccuggucaagcagcuguccuccaacuucggcgccaucagcucugugcugaacgauauccugagcagacuggacccuccugaggccgaggugcagaucgacagacugaucacaggcagacugcagagccuccagacauacgugacccagcagcugaucagagccgccgagauuagagccucugccaaucuggccgccaucaagaugucugagugugugcugggccagagcaagagaguggacuuuugcggcaagggcuaccaccugaugagcuucccucagucugccccucacggcgugguguuucugcacgugacauaugugcccgcucaagagaagaauuucaccaccgcuccagccaucugccacgacggcaaagcccacuuuccuagagaaggcguguucguguccaacggcacccauugguucgugacacagcggaacuucuacgagccccagaucaucaccaccgacaacaccuucgugucuggcaacugcgacguugugaucggcauugugaacaauaccguguacgacccucugcagcccgagcuggacagcuucaaagaggaacuggacaaguacuuuaagaaccacacaagccccgacguggaccugggcgauaucagcggaaucaaugccagcgucgugaacauccagaaagagaucgaccggcugaacgagguggccaagaaucugaacgagagccugaucgaccugcaagaacuggggaaguacgagcaguacaucaaguggcccugguacaucuggcugggcuuuaucgccggacugauugccaucgugauggucacaaucaugcuguguugcaugaccagcugcuguagcugccugaagggcuguuguagcuguggcagcugcugcaaguucgacgaggacgauucugagcccgugcugaagggcgugaaacugcacuacaccugauaauaggcuggagccucgguggccuagcuucuugccccuugggccuccccccagccccuccuccccuuccugcacccguacccccguggucuuugaauaaagucugagugggcggcaaaaaaaaaaaaaaaaaaaaaaaaaaaaaaaaaaaaaaaaaaaaaaaaaaaaaaaaaaaaaaaaaaaaaaaaaaaaaaaaaaaaaaaaaaaaaaaaaaaa

SEQ ID NO: 26246 - RNA, 4095 nt, Artificial Sequence
  SARS-CoV-2/Wuhan/WIV05/2019__EPI_ISL_402128 spike protein mRNA gc mod (1-1273)(K986P_V987P_K986P_V987P_S13I_W152C_L452R_D614G)
gggaaauaagagagaaaagaagaguaagaagaaauauaagaccccggcgccgccaccauguucguguuucuggugcugcugccccugguguccauccagugugugaaccugaccaccagaacacagcugccuccagccuacaccaacagcuucaccagaggcguguacuaccccgacaagguguucagauccagcgugcugcacucuacccaggaccuguuccugccuuucuucagcaacgugaccugguuccacgccauccacguguccggcaccaauggcaccaagagauucgacaaccccgugcugcccuucaacgacgggguguacuuugccagcaccgagaaguccaacaucaucagaggcuggaucuucggcaccacacuggacagcaagacccagagccugcugaucgugaacaacgccaccaacguggucaucaaagugugcgaguuccaguucugcaacgaccccuuccugggcgucuacuaccacaagaacaacaagagcugcauggaaagcgaguuccggguguacagcagcgccaacaacugcaccuucgaguacgugucccagccuuuccugauggaccuggaaggcaagcagggcaacuucaagaaccugcgcgaguucguguucaagaacaucgacggcuacuucaaaaucuacagcaagcacaccccuaucaaccucgugcgggaucugccucagggcuucucugcucuggaaccccugguggaucugcccaucggcaucaacaucacccgguuucagacacugcuggcccugcacagaagcuaccugacaccuggcgauagcagcagcggauggacagcuggugccgccgcuuacuaugugggcuaccugcagccuagaaccuuccugcugaaguacaacgagaacggcaccaucaccgacgccguggauugugcucuggauccucugagcgagacaaagugcacccugaaguccuucaccguggaaaagggcaucuaccagaccagcaacuuccgggugcagcccaccgaauccaucgugcgguuccccaauaucaccaaucugugccccuucggcgagguguucaaugccaccagauucgccucuguguacgccuggaaccggaagcggaucagcaauugcguggccgacuacuccgugcuguacaacuccgccagcuucagcaccuucaagugcuacggcguguccccuaccaagcugaacgaccugugcuucacaaacguguacgccgacagcuucgugauccggggagaugaagugcggcagauugccccuggacagacaggcaagaucgccgacuacaacuacaagcugcccgacgacuucaccggcugugugauugccuggaacagcaacaaccuggacuccaaagucggcggcaacuacaauuaccgcuaccggcuguuccggaaguccaaucugaagcccuucgagcgggacaucagcaccgaaaucuaucaggccggcagcaccccuugcaacggcguggaaggcuucaacugcuacuucccacugcaguccuacggcuuucagcccacaaauggcgugggcuaucagcccuacagagugguggugcugagcuucgaacugcugcaugcuccugccacagugugcggcccuaagaaaagcaccaaucucgugaagaacaaaugcgugaacuucaacuucaacggccugaccggcaccggcgugcugacagagagcaacaagaaguuccugccauuccagcaguuuggccgggauaucgccgauaccacagacgccguuagagauccccagacacuggaaauccuggacaucaccccaugcagcuucggcggagugucugugaucaccccuggcaccaacaccagcaaucagguggcagugcuguaccagggcgugaacuguaccgaagugcccguggccauucacgccgaucagcugacaccuacauggcggguguacuccaccggcagcaauguguuucagaccagagccggcugucugaucggagccgagcacgugaacaauagcuacgagugcgacauccccaucggcgcuggcaucugugccagcuaccagacacagacaaacagccccagacgggcuagaagcguggccagccagagcaucauugccuacacaaugucucugggcgccgagaacagcguggccuacuccaacaacucuaucgcuauccccaccaacuucaccaucagcgugaccaccgagauccugccuguguccaugaccaagaccagcguggacugcaccauguacaucugcggcgauuccaccgagugcuccaaccugcugcugcaguacggcagcuucugcacccagcugaauagagcccugacagggaucgccguggaacaggacaagaacacccaagagguguucgcccaagugaagcaaaucuacaagaccccuccuaucaaggacuucggcggcuucaauuucagccagauucugcccgauccuagcaagcccagcaagcggagcuucaucgaggaccugcuguucaacaaagugacacuggccgacgccggcuucaucaagcaguauggcgauugucugggcgacauugccgccagggaucugauuugcgcccagaaguuuaacggacugacagugcugccuccucugcugaccgaugagaugaucgcccaguacacaucugcccugcuggccggcacaaucacaagcggcuggacauuuggagcuggcgccgcucugcagauccccuuugcuaugcagauggccuaccgguucaacggcaucggagugacccagaaugugcuguacgagaaccagaagcugaucgccaaccaguucaacagcgccaucggcaagauccaggacagccugagcagcacagcaagcgcccugggaaagcugcaggacguggucaaccagaaugcccaggcacugaacacccuggucaagcagcuguccuccaacuucggcgccaucagcucugugcugaacgauauccugagcagacuggacccuccugaggccgaggugcagaucgacagacugaucacaggcagacugcagagccuccagacauacgugacccagcagcugaucagagccgccgagauuagagccucugccaaucuggccgccaccaagaugucugagugugugcugggccagagcaagagaguggacuuuugcggcaagggcuaccaccugaugagcuucccucagucugccccucacggcgugguguuucugcacgugacauaugugcccgcucaagagaagaauuucaccaccgcuccagccaucugccacgacggcaaagcccacuuuccuagagaaggcguguucguguccaacggcacccauugguucgugacacagcggaacuucuacgagccccagaucaucaccaccgacaacaccuucgugucuggcaacugcgacguugugaucggcauugugaacaauaccguguacgacccucugcagcccgagcuggacagcuucaaagaggaacuggacaaguacuuuaagaaccacacaagccccgacguggaccugggcgauaucagcggaaucaaugccagcgucgugaacauccagaaagagaucgaccggcugaacgagguggccaagaaucugaacgagagccugaucgaccugcaagaacuggggaaguacgagcaguacaucaaguggcccugguacaucuggcugggcuuuaucgccggacugauugccaucgugauggucacaaucaugcuguguugcaugaccagcugcuguagcugccugaagggcuguuguagcuguggcagcugcugcaaguucgacgaggacgauucugagcccgugcugaagggcgugaaacugcacuacaccugauaauaggcuggagccucgguggccuagcuucuugccccuugggccuccccccagccccuccuccccuuccugcacccguacccccguggucuuugaauaaagucugagugggcggcaaaaaaaaaaaaaaaaaaaaaaaaaaaaaaaaaaaaaaaaaaaaaaaaaaaaaaaaaaaaaaaaaaaaaaaaaaaaaaaaaaaaaaaaaaaaaaaaaaaa

SEQ ID NO: 26247 - RNA, 4095 nt, Artificial Sequence
  SARS-CoV-2/Wuhan/WIV05/2019__EPI_ISL_402128 spike protein mRNA gc mod (1-1273)(K986P_V987P)
gggaaauaagagagaaaagaagaguaagaagaaauauaagaccccggcgccgccaccauguucguguuccuggugcugcugccucugguguccagccagugugugaaccugaccaccagaacacagcugccuccagccuacaccaacagcuuuaccagaggcguguacuaccccgacaagguguucagauccagcgugcugcacucuacccaggaccuguuccugccuuucuucagcaacgugaccugguuccacgccauccacguguccggcaccaauggcaccaagagauucgacaaccccgugcugcccuucaacgacgggguguacuuugccagcaccgagaaguccaacaucaucagaggcuggaucuucggcaccacacuggacagcaagacccagagccugcugaucgugaacaacgccaccaacguggucaucaaagugugcgaguuccaguucugcaacgaccccuuccugggcgucuacuaccacaagaacaacaagagcuggauggaaagcgaguuccggguguacagcagcgccaacaacugcaccuucgaguacgugucccagccuuuccugauggaccuggaaggcaagcagggcaacuucaagaaccugcgcgaguucguguuuaagaacaucgacggcuacuucaagaucuacagcaagcacaccccuaucaaccucgugcgggaucugccucagggcuucucugcucuggaaccccugguggaucugcccaucggcaucaacaucacccgguuucagacacugcuggcccugcacagaagcuaccugacaccuggcgauagcagcagcggauggacagcuggugccgccgcuuacuaugugggcuaccugcagccuagaaccuuccugcugaaguacaacgagaacggcaccaucaccgacgccguggauugugcucuggauccucugagcgagacaaagugcacccugaaguccuucaccguggaaaagggcaucuaccagaccagcaacuuccgggugcagcccaccgaauccaucgugcgguuccccaauaucaccaaucugugccccuucggcgagguguucaaugccaccagauucgccucuguguacgccuggaaccggaagcggaucagcaauugcguggccgacuacuccgugcuguacaacuccgccagcuucagcaccuucaagugcuacggcguguccccuaccaagcugaacgaccugugcuucacaaacguguacgccgacagcuucgugauccggggagaugaagugcggcagauugccccuggacagacaggcaagaucgccgacuacaacuacaagcugcccgacgacuucaccggcugugugauugccuggaacagcaacaaccuggacuccaaagucggcggcaacuacaauuaccuguaccggcuguuccggaaguccaaucugaagcccuucgagcgggacaucuccaccgagaucuaucaggccggcagcaccccuuguaacggcguggaaggcuucaacugcuacuucccacugcaguccuacggcuuucagcccacaaauggcgugggcuaucagcccuacagagugguggugcugagcuucgaacugcugcaugccccugccacagugugcggcccuaagaaaagcaccaaucucgugaagaacaaaugcgugaacuucaacuucaacggccugaccggcaccggcgugcugacagagagcaacaagaaguuccugccauuccagcaguuuggccgggauaucgccgauaccacagacgccguuagagauccccagacacuggaaauccuggacaucaccccuugcagcuucggcggagugucugugaucaccccuggcaccaacaccagcaaucagguggcagugcuguaccaggacgugaacuguaccgaagugcccguggccauucacgccgaucagcugacaccuacauggcggguguacuccaccggcagcaauguguuucagaccagagccggcugucugaucggagccgagcacgugaacaauagcuacgagugcgacauccccaucggcgcuggaaucugcgccagcuaccagacacagacaaacagcccucggagagccagaagcguggccagccagagcaucauugccuacacaaugucucugggcgccgagaacagcguggccuacuccaacaacucuaucgcuauccccaccaacuucaccaucagcgugaccacagagauccugccuguguccaugaccaagaccagcguggacugcaccauguacaucugcggcgauuccaccgagugcuccaaccugcugcugcaguacggcagcuucugcacccagcugaauagagcccugacagggaucgccguggaacaggacaagaacacccaagagguguucgcccaagugaagcagaucuacaagaccccuccuaucaaggacuucggcggcuucaauuucagccagauucugcccgauccuagcaagcccagcaagcggagcuucaucgaggaccugcuguucaacaaagugacacuggccgacgccggcuucaucaagcaguauggcgauugucugggcgacauugccgccagggaucugauuugcgcccagaaguuuaacggacugacagugcugccuccucugcugaccgaugagaugaucgcccaguacacaucugcccugcuggccggcacaaucacaagcggcuggacauuuggagcaggcgccgcucugcagauccccuuugcuaugcagauggccuaccgguucaacggcaucggagugacccagaaugugcuguacgagaaccagaagcugaucgccaaccaguucaacagcgccaucggcaagauccaggacagccugagcagcacagcaagcgcccugggaaagcugcaggacguggucaaccagaaugcccaggcacugaacacccuggucaagcagcuguccuccaacuucggcgccaucagcucugugcugaacgauauccugagcagacuggacccuccugaggccgaggugcagaucgacagacugaucacaggcagacugcagagccuccagacauacgugacccagcagcugaucagagccgccgagauuagagccucugccaaucuggccgccaccaagaugucugagugugugcugggccagagcaagagaguggacuuuugcggcaagggcuaccaccugaugagcuucccucagucugccccucacggcgugguguuucugcacgugacauaugugcccgcucaagagaagaauuucaccaccgcuccagccaucugccacgacggcaaagcccacuuuccuagagaaggcguguucguguccaacggcacccauugguucgugacacagcggaacuucuacgagccccagaucaucaccaccgacaacaccuucgugucuggcaacugcgacgucgugaucggcauugugaacaauaccguguacgacccucugcagcccgagcuggacagcuucaaagaggaacuggacaaguacuuuaagaaccacacaagccccgacguggaccugggcgauaucagcggaaucaaugccagcgucgugaacauccagaaagagaucgaccggcugaacgagguggccaagaaucugaacgagagccugaucgaccugcaagaacuggggaaguacgagcaguacaucaaguggcccugguacaucuggcugggcuuuaucgccggacugauugccaucgugauggucacaaucaugcuguguugcaugaccagcugcuguagcugccugaagggcuguuguagcuguggcagcugcugcaaguucgacgaggacgauucugagcccgugcugaagggcgugaaacugcacuacacaugauaauaggcuggagccucgguggccuagcuucuugccccuugggccuccccccagccccuccuccccuuccugcacccguacccccguggucuuugaauaaagucugagugggcggcaaaaaaaaaaaaaaaaaaaaaaaaaaaaaaaaaaaaaaaaaaaaaaaaaaaaaaaaaaaaaaaaaaaaaaaaaaaaaaaaaaaaaaaaaaaaaaaaaaaa

SEQ ID NO: 26248 - RNA, 4095 nt, Artificial Sequence
  SARS-CoV-2/Wuhan/WIV05/2019__EPI_ISL_402128 spike protein mRNA gc mod (1-1273)(K986P_V987P_ D614G)
gggaaauaagagagaaaagaagaguaagaagaaauauaagaccccggcgccgccaccauguucguguuccuggugcugcugccucugguguccagccagugugugaaccugaccaccagaacacagcugccuccagccuacaccaacagcuuuaccagaggcguguacuaccccgacaagguguucagauccagcgugcugcacucuacccaggaccuguuccugccuuucuucagcaacgugaccugguuccacgccauccacguguccggcaccaauggcaccaagagauucgacaaccccgugcugcccuucaacgacgggguguacuuugccagcaccgagaaguccaacaucaucagaggcuggaucuucggcaccacacuggacagcaagacccagagccugcugaucgugaacaacgccaccaacguggucaucaaagugugcgaguuccaguucugcaacgaccccuuccugggcgucuacuaccacaagaacaacaagagcuggauggaaagcgaguuccggguguacagcagcgccaacaacugcaccuucgaguacgugucccagccuuuccugauggaccuggaaggcaagcagggcaacuucaagaaccugcgcgaguucguguuuaagaacaucgacggcuacuucaagaucuacagcaagcacaccccuaucaaccucgugcgggaucugccucagggcuucucugcucuggaaccccugguggaucugcccaucggcaucaacaucacccgguuucagacacugcuggcccugcacagaagcuaccugacaccuggcgauagcagcagcggauggacagcuggugccgccgcuuacuaugugggcuaccugcagccuagaaccuuccugcugaaguacaacgagaacggcaccaucaccgacgccguggauugugcucuggauccucugagcgagacaaagugcacccugaaguccuucaccguggaaaagggcaucuaccagaccagcaacuuccgggugcagcccaccgaauccaucgugcgguuccccaauaucaccaaucugugccccuucggcgagguguucaaugccaccagauucgccucuguguacgccuggaaccggaagcggaucagcaauugcguggccgacuacuccgugcuguacaacuccgccagcuucagcaccuucaagugcuacggcguguccccuaccaagcugaacgaccugugcuucacaaacguguacgccgacagcuucgugauccggggagaugaagugcggcagauugccccuggacagacaggcaagaucgccgacuacaacuacaagcugcccgacgacuucaccggcugugugauugccuggaacagcaacaaccuggacuccaaagucggcggcaacuacaauuaccuguaccggcuguuccggaaguccaaucugaagcccuucgagcgggacaucuccaccgagaucuaucaggccggcagcaccccuuguaacggcguggaaggcuucaacugcuacuucccacugcaguccuacggcuuucagcccacaaauggcgugggcuaucagcccuacagagugguggugcugagcuucgaacugcugcaugccccugccacagugugcggcccuaagaaaagcaccaaucucgugaagaacaaaugcgugaacuucaacuucaacggccugaccggcaccggcgugcugacagagagcaacaagaaguuccugccauuccagcaguuuggccgggauaucgccgauaccacagacgccguuagagauccccagacacuggaaauccuggacaucaccccuugcagcuucggcggagugucugugaucaccccuggcaccaacaccagcaaucagguggcagugcuguaccagggcgugaacuguaccgaagugcccguggccauucacgccgaucagcugacaccuacauggcggguguacuccaccggcagcaauguguuucagaccagagccggcugucugaucggagccgagcacgugaacaauagcuacgagugcgacauccccaucggcgcuggaaucugcgccagcuaccagacacagacaaacagcccucggagagccagaagcguggccagccagagcaucauugccuacacaaugucucugggcgccgagaacagcguggccuacuccaacaacucuaucgcuauccccaccaacuucaccaucagcgugaccacagagauccugccuguguccaugaccaagaccagcguggacugcaccauguacaucugcggcgauuccaccgagugcuccaaccugcugcugcaguacggcagcuucugcacccagcugaauagagcccugacagggaucgccguggaacaggacaagaacacccaagagguguucgcccaagugaagcagaucuacaagaccccuccuaucaaggacuucggcggcuucaauuucagccagauucugcccgauccuagcaagcccagcaagcggagcuucaucgaggaccugcuguucaacaaagugacacuggccgacgccggcuucaucaagcaguauggcgauugucugggcgacauugccgccagggaucugauuugcgcccagaaguuuaacggacugacagugcugccuccucugcugaccgaugagaugaucgcccaguacacaucugcccugcuggccggcacaaucacaagcggcuggacauuuggagcaggcgccgcucugcagauccccuuugcuaugcagauggccuaccgguucaacggcaucggagugacccagaaugugcuguacgagaaccagaagcugaucgccaaccaguucaacagcgccaucggcaagauccaggacagccugagcagcacagcaagcgcccugggaaagcugcaggacguggucaaccagaaugcccaggcacugaacacccuggucaagcagcuguccuccaacuucggcgccaucagcucugugcugaacgauauccugagcagacuggacccuccugaggccgaggugcagaucgacagacugaucacaggcagacugcagagccuccagacauacgugacccagcagcugaucagagccgccgagauuagagccucugccaaucuggccgccaccaagaugucugagugugugcugggccagagcaagagaguggacuuuugcggcaagggcuaccaccugaugagcuucccucagucugccccucacggcgugguguuucugcacgugacauaugugcccgcucaagagaagaauuucaccaccgcuccagccaucugccacgacggcaaagcccacuuuccuagagaaggcguguucguguccaacggcacccauugguucgugacacagcggaacuucuacgagccccagaucaucaccaccgacaacaccuucgugucuggcaacugcgacgucgugaucggcauugugaacaauaccguguacgacccucugcagcccgagcuggacagcuucaaagaggaacuggacaaguacuuuaagaaccacacaagccccgacguggaccugggcgauaucagcggaaucaaugccagcgucgugaacauccagaaagagaucgaccggcugaacgagguggccaagaaucugaacgagagccugaucgaccugcaagaacuggggaaguacgagcaguacaucaaguggcccugguacaucuggcugggcuuuaucgccggacugauugccaucgugauggucacaaucaugcuguguugcaugaccagcugcuguagcugccugaagggcuguuguagcuguggcagcugcugcaaguucgacgaggacgauucugagcccgugcugaagggcgugaaacugcacuacacaugauaauaggcuggagccucgguggccuagcuucuugccccuugggccuccccccagccccuccuccccuuccugcacccguacccccguggucuuugaauaaagucugagugggcggcaaaaaaaaaaaaaaaaaaaaaaaaaaaaaaaaaaaaaaaaaaaaaaaaaaaaaaaaaaaaaaaaaaaaaaaaaaaaaaaaaaaaaaaaaaaaaaaaaaaa

SEQ ID NO: 26249 - RNA, 4095 nt, Artificial Sequence
  SARS-CoV-2/Wuhan/WIV05/2019__EPI_ISL_402128 spike protein mRNA gc mod (1-1273)(K986P_V987P_A222V_D614G)
gggaaauaagagagaaaagaagaguaagaagaaauauaagaccccggcgccgccaccauguucguguuccuggugcugcugccucugguguccagccagugugugaaccugaccaccagaacacagcugccuccagccuacaccaacagcuuuaccagaggcguguacuaccccgacaagguguucagauccagcgugcugcacucuacccaggaccuguuccugccuuucuucagcaacgugaccugguuccacgccauccacguguccggcaccaauggcaccaagagauucgacaaccccgugcugcccuucaacgacgggguguacuuugccagcaccgagaaguccaacaucaucagaggcuggaucuucggcaccacacuggacagcaagacccagagccugcugaucgugaacaacgccaccaacguggucaucaaagugugcgaguuccaguucugcaacgaccccuuccugggcgucuacuaccacaagaacaacaagagcuggauggaaagcgaguuccggguguacagcagcgccaacaacugcaccuucgaguacgugucccagccuuuccugauggaccuggaaggcaagcagggcaacuucaagaaccugcgcgaguucguguuuaagaacaucgacggcuacuucaagaucuacagcaagcacaccccuaucaaccucgugcgggaucugccucagggcuucucugugcuggaaccccugguggaucugcccaucggcaucaacaucacccgguuucagacacugcuggcccugcacagaagcuaccugacaccuggcgauagcagcagcggauggacagcuggugccgccgcuuacuaugugggcuaccugcagccuagaaccuuccugcugaaguacaacgagaacggcaccaucaccgacgccguggauugugcucuggauccucugagcgagacaaagugcacccugaaguccuucaccguggaaaagggcaucuaccagaccagcaacuuccgggugcagcccaccgaauccaucgugcgguuccccaauaucaccaaucugugccccuucggcgagguguucaaugccaccagauucgccucuguguacgccuggaaccggaagcggaucagcaauugcguggccgacuacuccgugcuguacaacuccgccagcuucagcaccuucaagugcuacggcguguccccuaccaagcugaacgaccugugcuucacaaacguguacgccgacagcuucgugauccggggagaugaagugcggcagauugccccuggacagacaggcaagaucgccgacuacaacuacaagcugcccgacgacuucaccggcugugugauugccuggaacagcaacaaccuggacuccaaagucggcggcaacuacaauuaccuguaccggcuguuccggaaguccaaucugaagcccuucgagcgggacaucuccaccgagaucuaucaggccggcagcaccccuuguaacggcguggaaggcuucaacugcuacuucccacugcaguccuacggcuuucagcccacaaauggcgugggcuaucagcccuacagagugguggugcugagcuucgaacugcugcaugccccugccacagugugcggcccuaagaaaagcaccaaucucgugaagaacaaaugcgugaacuucaacuucaacggccugaccggcaccggcgugcugacagagagcaacaagaaguuccugccauuccagcaguuuggccgggauaucgccgauaccacagacgccguuagagauccccagacacuggaaauccuggacaucaccccuugcagcuucggcggagugucugugaucaccccuggcaccaacaccagcaaucagguggcagugcuguaccagggcgugaacuguaccgaagugcccguggccauucacgccgaucagcugacaccuacauggcggguguacuccaccggcagcaauguguuucagaccagagccggcugucugaucggagccgagcacgugaacaauagcuacgagugcgacauccccaucggcgcuggaaucugcgccagcuaccagacacagacaaacagcccucggagagccagaagcguggccagccagagcaucauugccuacacaaugucucugggcgccgagaacagcguggccuacuccaacaacucuaucgcuauccccaccaacuucaccaucagcgugaccacagagauccugccuguguccaugaccaagaccagcguggacugcaccauguacaucugcggcgauuccaccgagugcuccaaccugcugcugcaguacggcagcuucugcacccagcugaauagagcccugacagggaucgccguggaacaggacaagaacacccaagagguguucgcccaagugaagcagaucuacaagaccccuccuaucaaggacuucggcggcuucaauuucagccagauucugcccgauccuagcaagcccagcaagcggagcuucaucgaggaccugcuguucaacaaagugacacuggccgacgccggcuucaucaagcaguauggcgauugucugggcgacauugccgccagggaucugauuugcgcccagaaguuuaacggacugacagugcugccuccucugcugaccgaugagaugaucgcccaguacacaucugcccugcuggccggcacaaucacaagcggcuggacauuuggagcaggcgccgcucugcagauccccuuugcuaugcagauggccuaccgguucaacggcaucggagugacccagaaugugcuguacgagaaccagaagcugaucgccaaccaguucaacagcgccaucggcaagauccaggacagccugagcagcacagcaagcgcccugggaaagcugcaggacguggucaaccagaaugcccaggcacugaacacccuggucaagcagcuguccuccaacuucggcgccaucagcucugugcugaacgauauccugagcagacuggacccuccugaggccgaggugcagaucgacagacugaucacaggcagacugcagagccuccagacauacgugacccagcagcugaucagagccgccgagauuagagccucugccaaucuggccgccaccaagaugucugagugugugcugggccagagcaagagaguggacuuuugcggcaagggcuaccaccugaugagcuucccucagucugccccucacggcgugguguuucugcacgugacauaugugcccgcucaagagaagaauuucaccaccgcuccagccaucugccacgacggcaaagcccacuuuccuagagaaggcguguucguguccaacggcacccauugguucgugacacagcggaacuucuacgagccccagaucaucaccaccgacaacaccuucgugucuggcaacugcgacgucgugaucggcauugugaacaauaccguguacgacccucugcagcccgagcuggacagcuucaaagaggaacuggacaaguacuuuaagaaccacacaagccccgacguggaccugggcgauaucagcggaaucaaugccagcgucgugaacauccagaaagagaucgaccggcugaacgagguggccaagaaucugaacgagagccugaucgaccugcaagaacuggggaaguacgagcaguacaucaaguggcccugguacaucuggcugggcuuuaucgccggacugauugccaucgugauggucacaaucaugcuguguugcaugaccagcugcuguagcugccugaagggcuguuguagcuguggcagcugcugcaaguucgacgaggacgauucugagcccgugcugaagggcgugaaacugcacuacacaugauaauaggcuggagccucgguggccuagcuucuugccccuugggccuccccccagccccuccuccccuuccugcacccguacccccguggucuuugaauaaagucugagugggcggcaaaaaaaaaaaaaaaaaaaaaaaaaaaaaaaaaaaaaaaaaaaaaaaaaaaaaaaaaaaaaaaaaaaaaaaaaaaaaaaaaaaaaaaaaaaaaaaaaaaa

SEQ ID NO: 26250 - RNA, 4095 nt, Artificial Sequence
  SARS-CoV-2/Wuhan/WIV05/2019__EPI_ISL_402128 spike protein mRNA gc mod (1-1273)(K986P_V987P_N439K_D614G)
gggaaauaagagagaaaagaagaguaagaagaaauauaagaccccggcgccgccaccauguucguguuccuggugcugcugccucugguguccagccagugugugaaccugaccaccagaacacagcugccuccagccuacaccaacagcuuuaccagaggcguguacuaccccgacaagguguucagauccagcgugcugcacucuacccaggaccuguuccugccuuucuucagcaacgugaccugguuccacgccauccacguguccggcaccaauggcaccaagagauucgacaaccccgugcugcccuucaacgacgggguguacuuugccagcaccgagaaguccaacaucaucagaggcuggaucuucggcaccacacuggacagcaagacccagagccugcugaucgugaacaacgccaccaacguggucaucaaagugugcgaguuccaguucugcaacgaccccuuccugggcgucuacuaccacaagaacaacaagagcuggauggaaagcgaguuccggguguacagcagcgccaacaacugcaccuucgaguacgugucccagccuuuccugauggaccuggaaggcaagcagggcaacuucaagaaccugcgcgaguucguguuuaagaacaucgacggcuacuucaagaucuacagcaagcacaccccuaucaaccucgugcgggaucugccucagggcuucucugcucuggaaccccugguggaucugcccaucggcaucaacaucacccgguuucagacacugcuggcccugcacagaagcuaccugacaccuggcgauagcagcagcggauggacagcuggugccgccgcuuacuaugugggcuaccugcagccuagaaccuuccugcugaaguacaacgagaacggcaccaucaccgacgccguggauugugcucuggauccucugagcgagacaaagugcacccugaaguccuucaccguggaaaagggcaucuaccagaccagcaacuuccgggugcagcccaccgaauccaucgugcgguuccccaauaucaccaaucugugccccuucggcgagguguucaaugccaccagauucgccucuguguacgccuggaaccggaagcggaucagcaauugcguggccgacuacuccgugcuguacaacuccgccagcuucagcaccuucaagugcuacggcguguccccuaccaagcugaacgaccugugcuucacaaacguguacgccgacagcuucgugauccggggagaugaagugcggcagauugccccuggacagacaggcaagaucgccgacuacaacuacaagcugcccgacgacuucaccggcugugugauugccuggaacagcaagaaccuggacuccaaagucggcggcaacuacaauuaccuguaccggcuguuccggaaguccaaucugaagcccuucgagcgggacaucuccaccgagaucuaucaggccggcagcaccccuuguaacggcguggaaggcuucaacugcuacuucccacugcaguccuacggcuuucagcccacaaauggcgugggcuaucagcccuacagagugguggugcugagcuucgaacugcugcaugccccugccacagugugcggcccuaagaaaagcaccaaucucgugaagaacaaaugcgugaacuucaacuucaacggccugaccggcaccggcgugcugacagagagcaacaagaaguuccugccauuccagcaguuuggccgggauaucgccgauaccacagacgccguuagagauccccagacacuggaaauccuggacaucaccccuugcagcuucggcggagugucugugaucaccccuggcaccaacaccagcaaucagguggcagugcuguaccagggcgugaacuguaccgaagugcccguggccauucacgccgaucagcugacaccuacauggcggguguacuccaccggcagcaauguguuucagaccagagccggcugucugaucggagccgagcacgugaacaauagcuacgagugcgacauccccaucggcgcuggaaucugcgccagcuaccagacacagacaaacagcccucggagagccagaagcguggccagccagagcaucauugccuacacaaugucucugggcgccgagaacagcguggccuacuccaacaacucuaucgcuauccccaccaacuucaccaucagcgugaccacagagauccugccuguguccaugaccaagaccagcguggacugcaccauguacaucugcggcgauuccaccgagugcuccaaccugcugcugcaguacggcagcuucugcacccagcugaauagagcccugacagggaucgccguggaacaggacaagaacacccaagagguguucgcccaagugaagcagaucuacaagaccccuccuaucaaggacuucggcggcuucaauuucagccagauucugcccgauccuagcaagcccagcaagcggagcuucaucgaggaccugcuguucaacaaagugacacuggccgacgccggcuucaucaagcaguauggcgauugucugggcgacauugccgccagggaucugauuugcgcccagaaguuuaacggacugacagugcugccuccucugcugaccgaugagaugaucgcccaguacacaucugcccugcuggccggcacaaucacaagcggcuggacauuuggagcaggcgccgcucugcagauccccuuugcuaugcagauggccuaccgguucaacggcaucggagugacccagaaugugcuguacgagaaccagaagcugaucgccaaccaguucaacagcgccaucggcaagauccaggacagccugagcagcacagcaagcgcccugggaaagcugcaggacguggucaaccagaaugcccaggcacugaacacccuggucaagcagcuguccuccaacuucggcgccaucagcucugugcugaacgauauccugagcagacuggacccuccugaggccgaggugcagaucgacagacugaucacaggcagacugcagagccuccagacauacgugacccagcagcugaucagagccgccgagauuagagccucugccaaucuggccgccaccaagaugucugagugugugcugggccagagcaagagaguggacuuuugcggcaagggcuaccaccugaugagcuucccucagucugccccucacggcgugguguuucugcacgugacauaugugcccgcucaagagaagaauuucaccaccgcuccagccaucugccacgacggcaaagcccacuuuccuagagaaggcguguucguguccaacggcacccauugguucgugacacagcggaacuucuacgagccccagaucaucaccaccgacaacaccuucgugucuggcaacugcgacgucgugaucggcauugugaacaauaccguguacgacccucugcagcccgagcuggacagcuucaaagaggaacuggacaaguacuuuaagaaccacacaagccccgacguggaccugggcgauaucagcggaaucaaugccagcgucgugaacauccagaaagagaucgaccggcugaacgagguggccaagaaucugaacgagagccugaucgaccugcaagaacuggggaaguacgagcaguacaucaaguggcccugguacaucuggcugggcuuuaucgccggacugauugccaucgugauggucacaaucaugcuguguugcaugaccagcugcuguagcugccugaagggcuguuguagcuguggcagcugcugcaaguucgacgaggacgauucugagcccgugcugaagggcgugaaacugcacuacacaugauaauaggcuggagccucgguggccuagcuucuugccccuugggccuccccccagccccuccuccccuuccugcacccguacccccguggucuuugaauaaagucugagugggcggcaaaaaaaaaaaaaaaaaaaaaaaaaaaaaaaaaaaaaaaaaaaaaaaaaaaaaaaaaaaaaaaaaaaaaaaaaaaaaaaaaaaaaaaaaaaaaaaaaaaa

SEQ ID NO: 26251 - RNA, 4095 nt, Artificial Sequence
  SARS-CoV-2/Wuhan/WIV05/2019__EPI_ISL_402128 spike protein mRNA gc mod (1-1273)(K986P_V987P_S477N_D614G)
gggaaauaagagagaaaagaagaguaagaagaaauauaagaccccggcgccgccaccauguucguguuccuggugcugcugccucugguguccagccagugugugaaccugaccaccagaacacagcugccuccagccuacaccaacagcuuuaccagaggcguguacuaccccgacaagguguucagauccagcgugcugcacucuacccaggaccuguuccugccuuucuucagcaacgugaccugguuccacgccauccacguguccggcaccaauggcaccaagagauucgacaaccccgugcugcccuucaacgacgggguguacuuugccagcaccgagaaguccaacaucaucagaggcuggaucuucggcaccacacuggacagcaagacccagagccugcugaucgugaacaacgccaccaacguggucaucaaagugugcgaguuccaguucugcaacgaccccuuccugggcgucuacuaccacaagaacaacaagagcuggauggaaagcgaguuccggguguacagcagcgccaacaacugcaccuucgaguacgugucccagccuuuccugauggaccuggaaggcaagcagggcaacuucaagaaccugcgcgaguucguguuuaagaacaucgacggcuacuucaagaucuacagcaagcacaccccuaucaaccucgugcgggaucugccucagggcuucucugcucuggaaccccugguggaucugcccaucggcaucaacaucacccgguuucagacacugcuggcccugcacagaagcuaccugacaccuggcgauagcagcagcggauggacagcuggugccgccgcuuacuaugugggcuaccugcagccuagaaccuuccugcugaaguacaacgagaacggcaccaucaccgacgccguggauugugcucuggauccucugagcgagacaaagugcacccugaaguccuucaccguggaaaagggcaucuaccagaccagcaacuuccgggugcagcccaccgaauccaucgugcgguuccccaauaucaccaaucugugccccuucggcgagguguucaaugccaccagauucgccucuguguacgccuggaaccggaagcggaucagcaauugcguggccgacuacuccgugcuguacaacuccgccagcuucagcaccuucaagugcuacggcguguccccuaccaagcugaacgaccugugcuucacaaacguguacgccgacagcuucgugauccggggagaugaagugcggcagauugccccuggacagacaggcaagaucgccgacuacaacuacaagcugcccgacgacuucaccggcugugugauugccuggaacagcaacaaccuggacuccaaagucggcggcaacuacaauuaccuguaccggcuguuccggaaguccaaucugaagcccuucgagcgggacaucuccaccgagaucuaucaggccggcaacaccccuuguaacggcguggaaggcuucaacugcuacuucccacugcaguccuacggcuuucagcccacaaauggcgugggcuaucagcccuacagagugguggugcugagcuucgaacugcugcaugccccugccacagugugcggcccuaagaaaagcaccaaucucgugaagaacaaaugcgugaacuucaacuucaacggccugaccggcaccggcgugcugacagagagcaacaagaaguuccugccauuccagcaguuuggccgggauaucgccgauaccacagacgccguuagagauccccagacacuggaaauccuggacaucaccccuugcagcuucggcggagugucugugaucaccccuggcaccaacaccagcaaucagguggcagugcuguaccagggcgugaacuguaccgaagugcccguggccauucacgccgaucagcugacaccuacauggcggguguacuccaccggcagcaauguguuucagaccagagccggcugucugaucggagccgagcacgugaacaauagcuacgagugcgacauccccaucggcgcuggaaucugcgccagcuaccagacacagacaaacagcccucggagagccagaagcguggccagccagagcaucauugccuacacaaugucucugggcgccgagaacagcguggccuacuccaacaacucuaucgcuauccccaccaacuucaccaucagcgugaccacagagauccugccuguguccaugaccaagaccagcguggacugcaccauguacaucugcggcgauuccaccgagugcuccaaccugcugcugcaguacggcagcuucugcacccagcugaauagagcccugacagggaucgccguggaacaggacaagaacacccaagagguguucgcccaagugaagcagaucuacaagaccccuccuaucaaggacuucggcggcuucaauuucagccagauucugcccgauccuagcaagcccagcaagcggagcuucaucgaggaccugcuguucaacaaagugacacuggccgacgccggcuucaucaagcaguauggcgauugucugggcgacauugccgccagggaucugauuugcgcccagaaguuuaacggacugacagugcugccuccucugcugaccgaugagaugaucgcccaguacacaucugcccugcuggccggcacaaucacaagcggcuggacauuuggagcaggcgccgcucugcagauccccuuugcuaugcagauggccuaccgguucaacggcaucggagugacccagaaugugcuguacgagaaccagaagcugaucgccaaccaguucaacagcgccaucggcaagauccaggacagccugagcagcacagcaagcgcccugggaaagcugcaggacguggucaaccagaaugcccaggcacugaacacccuggucaagcagcuguccuccaacuucggcgccaucagcucugugcugaacgauauccugagcagacuggacccuccugaggccgaggugcagaucgacagacugaucacaggcagacugcagagccuccagacauacgugacccagcagcugaucagagccgccgagauuagagccucugccaaucuggccgccaccaagaugucugagugugugcugggccagagcaagagaguggacuuuugcggcaagggcuaccaccugaugagcuucccucagucugccccucacggcgugguguuucugcacgugacauaugugcccgcucaagagaagaauuucaccaccgcuccagccaucugccacgacggcaaagcccacuuuccuagagaaggcguguucguguccaacggcacccauugguucgugacacagcggaacuucuacgagccccagaucaucaccaccgacaacaccuucgugucuggcaacugcgacgucgugaucggcauugugaacaauaccguguacgacccucugcagcccgagcuggacagcuucaaagaggaacuggacaaguacuuuaagaaccacacaagccccgacguggaccugggcgauaucagcggaaucaaugccagcgucgugaacauccagaaagagaucgaccggcugaacgagguggccaagaaucugaacgagagccugaucgaccugcaagaacuggggaaguacgagcaguacaucaaguggcccugguacaucuggcugggcuuuaucgccggacugauugccaucgugauggucacaaucaugcuguguugcaugaccagcugcuguagcugccugaagggcuguuguagcuguggcagcugcugcaaguucgacgaggacgauucugagcccgugcugaagggcgugaaacugcacuacacaugauaauaggcuggagccucgguggccuagcuucuugccccuugggccuccccccagccccuccuccccuuccugcacccguacccccguggucuuugaauaaagucugagugggcggcaaaaaaaaaaaaaaaaaaaaaaaaaaaaaaaaaaaaaaaaaaaaaaaaaaaaaaaaaaaaaaaaaaaaaaaaaaaaaaaaaaaaaaaaaaaaaaaaaaaa

SEQ ID NO: 26252 - RNA, 4095 nt, Artificial Sequence
  SARS-CoV-2/Wuhan/WIV05/2019__EPI_ISL_402128 spike protein mRNA gc mod (1-1273)(K986P_V987P_N501Y_D614G)
gggaaauaagagagaaaagaagaguaagaagaaauauaagaccccggcgccgccaccauguucguguuccuggugcugcugccucugguguccagccagugugugaaccugaccaccagaacacagcugccuccagccuacaccaacagcuuuaccagaggcguguacuaccccgacaagguguucagauccagcgugcugcacucuacccaggaccuguuccugccuuucuucagcaacgugaccugguuccacgccauccacguguccggcaccaauggcaccaagagauucgacaaccccgugcugcccuucaacgacgggguguacuuugccagcaccgagaaguccaacaucaucagaggcuggaucuucggcaccacacuggacagcaagacccagagccugcugaucgugaacaacgccaccaacguggucaucaaagugugcgaguuccaguucugcaacgaccccuuccugggcgucuacuaccacaagaacaacaagagcuggauggaaagcgaguuccggguguacagcagcgccaacaacugcaccuucgaguacgugucccagccuuuccugauggaccuggaaggcaagcagggcaacuucaagaaccugcgcgaguucguguuuaagaacaucgacggcuacuucaagaucuacagcaagcacaccccuaucaaccucgugcgggaucugccucagggcuucucugcucuggaaccccugguggaucugcccaucggcaucaacaucacccgguuucagacacugcuggcccugcacagaagcuaccugacaccuggcgauagcagcagcggauggacagcuggugccgccgcuuacuaugugggcuaccugcagccuagaaccuuccugcugaaguacaacgagaacggcaccaucaccgacgccguggauugugcucuggauccucugagcgagacaaagugcacccugaaguccuucaccguggaaaagggcaucuaccagaccagcaacuuccgggugcagcccaccgaauccaucgugcgguuccccaauaucaccaaucugugccccuucggcgagguguucaaugccaccagauucgccucuguguacgccuggaaccggaagcggaucagcaauugcguggccgacuacuccgugcuguacaacuccgccagcuucagcaccuucaagugcuacggcguguccccuaccaagcugaacgaccugugcuucacaaacguguacgccgacagcuucgugauccggggagaugaagugcggcagauugccccuggacagacaggcaagaucgccgacuacaacuacaagcugcccgacgacuucaccggcugugugauugccuggaacagcaacaaccuggacuccaaagucggcggcaacuacaauuaccuguaccggcuguuccggaaguccaaucugaagcccuucgagcgggacaucuccaccgagaucuaucaggccggcagcaccccuuguaacggcguggaaggcuucaacugcuacuucccacugcaguccuacggcuuucagcccacauacggcgugggcuaucagcccuacagagugguggugcugagcuucgaacugcugcaugccccugccacagugugcggcccuaagaaaagcaccaaucucgugaagaacaaaugcgugaacuucaacuucaacggccugaccggcaccggcgugcugacagagagcaacaagaaguuccugccauuccagcaguuuggccgggauaucgccgauaccacagacgccguuagagauccccagacacuggaaauccuggacaucaccccuugcagcuucggcggagugucugugaucaccccuggcaccaacaccagcaaucagguggcagugcuguaccagggcgugaacuguaccgaagugcccguggccauucacgccgaucagcugacaccuacauggcggguguacuccaccggcagcaauguguuucagaccagagccggcugucugaucggagccgagcacgugaacaauagcuacgagugcgacauccccaucggcgcuggaaucugcgccagcuaccagacacagacaaacagcccucggagagccagaagcguggccagccagagcaucauugccuacacaaugucucugggcgccgagaacagcguggccuacuccaacaacucuaucgcuauccccaccaacuucaccaucagcgugaccacagagauccugccuguguccaugaccaagaccagcguggacugcaccauguacaucugcggcgauuccaccgagugcuccaaccugcugcugcaguacggcagcuucugcacccagcugaauagagcccugacagggaucgccguggaacaggacaagaacacccaagagguguucgcccaagugaagcagaucuacaagaccccuccuaucaaggacuucggcggcuucaauuucagccagauucugcccgauccuagcaagcccagcaagcggagcuucaucgaggaccugcuguucaacaaagugacacuggccgacgccggcuucaucaagcaguauggcgauugucugggcgacauugccgccagggaucugauuugcgcccagaaguuuaacggacugacagugcugccuccucugcugaccgaugagaugaucgcccaguacacaucugcccugcuggccggcacaaucacaagcggcuggacauuuggagcaggcgccgcucugcagauccccuuugcuaugcagauggccuaccgguucaacggcaucggagugacccagaaugugcuguacgagaaccagaagcugaucgccaaccaguucaacagcgccaucggcaagauccaggacagccugagcagcacagcaagcgcccugggaaagcugcaggacguggucaaccagaaugcccaggcacugaacacccuggucaagcagcuguccuccaacuucggcgccaucagcucugugcugaacgauauccugagcagacuggacccuccugaggccgaggugcagaucgacagacugaucacaggcagacugcagagccuccagacauacgugacccagcagcugaucagagccgccgagauuagagccucugccaaucuggccgccaccaagaugucugagugugugcugggccagagcaagagaguggacuuuugcggcaagggcuaccaccugaugagcuucccucagucugccccucacggcgugguguuucugcacgugacauaugugcccgcucaagagaagaauuucaccaccgcuccagccaucugccacgacggcaaagcccacuuuccuagagaaggcguguucguguccaacggcacccauugguucgugacacagcggaacuucuacgagccccagaucaucaccaccgacaacaccuucgugucuggcaacugcgacgucgugaucggcauugugaacaauaccguguacgacccucugcagcccgagcuggacagcuucaaagaggaacuggacaaguacuuuaagaaccacacaagccccgacguggaccugggcgauaucagcggaaucaaugccagcgucgugaacauccagaaagagaucgaccggcugaacgagguggccaagaaucugaacgagagccugaucgaccugcaagaacuggggaaguacgagcaguacaucaaguggcccugguacaucuggcugggcuuuaucgccggacugauugccaucgugauggucacaaucaugcuguguugcaugaccagcugcuguagcugccugaagggcuguuguagcuguggcagcugcugcaaguucgacgaggacgauucugagcccgugcugaagggcgugaaacugcacuacacaugauaauaggcuggagccucgguggccuagcuucuugccccuugggccuccccccagccccuccuccccuuccugcacccguacccccguggucuuugaauaaagucugagugggcggcaaaaaaaaaaaaaaaaaaaaaaaaaaaaaaaaaaaaaaaaaaaaaaaaaaaaaaaaaaaaaaaaaaaaaaaaaaaaaaaaaaaaaaaaaaaaaaaaaaaa

SEQ ID NO: 26253 - RNA, 4089 nt, Artificial Sequence
  SARS-CoV-2/Wuhan/WIV05/2019__EPI_ISL_402128 spike protein mRNA gc mod (1-1273)(K986P_V987P_H69del_V70del_D614G)
gggaaauaagagagaaaagaagaguaagaagaaauauaagaccccggcgccgccaccauguucguguuccuggugcugcugccucugguguccagccagugugugaaccugaccaccagaacacagcugccuccagccuacaccaacagcuuuaccagaggcguguacuaccccgacaagguguucagauccagcgugcugcacucuacccaggaccuguuccugccuuucuucagcaacgugaccugguuccacgccaucuccggcaccaauggcaccaagagauucgacaaccccgugcugcccuucaacgacgggguguacuuugccagcaccgagaaguccaacaucaucagaggcuggaucuucggcaccacacuggacagcaagacccagagccugcugaucgugaacaacgccaccaacguggucaucaaagugugcgaguuccaguucugcaacgaccccuuccugggcgucuacuaccacaagaacaacaagagcuggauggaaagcgaguuccggguguacagcagcgccaacaacugcaccuucgaguacgugucccagccuuuccugauggaccuggaaggcaagcagggcaacuucaagaaccugcgcgaguucguguuuaagaacaucgacggcuacuucaagaucuacagcaagcacaccccuaucaaccucgugcgggaucugccucagggcuucucugcucuggaaccccugguggaucugcccaucggcaucaacaucacccgguuucagacacugcuggcccugcacagaagcuaccugacaccuggcgauagcagcagcggauggacagcuggugccgccgcuuacuaugugggcuaccugcagccuagaaccuuccugcugaaguacaacgagaacggcaccaucaccgacgccguggauugugcucuggauccucugagcgagacaaagugcacccugaaguccuucaccguggaaaagggcaucuaccagaccagcaacuuccgggugcagcccaccgaauccaucgugcgguuccccaauaucaccaaucugugccccuucggcgagguguucaaugccaccagauucgccucuguguacgccuggaaccggaagcggaucagcaauugcguggccgacuacuccgugcuguacaacuccgccagcuucagcaccuucaagugcuacggcguguccccuaccaagcugaacgaccugugcuucacaaacguguacgccgacagcuucgugauccggggagaugaagugcggcagauugccccuggacagacaggcaagaucgccgacuacaacuacaagcugcccgacgacuucaccggcugugugauugccuggaacagcaacaaccuggacuccaaagucggcggcaacuacaauuaccuguaccggcuguuccggaaguccaaucugaagcccuucgagcgggacaucuccaccgagaucuaucaggccggcagcaccccuuguaacggcguggaaggcuucaacugcuacuucccacugcaguccuacggcuuucagcccacaaauggcgugggcuaucagcccuacagagugguggugcugagcuucgaacugcugcaugccccugccacagugugcggcccuaagaaaagcaccaaucucgugaagaacaaaugcgugaacuucaacuucaacggccugaccggcaccggcgugcugacagagagcaacaagaaguuccugccauuccagcaguuuggccgggauaucgccgauaccacagacgccguuagagauccccagacacuggaaauccuggacaucaccccuugcagcuucggcggagugucugugaucaccccuggcaccaacaccagcaaucagguggcagugcuguaccagggcgugaacuguaccgaagugcccguggccauucacgccgaucagcugacaccuacauggcggguguacuccaccggcagcaauguguuucagaccagagccggcugucugaucggagccgagcacgugaacaauagcuacgagugcgacauccccaucggcgcuggaaucugcgccagcuaccagacacagacaaacagcccucggagagccagaagcguggccagccagagcaucauugccuacacaaugucucugggcgccgagaacagcguggccuacuccaacaacucuaucgcuauccccaccaacuucaccaucagcgugaccacagagauccugccuguguccaugaccaagaccagcguggacugcaccauguacaucugcggcgauuccaccgagugcuccaaccugcugcugcaguacggcagcuucugcacccagcugaauagagcccugacagggaucgccguggaacaggacaagaacacccaagagguguucgcccaagugaagcagaucuacaagaccccuccuaucaaggacuucggcggcuucaauuucagccagauucugcccgauccuagcaagcccagcaagcggagcuucaucgaggaccugcuguucaacaaagugacacuggccgacgccggcuucaucaagcaguauggcgauugucugggcgacauugccgccagggaucugauuugcgcccagaaguuuaacggacugacagugcugccuccucugcugaccgaugagaugaucgcccaguacacaucugcccugcuggccggcacaaucacaagcggcuggacauuuggagcaggcgccgcucugcagauccccuuugcuaugcagauggccuaccgguucaacggcaucggagugacccagaaugugcuguacgagaaccagaagcugaucgccaaccaguucaacagcgccaucggcaagauccaggacagccugagcagcacagcaagcgcccugggaaagcugcaggacguggucaaccagaaugcccaggcacugaacacccuggucaagcagcuguccuccaacuucggcgccaucagcucugugcugaacgauauccugagcagacuggacccuccugaggccgaggugcagaucgacagacugaucacaggcagacugcagagccuccagacauacgugacccagcagcugaucagagccgccgagauuagagccucugccaaucuggccgccaccaagaugucugagugugugcugggccagagcaagagaguggacuuuugcggcaagggcuaccaccugaugagcuucccucagucugccccucacggcgugguguuucugcacgugacauaugugcccgcucaagagaagaauuucaccaccgcuccagccaucugccacgacggcaaagcccacuuuccuagagaaggcguguucguguccaacggcacccauugguucgugacacagcggaacuucuacgagccccagaucaucaccaccgacaacaccuucgugucuggcaacugcgacgucgugaucggcauugugaacaauaccguguacgacccucugcagcccgagcuggacagcuucaaagaggaacuggacaaguacuuuaagaaccacacaagccccgacguggaccugggcgauaucagcggaaucaaugccagcgucgugaacauccagaaagagaucgaccggcugaacgagguggccaagaaucugaacgagagccugaucgaccugcaagaacuggggaaguacgagcaguacaucaaguggcccugguacaucuggcugggcuuuaucgccggacugauugccaucgugauggucacaaucaugcuguguugcaugaccagcugcuguagcugccugaagggcuguuguagcuguggcagcugcugcaaguucgacgaggacgauucugagcccgugcugaagggcgugaaacugcacuacacaugauaauaggcuggagccucgguggccuagcuucuugccccuugggccuccccccagccccuccuccccuuccugcacccguacccccguggucuuugaauaaagucugagugggcggcaaaaaaaaaaaaaaaaaaaaaaaaaaaaaaaaaaaaaaaaaaaaaaaaaaaaaaaaaaaaaaaaaaaaaaaaaaaaaaaaaaaaaaaaaaaaaaaaaaaa

SEQ ID NO: 26254 - RNA, 4095 nt, Artificial Sequence
  SARS-CoV-2/Wuhan/WIV05/2019__EPI_ISL_402128 spike protein mRNA gc mod (1-1273)(K986P_V987P_Y453F_D614G)
gggaaauaagagagaaaagaagaguaagaagaaauauaagaccccggcgccgccaccauguucguguuccuggugcugcugccucugguguccagccagugugugaaccugaccaccagaacacagcugccuccagccuacaccaacagcuuuaccagaggcguguacuaccccgacaagguguucagauccagcgugcugcacucuacccaggaccuguuccugccuuucuucagcaacgugaccugguuccacgccauccacguguccggcaccaauggcaccaagagauucgacaaccccgugcugcccuucaacgacgggguguacuuugccagcaccgagaaguccaacaucaucagaggcuggaucuucggcaccacacuggacagcaagacccagagccugcugaucgugaacaacgccaccaacguggucaucaaagugugcgaguuccaguucugcaacgaccccuuccugggcgucuacuaccacaagaacaacaagagcuggauggaaagcgaguuccggguguacagcagcgccaacaacugcaccuucgaguacgugucccagccuuuccugauggaccuggaaggcaagcagggcaacuucaagaaccugcgcgaguucguguuuaagaacaucgacggcuacuucaagaucuacagcaagcacaccccuaucaaccucgugcgggaucugccucagggcuucucugcucuggaaccccugguggaucugcccaucggcaucaacaucacccgguuucagacacugcuggcccugcacagaagcuaccugacaccuggcgauagcagcagcggauggacagcuggugccgccgcuuacuaugugggcuaccugcagccuagaaccuuccugcugaaguacaacgagaacggcaccaucaccgacgccguggauugugcucuggauccucugagcgagacaaagugcacccugaaguccuucaccguggaaaagggcaucuaccagaccagcaacuuccgggugcagcccaccgaauccaucgugcgguuccccaauaucaccaaucugugccccuucggcgagguguucaaugccaccagauucgccucuguguacgccuggaaccggaagcggaucagcaauugcguggccgacuacuccgugcuguacaacuccgccagcuucagcaccuucaagugcuacggcguguccccuaccaagcugaacgaccugugcuucacaaacguguacgccgacagcuucgugauccggggagaugaagugcggcagauugccccuggacagacaggcaagaucgccgacuacaacuacaagcugcccgacgacuucaccggcugugugauugccuggaacagcaacaaccuggacuccaaagucggcggcaacuacaauuaccuguuccggcuguuccggaaguccaaucugaagcccuucgagcgggacaucuccaccgagaucuaucaggccggcagcaccccuuguaacggcguggaaggcuucaacugcuacuucccacugcaguccuacggcuuucagcccacaaauggcgugggcuaucagcccuacagagugguggugcugagcuucgaacugcugcaugccccugccacagugugcggcccuaagaaaagcaccaaucucgugaagaacaaaugcgugaacuucaacuucaacggccugaccggcaccggcgugcugacagagagcaacaagaaguuccugccauuccagcaguuuggccgggauaucgccgauaccacagacgccguuagagauccccagacacuggaaauccuggacaucaccccuugcagcuucggcggagugucugugaucaccccuggcaccaacaccagcaaucagguggcagugcuguaccagggcgugaacuguaccgaagugcccguggccauucacgccgaucagcugacaccuacauggcggguguacuccaccggcagcaauguguuucagaccagagccggcugucugaucggagccgagcacgugaacaauagcuacgagugcgacauccccaucggcgcuggaaucugcgccagcuaccagacacagacaaacagcccucggagagccagaagcguggccagccagagcaucauugccuacacaaugucucugggcgccgagaacagcguggccuacuccaacaacucuaucgcuauccccaccaacuucaccaucagcgugaccacagagauccugccuguguccaugaccaagaccagcguggacugcaccauguacaucugcggcgauuccaccgagugcuccaaccugcugcugcaguacggcagcuucugcacccagcugaauagagcccugacagggaucgccguggaacaggacaagaacacccaagagguguucgcccaagugaagcagaucuacaagaccccuccuaucaaggacuucggcggcuucaauuucagccagauucugcccgauccuagcaagcccagcaagcggagcuucaucgaggaccugcuguucaacaaagugacacuggccgacgccggcuucaucaagcaguauggcgauugucugggcgacauugccgccagggaucugauuugcgcccagaaguuuaacggacugacagugcugccuccucugcugaccgaugagaugaucgcccaguacacaucugcccugcuggccggcacaaucacaagcggcuggacauuuggagcaggcgccgcucugcagauccccuuugcuaugcagauggccuaccgguucaacggcaucggagugacccagaaugugcuguacgagaaccagaagcugaucgccaaccaguucaacagcgccaucggcaagauccaggacagccugagcagcacagcaagcgcccugggaaagcugcaggacguggucaaccagaaugcccaggcacugaacacccuggucaagcagcuguccuccaacuucggcgccaucagcucugugcugaacgauauccugagcagacuggacccuccugaggccgaggugcagaucgacagacugaucacaggcagacugcagagccuccagacauacgugacccagcagcugaucagagccgccgagauuagagccucugccaaucuggccgccaccaagaugucugagugugugcugggccagagcaagagaguggacuuuugcggcaagggcuaccaccugaugagcuucccucagucugccccucacggcgugguguuucugcacgugacauaugugcccgcucaagagaagaauuucaccaccgcuccagccaucugccacgacggcaaagcccacuuuccuagagaaggcguguucguguccaacggcacccauugguucgugacacagcggaacuucuacgagccccagaucaucaccaccgacaacaccuucgugucuggcaacugcgacgucgugaucggcauugugaacaauaccguguacgacccucugcagcccgagcuggacagcuucaaagaggaacuggacaaguacuuuaagaaccacacaagccccgacguggaccugggcgauaucagcggaaucaaugccagcgucgugaacauccagaaagagaucgaccggcugaacgagguggccaagaaucugaacgagagccugaucgaccugcaagaacuggggaaguacgagcaguacaucaaguggcccugguacaucuggcugggcuuuaucgccggacugauugccaucgugauggucacaaucaugcuguguugcaugaccagcugcuguagcugccugaagggcuguuguagcuguggcagcugcugcaaguucgacgaggacgauucugagcccgugcugaagggcgugaaacugcacuacacaugauaauaggcuggagccucgguggccuagcuucuugccccuugggccuccccccagccccuccuccccuuccugcacccguacccccguggucuuugaauaaagucugagugggcggcaaaaaaaaaaaaaaaaaaaaaaaaaaaaaaaaaaaaaaaaaaaaaaaaaaaaaaaaaaaaaaaaaaaaaaaaaaaaaaaaaaaaaaaaaaaaaaaaaaaa

SEQ ID NO: 26255 - RNA, 4095 nt, Artificial Sequence
  SARS-CoV-2/Wuhan/WIV05/2019__EPI_ISL_402128 spike protein mRNA gc mod (1-1273)(K986P_V987P_D614G_I692V)
gggaaauaagagagaaaagaagaguaagaagaaauauaagaccccggcgccgccaccauguucguguuccuggugcugcugccucugguguccagccagugugugaaccugaccaccagaacacagcugccuccagccuacaccaacagcuuuaccagaggcguguacuaccccgacaagguguucagauccagcgugcugcacucuacccaggaccuguuccugccuuucuucagcaacgugaccugguuccacgccauccacguguccggcaccaauggcaccaagagauucgacaaccccgugcugcccuucaacgacgggguguacuuugccagcaccgagaaguccaacaucaucagaggcuggaucuucggcaccacacuggacagcaagacccagagccugcugaucgugaacaacgccaccaacguggucaucaaagugugcgaguuccaguucugcaacgaccccuuccugggcgucuacuaccacaagaacaacaagagcuggauggaaagcgaguuccggguguacagcagcgccaacaacugcaccuucgaguacgugucccagccuuuccugauggaccuggaaggcaagcagggcaacuucaagaaccugcgcgaguucguguuuaagaacaucgacggcuacuucaagaucuacagcaagcacaccccuaucaaccucgugcgggaucugccucagggcuucucugcucuggaaccccugguggaucugcccaucggcaucaacaucacccgguuucagacacugcuggcccugcacagaagcuaccugacaccuggcgauagcagcagcggauggacagcuggugccgccgcuuacuaugugggcuaccugcagccuagaaccuuccugcugaaguacaacgagaacggcaccaucaccgacgccguggauugugcucuggauccucugagcgagacaaagugcacccugaaguccuucaccguggaaaagggcaucuaccagaccagcaacuuccgggugcagcccaccgaauccaucgugcgguuccccaauaucaccaaucugugccccuucggcgagguguucaaugccaccagauucgccucuguguacgccuggaaccggaagcggaucagcaauugcguggccgacuacuccgugcuguacaacuccgccagcuucagcaccuucaagugcuacggcguguccccuaccaagcugaacgaccugugcuucacaaacguguacgccgacagcuucgugauccggggagaugaagugcggcagauugccccuggacagacaggcaagaucgccgacuacaacuacaagcugcccgacgacuucaccggcugugugauugccuggaacagcaacaaccuggacuccaaagucggcggcaacuacaauuaccuguaccggcuguuccggaaguccaaucugaagcccuucgagcgggacaucuccaccgagaucuaucaggccggcagcaccccuuguaacggcguggaaggcuucaacugcuacuucccacugcaguccuacggcuuucagcccacaaauggcgugggcuaucagcccuacagagugguggugcugagcuucgaacugcugcaugccccugccacagugugcggcccuaagaaaagcaccaaucucgugaagaacaaaugcgugaacuucaacuucaacggccugaccggcaccggcgugcugacagagagcaacaagaaguuccugccauuccagcaguuuggccgggauaucgccgauaccacagacgccguuagagauccccagacacuggaaauccuggacaucaccccuugcagcuucggcggagugucugugaucaccccuggcaccaacaccagcaaucagguggcagugcuguaccagggcgugaacuguaccgaagugcccguggccauucacgccgaucagcugacaccuacauggcggguguacuccaccggcagcaauguguuucagaccagagccggcugucugaucggagccgagcacgugaacaauagcuacgagugcgacauccccaucggcgcuggaaucugcgccagcuaccagacacagacaaacagcccucggagagccagaagcguggccagccagagcgugauugccuacacaaugucucugggcgccgagaacagcguggccuacuccaacaacucuaucgcuauccccaccaacuucaccaucagcgugaccacagagauccugccuguguccaugaccaagaccagcguggacugcaccauguacaucugcggcgauuccaccgagugcuccaaccugcugcugcaguacggcagcuucugcacccagcugaauagagcccugacagggaucgccguggaacaggacaagaacacccaagagguguucgcccaagugaagcagaucuacaagaccccuccuaucaaggacuucggcggcuucaauuucagccagauucugcccgauccuagcaagcccagcaagcggagcuucaucgaggaccugcuguucaacaaagugacacuggccgacgccggcuucaucaagcaguauggcgauugucugggcgacauugccgccagggaucugauuugcgcccagaaguuuaacggacugacagugcugccuccucugcugaccgaugagaugaucgcccaguacacaucugcccugcuggccggcacaaucacaagcggcuggacauuuggagcaggcgccgcucugcagauccccuuugcuaugcagauggccuaccgguucaacggcaucggagugacccagaaugugcuguacgagaaccagaagcugaucgccaaccaguucaacagcgccaucggcaagauccaggacagccugagcagcacagcaagcgcccugggaaagcugcaggacguggucaaccagaaugcccaggcacugaacacccuggucaagcagcuguccuccaacuucggcgccaucagcucugugcugaacgauauccugagcagacuggacccuccugaggccgaggugcagaucgacagacugaucacaggcagacugcagagccuccagacauacgugacccagcagcugaucagagccgccgagauuagagccucugccaaucuggccgccaccaagaugucugagugugugcugggccagagcaagagaguggacuuuugcggcaagggcuaccaccugaugagcuucccucagucugccccucacggcgugguguuucugcacgugacauaugugcccgcucaagagaagaauuucaccaccgcuccagccaucugccacgacggcaaagcccacuuuccuagagaaggcguguucguguccaacggcacccauugguucgugacacagcggaacuucuacgagccccagaucaucaccaccgacaacaccuucgugucuggcaacugcgacgucgugaucggcauugugaacaauaccguguacgacccucugcagcccgagcuggacagcuucaaagaggaacuggacaaguacuuuaagaaccacacaagccccgacguggaccugggcgauaucagcggaaucaaugccagcgucgugaacauccagaaagagaucgaccggcugaacgagguggccaagaaucugaacgagagccugaucgaccugcaagaacuggggaaguacgagcaguacaucaaguggcccugguacaucuggcugggcuuuaucgccggacugauugccaucgugauggucacaaucaugcuguguugcaugaccagcugcuguagcugccugaagggcuguuguagcuguggcagcugcugcaaguucgacgaggacgauucugagcccgugcugaagggcgugaaacugcacuacacaugauaauaggcuggagccucgguggccuagcuucuugccccuugggccuccccccagccccuccuccccuuccugcacccguacccccguggucuuugaauaaagucugagugggcggcaaaaaaaaaaaaaaaaaaaaaaaaaaaaaaaaaaaaaaaaaaaaaaaaaaaaaaaaaaaaaaaaaaaaaaaaaaaaaaaaaaaaaaaaaaaaaaaaaaaa

SEQ ID NO: 26256 - RNA, 4095 nt, Artificial Sequence
  SARS-CoV-2/Wuhan/WIV05/2019__EPI_ISL_402128 spike protein mRNA gc mod (1-1273)(K986P_V987P_D614G_M1229I)
gggaaauaagagagaaaagaagaguaagaagaaauauaagaccccggcgccgccaccauguucguguuccuggugcugcugccucugguguccagccagugugugaaccugaccaccagaacacagcugccuccagccuacaccaacagcuuuaccagaggcguguacuaccccgacaagguguucagauccagcgugcugcacucuacccaggaccuguuccugccuuucuucagcaacgugaccugguuccacgccauccacguguccggcaccaauggcaccaagagauucgacaaccccgugcugcccuucaacgacgggguguacuuugccagcaccgagaaguccaacaucaucagaggcuggaucuucggcaccacacuggacagcaagacccagagccugcugaucgugaacaacgccaccaacguggucaucaaagugugcgaguuccaguucugcaacgaccccuuccugggcgucuacuaccacaagaacaacaagagcuggauggaaagcgaguuccggguguacagcagcgccaacaacugcaccuucgaguacgugucccagccuuuccugauggaccuggaaggcaagcagggcaacuucaagaaccugcgcgaguucguguuuaagaacaucgacggcuacuucaagaucuacagcaagcacaccccuaucaaccucgugcgggaucugccucagggcuucucugcucuggaaccccugguggaucugcccaucggcaucaacaucacccgguuucagacacugcuggcccugcacagaagcuaccugacaccuggcgauagcagcagcggauggacagcuggugccgccgcuuacuaugugggcuaccugcagccuagaaccuuccugcugaaguacaacgagaacggcaccaucaccgacgccguggauugugcucuggauccucugagcgagacaaagugcacccugaaguccuucaccguggaaaagggcaucuaccagaccagcaacuuccgggugcagcccaccgaauccaucgugcgguuccccaauaucaccaaucugugccccuucggcgagguguucaaugccaccagauucgccucuguguacgccuggaaccggaagcggaucagcaauugcguggccgacuacuccgugcuguacaacuccgccagcuucagcaccuucaagugcuacggcguguccccuaccaagcugaacgaccugugcuucacaaacguguacgccgacagcuucgugauccggggagaugaagugcggcagauugccccuggacagacaggcaagaucgccgacuacaacuacaagcugcccgacgacuucaccggcugugugauugccuggaacagcaacaaccuggacuccaaagucggcggcaacuacaauuaccuguaccggcuguuccggaaguccaaucugaagcccuucgagcgggacaucuccaccgagaucuaucaggccggcagcaccccuuguaacggcguggaaggcuucaacugcuacuucccacugcaguccuacggcuuucagcccacaaauggcgugggcuaucagcccuacagagugguggugcugagcuucgaacugcugcaugccccugccacagugugcggcccuaagaaaagcaccaaucucgugaagaacaaaugcgugaacuucaacuucaacggccugaccggcaccggcgugcugacagagagcaacaagaaguuccugccauuccagcaguuuggccgggauaucgccgauaccacagacgccguuagagauccccagacacuggaaauccuggacaucaccccuugcagcuucggcggagugucugugaucaccccuggcaccaacaccagcaaucagguggcagugcuguaccagggcgugaacuguaccgaagugcccguggccauucacgccgaucagcugacaccuacauggcggguguacuccaccggcagcaauguguuucagaccagagccggcugucugaucggagccgagcacgugaacaauagcuacgagugcgacauccccaucggcgcuggaaucugcgccagcuaccagacacagacaaacagcccucggagagccagaagcguggccagccagagcaucauugccuacacaaugucucugggcgccgagaacagcguggccuacuccaacaacucuaucgcuauccccaccaacuucaccaucagcgugaccacagagauccugccuguguccaugaccaagaccagcguggacugcaccauguacaucugcggcgauuccaccgagugcuccaaccugcugcugcaguacggcagcuucugcacccagcugaauagagcccugacagggaucgccguggaacaggacaagaacacccaagagguguucgcccaagugaagcagaucuacaagaccccuccuaucaaggacuucggcggcuucaauuucagccagauucugcccgauccuagcaagcccagcaagcggagcuucaucgaggaccugcuguucaacaaagugacacuggccgacgccggcuucaucaagcaguauggcgauugucugggcgacauugccgccagggaucugauuugcgcccagaaguuuaacggacugacagugcugccuccucugcugaccgaugagaugaucgcccaguacacaucugcccugcuggccggcacaaucacaagcggcuggacauuuggagcaggcgccgcucugcagauccccuuugcuaugcagauggccuaccgguucaacggcaucggagugacccagaaugugcuguacgagaaccagaagcugaucgccaaccaguucaacagcgccaucggcaagauccaggacagccugagcagcacagcaagcgcccugggaaagcugcaggacguggucaaccagaaugcccaggcacugaacacccuggucaagcagcuguccuccaacuucggcgccaucagcucugugcugaacgauauccugagcagacuggacccuccugaggccgaggugcagaucgacagacugaucacaggcagacugcagagccuccagacauacgugacccagcagcugaucagagccgccgagauuagagccucugccaaucuggccgccaccaagaugucugagugugugcugggccagagcaagagaguggacuuuugcggcaagggcuaccaccugaugagcuucccucagucugccccucacggcgugguguuucugcacgugacauaugugcccgcucaagagaagaauuucaccaccgcuccagccaucugccacgacggcaaagcccacuuuccuagagaaggcguguucguguccaacggcacccauugguucgugacacagcggaacuucuacgagccccagaucaucaccaccgacaacaccuucgugucuggcaacugcgacgucgugaucggcauugugaacaauaccguguacgacccucugcagcccgagcuggacagcuucaaagaggaacuggacaaguacuuuaagaaccacacaagccccgacguggaccugggcgauaucagcggaaucaaugccagcgucgugaacauccagaaagagaucgaccggcugaacgagguggccaagaaucugaacgagagccugaucgaccugcaagaacuggggaaguacgagcaguacaucaaguggcccugguacaucuggcugggcuuuaucgccggacugauugccaucgugaucgucacaaucaugcuguguugcaugaccagcugcuguagcugccugaagggcuguuguagcuguggcagcugcugcaaguucgacgaggacgauucugagcccgugcugaagggcgugaaacugcacuacacaugauaauaggcuggagccucgguggccuagcuucuugccccuugggccuccccccagccccuccuccccuuccugcacccguacccccguggucuuugaauaaagucugagugggcggcaaaaaaaaaaaaaaaaaaaaaaaaaaaaaaaaaaaaaaaaaaaaaaaaaaaaaaaaaaaaaaaaaaaaaaaaaaaaaaaaaaaaaaaaaaaaaaaaaaaa

SEQ ID NO: 26257 - RNA, 4089 nt, Artificial Sequence
  SARS-CoV-2/Wuhan/WIV05/2019__EPI_ISL_402128 spike protein mRNA gc mod (1-1273)(K986P_V987P_H69del_V70del_A222V_Y453F_S477N_D614G_I692V)
gggaaauaagagagaaaagaagaguaagaagaaauauaagaccccggcgccgccaccauguucguguuccuggugcugcugccucugguguccagccagugugugaaccugaccaccagaacacagcugccuccagccuacaccaacagcuuuaccagaggcguguacuaccccgacaagguguucagauccagcgugcugcacucuacccaggaccuguuccugccuuucuucagcaacgugaccugguuccacgccaucuccggcaccaauggcaccaagagauucgacaaccccgugcugcccuucaacgacgggguguacuuugccagcaccgagaaguccaacaucaucagaggcuggaucuucggcaccacacuggacagcaagacccagagccugcugaucgugaacaacgccaccaacguggucaucaaagugugcgaguuccaguucugcaacgaccccuuccugggcgucuacuaccacaagaacaacaagagcuggauggaaagcgaguuccggguguacagcagcgccaacaacugcaccuucgaguacgugucccagccuuuccugauggaccuggaaggcaagcagggcaacuucaagaaccugcgcgaguucguguuuaagaacaucgacggcuacuucaagaucuacagcaagcacaccccuaucaaccucgugcgggaucugccucagggcuucucugugcuggaaccccugguggaucugcccaucggcaucaacaucacccgguuucagacacugcuggcccugcacagaagcuaccugacaccuggcgauagcagcagcggauggacagcuggugccgccgcuuacuaugugggcuaccugcagccuagaaccuuccugcugaaguacaacgagaacggcaccaucaccgacgccguggauugugcucuggauccucugagcgagacaaagugcacccugaaguccuucaccguggaaaagggcaucuaccagaccagcaacuuccgggugcagcccaccgaauccaucgugcgguuccccaauaucaccaaucugugccccuucggcgagguguucaaugccaccagauucgccucuguguacgccuggaaccggaagcggaucagcaauugcguggccgacuacuccgugcuguacaacuccgccagcuucagcaccuucaagugcuacggcguguccccuaccaagcugaacgaccugugcuucacaaacguguacgccgacagcuucgugauccggggagaugaagugcggcagauugccccuggacagacaggcaagaucgccgacuacaacuacaagcugcccgacgacuucaccggcugugugauugccuggaacagcaacaaccuggacuccaaagucggcggcaacuacaauuaccuguuccggcuguuccggaaguccaaucugaagcccuucgagcgggacaucuccaccgagaucuaucaggccggcaacaccccuuguaacggcguggaaggcuucaacugcuacuucccacugcaguccuacggcuuucagcccacaaauggcgugggcuaucagcccuacagagugguggugcugagcuucgaacugcugcaugccccugccacagugugcggcccuaagaaaagcaccaaucucgugaagaacaaaugcgugaacuucaacuucaacggccugaccggcaccggcgugcugacagagagcaacaagaaguuccugccauuccagcaguuuggccgggauaucgccgauaccacagacgccguuagagauccccagacacuggaaauccuggacaucaccccuugcagcuucggcggagugucugugaucaccccuggcaccaacaccagcaaucagguggcagugcuguaccagggcgugaacuguaccgaagugcccguggccauucacgccgaucagcugacaccuacauggcggguguacuccaccggcagcaauguguuucagaccagagccggcugucugaucggagccgagcacgugaacaauagcuacgagugcgacauccccaucggcgcuggaaucugcgccagcuaccagacacagacaaacagcccucggagagccagaagcguggccagccagagcgugauugccuacacaaugucucugggcgccgagaacagcguggccuacuccaacaacucuaucgcuauccccaccaacuucaccaucagcgugaccacagagauccugccuguguccaugaccaagaccagcguggacugcaccauguacaucugcggcgauuccaccgagugcuccaaccugcugcugcaguacggcagcuucugcacccagcugaauagagcccugacagggaucgccguggaacaggacaagaacacccaagagguguucgcccaagugaagcagaucuacaagaccccuccuaucaaggacuucggcggcuucaauuucagccagauucugcccgauccuagcaagcccagcaagcggagcuucaucgaggaccugcuguucaacaaagugacacuggccgacgccggcuucaucaagcaguauggcgauugucugggcgacauugccgccagggaucugauuugcgcccagaaguuuaacggacugacagugcugccuccucugcugaccgaugagaugaucgcccaguacacaucugcccugcuggccggcacaaucacaagcggcuggacauuuggagcaggcgccgcucugcagauccccuuugcuaugcagauggccuaccgguucaacggcaucggagugacccagaaugugcuguacgagaaccagaagcugaucgccaaccaguucaacagcgccaucggcaagauccaggacagccugagcagcacagcaagcgcccugggaaagcugcaggacguggucaaccagaaugcccaggcacugaacacccuggucaagcagcuguccuccaacuucggcgccaucagcucugugcugaacgauauccugagcagacuggacccuccugaggccgaggugcagaucgacagacugaucacaggcagacugcagagccuccagacauacgugacccagcagcugaucagagccgccgagauuagagccucugccaaucuggccgccaccaagaugucugagugugugcugggccagagcaagagaguggacuuuugcggcaagggcuaccaccugaugagcuucccucagucugccccucacggcgugguguuucugcacgugacauaugugcccgcucaagagaagaauuucaccaccgcuccagccaucugccacgacggcaaagcccacuuuccuagagaaggcguguucguguccaacggcacccauugguucgugacacagcggaacuucuacgagccccagaucaucaccaccgacaacaccuucgugucuggcaacugcgacgucgugaucggcauugugaacaauaccguguacgacccucugcagcccgagcuggacagcuucaaagaggaacuggacaaguacuuuaagaaccacacaagccccgacguggaccugggcgauaucagcggaaucaaugccagcgucgugaacauccagaaagagaucgaccggcugaacgagguggccaagaaucugaacgagagccugaucgaccugcaagaacuggggaaguacgagcaguacaucaaguggcccugguacaucuggcugggcuuuaucgccggacugauugccaucgugauggucacaaucaugcuguguugcaugaccagcugcuguagcugccugaagggcuguuguagcuguggcagcugcugcaaguucgacgaggacgauucugagcccgugcugaagggcgugaaacugcacuacacaugauaauaggcuggagccucgguggccuagcuucuugccccuugggccuccccccagccccuccuccccuuccugcacccguacccccguggucuuugaauaaagucugagugggcggcaaaaaaaaaaaaaaaaaaaaaaaaaaaaaaaaaaaaaaaaaaaaaaaaaaaaaaaaaaaaaaaaaaaaaaaaaaaaaaaaaaaaaaaaaaaaaaaaaaaa

SEQ ID NO: 26258 - RNA, 4089 nt, Artificial Sequence
  SARS-CoV-2/Wuhan/WIV05/2019__EPI_ISL_402128 spike protein mRNA gc mod (1-1273)(K986P_V987P_H69del_V70del_Y453F_D614G_I692V_M1229I)
gggaaauaagagagaaaagaagaguaagaagaaauauaagaccccggcgccgccaccauguucguguuccuggugcugcugccucugguguccagccagugugugaaccugaccaccagaacacagcugccuccagccuacaccaacagcuuuaccagaggcguguacuaccccgacaagguguucagauccagcgugcugcacucuacccaggaccuguuccugccuuucuucagcaacgugaccugguuccacgccaucuccggcaccaauggcaccaagagauucgacaaccccgugcugcccuucaacgacgggguguacuuugccagcaccgagaaguccaacaucaucagaggcuggaucuucggcaccacacuggacagcaagacccagagccugcugaucgugaacaacgccaccaacguggucaucaaagugugcgaguuccaguucugcaacgaccccuuccugggcgucuacuaccacaagaacaacaagagcuggauggaaagcgaguuccggguguacagcagcgccaacaacugcaccuucgaguacgugucccagccuuuccugauggaccuggaaggcaagcagggcaacuucaagaaccugcgcgaguucguguuuaagaacaucgacggcuacuucaagaucuacagcaagcacaccccuaucaaccucgugcgggaucugccucagggcuucucugcucuggaaccccugguggaucugcccaucggcaucaacaucacccgguuucagacacugcuggcccugcacagaagcuaccugacaccuggcgauagcagcagcggauggacagcuggugccgccgcuuacuaugugggcuaccugcagccuagaaccuuccugcugaaguacaacgagaacggcaccaucaccgacgccguggauugugcucuggauccucugagcgagacaaagugcacccugaaguccuucaccguggaaaagggcaucuaccagaccagcaacuuccgggugcagcccaccgaauccaucgugcgguuccccaauaucaccaaucugugccccuucggcgagguguucaaugccaccagauucgccucuguguacgccuggaaccggaagcggaucagcaauugcguggccgacuacuccgugcuguacaacuccgccagcuucagcaccuucaagugcuacggcguguccccuaccaagcugaacgaccugugcuucacaaacguguacgccgacagcuucgugauccggggagaugaagugcggcagauugccccuggacagacaggcaagaucgccgacuacaacuacaagcugcccgacgacuucaccggcugugugauugccuggaacagcaacaaccuggacuccaaagucggcggcaacuacaauuaccuguuccggcuguuccggaaguccaaucugaagcccuucgagcgggacaucuccaccgagaucuaucaggccggcagcaccccuuguaacggcguggaaggcuucaacugcuacuucccacugcaguccuacggcuuucagcccacaaauggcgugggcuaucagcccuacagagugguggugcugagcuucgaacugcugcaugccccugccacagugugcggcccuaagaaaagcaccaaucucgugaagaacaaaugcgugaacuucaacuucaacggccugaccggcaccggcgugcugacagagagcaacaagaaguuccugccauuccagcaguuuggccgggauaucgccgauaccacagacgccguuagagauccccagacacuggaaauccuggacaucaccccuugcagcuucggcggagugucugugaucaccccuggcaccaacaccagcaaucagguggcagugcuguaccagggcgugaacuguaccgaagugcccguggccauucacgccgaucagcugacaccuacauggcggguguacuccaccggcagcaauguguuucagaccagagccggcugucugaucggagccgagcacgugaacaauagcuacgagugcgacauccccaucggcgcuggaaucugcgccagcuaccagacacagacaaacagcccucggagagccagaagcguggccagccagagcgugauugccuacacaaugucucugggcgccgagaacagcguggccuacuccaacaacucuaucgcuauccccaccaacuucaccaucagcgugaccacagagauccugccuguguccaugaccaagaccagcguggacugcaccauguacaucugcggcgauuccaccgagugcuccaaccugcugcugcaguacggcagcuucugcacccagcugaauagagcccugacagggaucgccguggaacaggacaagaacacccaagagguguucgcccaagugaagcagaucuacaagaccccuccuaucaaggacuucggcggcuucaauuucagccagauucugcccgauccuagcaagcccagcaagcggagcuucaucgaggaccugcuguucaacaaagugacacuggccgacgccggcuucaucaagcaguauggcgauugucugggcgacauugccgccagggaucugauuugcgcccagaaguuuaacggacugacagugcugccuccucugcugaccgaugagaugaucgcccaguacacaucugcccugcuggccggcacaaucacaagcggcuggacauuuggagcaggcgccgcucugcagauccccuuugcuaugcagauggccuaccgguucaacggcaucggagugacccagaaugugcuguacgagaaccagaagcugaucgccaaccaguucaacagcgccaucggcaagauccaggacagccugagcagcacagcaagcgcccugggaaagcugcaggacguggucaaccagaaugcccaggcacugaacacccuggucaagcagcuguccuccaacuucggcgccaucagcucugugcugaacgauauccugagcagacuggacccuccugaggccgaggugcagaucgacagacugaucacaggcagacugcagagccuccagacauacgugacccagcagcugaucagagccgccgagauuagagccucugccaaucuggccgccaccaagaugucugagugugugcugggccagagcaagagaguggacuuuugcggcaagggcuaccaccugaugagcuucccucagucugccccucacggcgugguguuucugcacgugacauaugugcccgcucaagagaagaauuucaccaccgcuccagccaucugccacgacggcaaagcccacuuuccuagagaaggcguguucguguccaacggcacccauugguucgugacacagcggaacuucuacgagccccagaucaucaccaccgacaacaccuucgugucuggcaacugcgacgucgugaucggcauugugaacaauaccguguacgacccucugcagcccgagcuggacagcuucaaagaggaacuggacaaguacuuuaagaaccacacaagccccgacguggaccugggcgauaucagcggaaucaaugccagcgucgugaacauccagaaagagaucgaccggcugaacgagguggccaagaaucugaacgagagccugaucgaccugcaagaacuggggaaguacgagcaguacaucaaguggcccugguacaucuggcugggcuuuaucgccggacugauugccaucgugaucgucacaaucaugcuguguugcaugaccagcugcuguagcugccugaagggcuguuguagcuguggcagcugcugcaaguucgacgaggacgauucugagcccgugcugaagggcgugaaacugcacuacacaugauaauaggcuggagccucgguggccuagcuucuugccccuugggccuccccccagccccuccuccccuuccugcacccguacccccguggucuuugaauaaagucugagugggcggcaaaaaaaaaaaaaaaaaaaaaaaaaaaaaaaaaaaaaaaaaaaaaaaaaaaaaaaaaaaaaaaaaaaaaaaaaaaaaaaaaaaaaaaaaaaaaaaaaaaa

SEQ ID NO: 26259 - RNA, 4086 nt, Artificial Sequence
  SARS-CoV-2/Wuhan/WIV05/2019__EPI_ISL_402128 spike protein mRNA gc mod (1-1273)(K986P_V987P_K986P_V987P_H69del_V70del_Y144del_N501Y_A570 D_D614G_P681H_T716I_S982A_D1118H)
gggaaauaagagagaaaagaagaguaagaagaaauauaagaccccggcgccgccaccauguucguguuccuggugcugcugccucugguguccagccagugugugaaccugaccaccagaacacagcugccuccagccuacaccaacagcuuuaccagaggcguguacuaccccgacaagguguucagauccagcgugcugcacucuacccaggaccuguuccugccuuucuucagcaacgugaccugguuccacgccaucuccggcaccaauggcaccaagagauucgacaaccccgugcugcccuucaacgacgggguguacuuugccagcaccgagaaguccaacaucaucagaggcuggaucuucggcaccacacuggacagcaagacccagagccugcugaucgugaacaacgccaccaacguggucaucaaagugugcgaguuccaguucugcaacgaccccuuccugggcgucuaccacaagaacaacaagagcuggauggaaagcgaguuccggguguacagcagcgccaacaacugcaccuucgaguacgugucccagccuuuccugauggaccuggaaggcaagcagggcaacuucaagaaccugcgcgaguucguguuuaagaacaucgacggcuacuucaagaucuacagcaagcacaccccuaucaaccucgugcgggaucugccucagggcuucucugcucuggaaccccugguggaucugcccaucggcaucaacaucacccgguuucagacacugcuggcccugcacagaagcuaccugacaccuggcgauagcagcagcggauggacagcuggugccgccgcuuacuaugugggcuaccugcagccuagaaccuuccugcugaaguacaacgagaacggcaccaucaccgacgccguggauugugcucuggauccucugagcgagacaaagugcacccugaaguccuucaccguggaaaagggcaucuaccagaccagcaacuuccgggugcagcccaccgaauccaucgugcgguuccccaauaucaccaaucugugccccuucggcgagguguucaaugccaccagauucgccucuguguacgccuggaaccggaagcggaucagcaauugcguggccgacuacuccgugcuguacaacuccgccagcuucagcaccuucaagugcuacggcguguccccuaccaagcugaacgaccugugcuucacaaacguguacgccgacagcuucgugauccggggagaugaagugcggcagauugccccuggacagacaggcaagaucgccgacuacaacuacaagcugcccgacgacuucaccggcugugugauugccuggaacagcaacaaccuggacuccaaagucggcggcaacuacaauuaccuguaccggcuguuccggaaguccaaucugaagcccuucgagcgggacaucuccaccgagaucuaucaggccggcagcaccccuuguaacggcguggaaggcuucaacugcuacuucccacugcaguccuacggcuuucagcccacauacggcgugggcuaucagcccuacagagugguggugcugagcuucgaacugcugcaugccccugccacagugugcggcccuaagaaaagcaccaaucucgugaagaacaaaugcgugaacuucaacuucaacggccugaccggcaccggcgugcugacagagagcaacaagaaguuccugccauuccagcaguuuggccgggauaucgacgauaccacagacgccguuagagauccccagacacuggaaauccuggacaucaccccuugcagcuucggcggagugucugugaucaccccuggcaccaacaccagcaaucagguggcagugcuguaccagggcgugaacuguaccgaagugcccguggccauucacgccgaucagcugacaccuacauggcggguguacuccaccggcagcaauguguuucagaccagagccggcugucugaucggagccgagcacgugaacaauagcuacgagugcgacauccccaucggcgcuggaaucugcgccagcuaccagacacagacaaacagccaccggagagccagaagcguggccagccagagcaucauugccuacacaaugucucugggcgccgagaacagcguggccuacuccaacaacucuaucgcuauccccaucaacuucaccaucagcgugaccacagagauccugccuguguccaugaccaagaccagcguggacugcaccauguacaucugcggcgauuccaccgagugcuccaaccugcugcugcaguacggcagcuucugcacccagcugaauagagcccugacagggaucgccguggaacaggacaagaacacccaagagguguucgcccaagugaagcagaucuacaagaccccuccuaucaaggacuucggcggcuucaauuucagccagauucugcccgauccuagcaagcccagcaagcggagcuucaucgaggaccugcuguucaacaaagugacacuggccgacgccggcuucaucaagcaguauggcgauugucugggcgacauugccgccagggaucugauuugcgcccagaaguuuaacggacugacagugcugccuccucugcugaccgaugagaugaucgcccaguacacaucugcccugcuggccggcacaaucacaagcggcuggacauuuggagcaggcgccgcucugcagauccccuuugcuaugcagauggccuaccgguucaacggcaucggagugacccagaaugugcuguacgagaaccagaagcugaucgccaaccaguucaacagcgccaucggcaagauccaggacagccugagcagcacagcaagcgcccugggaaagcugcaggacguggucaaccagaaugcccaggcacugaacacccuggucaagcagcuguccuccaacuucggcgccaucagcucugugcugaacgauauccuggccagacuggacccuccugaggccgaggugcagaucgacagacugaucacaggcagacugcagagccuccagacauacgugacccagcagcugaucagagccgccgagauuagagccucugccaaucuggccgccaccaagaugucugagugugugcugggccagagcaagagaguggacuuuugcggcaagggcuaccaccugaugagcuucccucagucugccccucacggcgugguguuucugcacgugacauaugugcccgcucaagagaagaauuucaccaccgcuccagccaucugccacgacggcaaagcccacuuuccuagagaaggcguguucguguccaacggcacccauugguucgugacacagcggaacuucuacgagccccagaucaucaccacccacaacaccuucgugucuggcaacugcgacgucgugaucggcauugugaacaauaccguguacgacccucugcagcccgagcuggacagcuucaaagaggaacuggacaaguacuuuaagaaccacacaagccccgacguggaccugggcgauaucagcggaaucaaugccagcgucgugaacauccagaaagagaucgaccggcugaacgagguggccaagaaucugaacgagagccugaucgaccugcaagaacuggggaaguacgagcaguacaucaaguggcccugguacaucuggcugggcuuuaucgccggacugauugccaucgugauggucacaaucaugcuguguugcaugaccagcugcuguagcugccugaagggcuguuguagcuguggcagcugcugcaaguucgacgaggacgauucugagcccgugcugaagggcgugaaacugcacuacacaugauaauaggcuggagccucgguggccuagcuucuugccccuugggccuccccccagccccuccuccccuuccugcacccguacccccguggucuuugaauaaagucugagugggcggcaaaaaaaaaaaaaaaaaaaaaaaaaaaaaaaaaaaaaaaaaaaaaaaaaaaaaaaaaaaaaaaaaaaaaaaaaaaaaaaaaaaaaaaaaaaaaaaaaaaa

SEQ ID NO: 26260 - RNA, 4095 nt, Artificial Sequence
  SARS-CoV-2/Wuhan/WIV05/2019__EPI_ISL_402128 spike protein mRNA gc mod (1-1273)(K986P_V987P_K986P_V987P_K417N_E484K_N501Y_D614G)
gggaaauaagagagaaaagaagaguaagaagaaauauaagaccccggcgccgccaccauguucguguuccuggugcugcugccucugguguccagccagugugugaaccugaccaccagaacacagcugccuccagccuacaccaacagcuuuaccagaggcguguacuaccccgacaagguguucagauccagcgugcugcacucuacccaggaccuguuccugccuuucuucagcaacgugaccugguuccacgccauccacguguccggcaccaauggcaccaagagauucgacaaccccgugcugcccuucaacgacgggguguacuuugccagcaccgagaaguccaacaucaucagaggcuggaucuucggcaccacacuggacagcaagacccagagccugcugaucgugaacaacgccaccaacguggucaucaaagugugcgaguuccaguucugcaacgaccccuuccugggcgucuacuaccacaagaacaacaagagcuggauggaaagcgaguuccggguguacagcagcgccaacaacugcaccuucgaguacgugucccagccuuuccugauggaccuggaaggcaagcagggcaacuucaagaaccugcgcgaguucguguuuaagaacaucgacggcuacuucaagaucuacagcaagcacaccccuaucaaccucgugcgggaucugccucagggcuucucugcucuggaaccccugguggaucugcccaucggcaucaacaucacccgguuucagacacugcuggcccugcacagaagcuaccugacaccuggcgauagcagcagcggauggacagcuggugccgccgcuuacuaugugggcuaccugcagccuagaaccuuccugcugaaguacaacgagaacggcaccaucaccgacgccguggauugugcucuggauccucugagcgagacaaagugcacccugaaguccuucaccguggaaaagggcaucuaccagaccagcaacuuccgggugcagcccaccgaauccaucgugcgguuccccaauaucaccaaucugugccccuucggcgagguguucaaugccaccagauucgccucuguguacgccuggaaccggaagcggaucagcaauugcguggccgacuacuccgugcuguacaacuccgccagcuucagcaccuucaagugcuacggcguguccccuaccaagcugaacgaccugugcuucacaaacguguacgccgacagcuucgugauccggggagaugaagugcggcagauugccccuggacagacaggcaacaucgccgacuacaacuacaagcugcccgacgacuucaccggcugugugauugccuggaacagcaacaaccuggacuccaaagucggcggcaacuacaauuaccuguaccggcuguuccggaaguccaaucugaagcccuucgagcgggacaucuccaccgagaucuaucaggccggcagcaccccuuguaacggcgugaagggcuucaacugcuacuucccacugcaguccuacggcuuucagcccacauacggcgugggcuaucagcccuacagagugguggugcugagcuucgaacugcugcaugccccugccacagugugcggcccuaagaaaagcaccaaucucgugaagaacaaaugcgugaacuucaacuucaacggccugaccggcaccggcgugcugacagagagcaacaagaaguuccugccauuccagcaguuuggccgggauaucgccgauaccacagacgccguuagagauccccagacacuggaaauccuggacaucaccccuugcagcuucggcggagugucugugaucaccccuggcaccaacaccagcaaucagguggcagugcuguaccagggcgugaacuguaccgaagugcccguggccauucacgccgaucagcugacaccuacauggcggguguacuccaccggcagcaauguguuucagaccagagccggcugucugaucggagccgagcacgugaacaauagcuacgagugcgacauccccaucggcgcuggaaucugcgccagcuaccagacacagacaaacagcccucggagagccagaagcguggccagccagagcaucauugccuacacaaugucucugggcgccgagaacagcguggccuacuccaacaacucuaucgcuauccccaccaacuucaccaucagcgugaccacagagauccugccuguguccaugaccaagaccagcguggacugcaccauguacaucugcggcgauuccaccgagugcuccaaccugcugcugcaguacggcagcuucugcacccagcugaauagagcccugacagggaucgccguggaacaggacaagaacacccaagagguguucgcccaagugaagcagaucuacaagaccccuccuaucaaggacuucggcggcuucaauuucagccagauucugcccgauccuagcaagcccagcaagcggagcuucaucgaggaccugcuguucaacaaagugacacuggccgacgccggcuucaucaagcaguauggcgauugucugggcgacauugccgccagggaucugauuugcgcccagaaguuuaacggacugacagugcugccuccucugcugaccgaugagaugaucgcccaguacacaucugcccugcuggccggcacaaucacaagcggcuggacauuuggagcaggcgccgcucugcagauccccuuugcuaugcagauggccuaccgguucaacggcaucggagugacccagaaugugcuguacgagaaccagaagcugaucgccaaccaguucaacagcgccaucggcaagauccaggacagccugagcagcacagcaagcgcccugggaaagcugcaggacguggucaaccagaaugcccaggcacugaacacccuggucaagcagcuguccuccaacuucggcgccaucagcucugugcugaacgauauccugagcagacuggacccuccugaggccgaggugcagaucgacagacugaucacaggcagacugcagagccuccagacauacgugacccagcagcugaucagagccgccgagauuagagccucugccaaucuggccgccaccaagaugucugagugugugcugggccagagcaagagaguggacuuuugcggcaagggcuaccaccugaugagcuucccucagucugccccucacggcgugguguuucugcacgugacauaugugcccgcucaagagaagaauuucaccaccgcuccagccaucugccacgacggcaaagcccacuuuccuagagaaggcguguucguguccaacggcacccauugguucgugacacagcggaacuucuacgagccccagaucaucaccaccgacaacaccuucgugucuggcaacugcgacgucgugaucggcauugugaacaauaccguguacgacccucugcagcccgagcuggacagcuucaaagaggaacuggacaaguacuuuaagaaccacacaagccccgacguggaccugggcgauaucagcggaaucaaugccagcgucgugaacauccagaaagagaucgaccggcugaacgagguggccaagaaucugaacgagagccugaucgaccugcaagaacuggggaaguacgagcaguacaucaaguggcccugguacaucuggcugggcuuuaucgccggacugauugccaucgugauggucacaaucaugcuguguugcaugaccagcugcuguagcugccugaagggcuguuguagcuguggcagcugcugcaaguucgacgaggacgauucugagcccgugcugaagggcgugaaacugcacuacacaugauaauaggcuggagccucgguggccuagcuucuugccccuugggccuccccccagccccuccuccccuuccugcacccguacccccguggucuuugaauaaagucugagugggcggcaaaaaaaaaaaaaaaaaaaaaaaaaaaaaaaaaaaaaaaaaaaaaaaaaaaaaaaaaaaaaaaaaaaaaaaaaaaaaaaaaaaaaaaaaaaaaaaaaaaa

SEQ ID NO: 26261 - RNA, 4086 nt, Artificial Sequence
  SARS-CoV-2/Wuhan/WIV05/2019__EPI_ISL_402128 spike protein mRNA gc mod (1-1273)(K986P_V987P_K986P_V987P_L18F_D80A_D215G_L242del_A243del_ L244del_R246I_K417N_E484K_N501Y_D614G_A701V)
gggaaauaagagagaaaagaagaguaagaagaaauauaagaccccggcgccgccaccauguucguguuccuggugcugcugccucugguguccagccagugugugaacuucaccaccagaacacagcugccuccagccuacaccaacagcuuuaccagaggcguguacuaccccgacaagguguucagauccagcgugcugcacucuacccaggaccuguuccugccuuucuucagcaacgugaccugguuccacgccauccacguguccggcaccaauggcaccaagagauucgccaaccccgugcugcccuucaacgacgggguguacuuugccagcaccgagaaguccaacaucaucagaggcuggaucuucggcaccacacuggacagcaagacccagagccugcugaucgugaacaacgccaccaacguggucaucaaagugugcgaguuccaguucugcaacgaccccuuccugggcgucuacuaccacaagaacaacaagagcuggauggaaagcgaguuccggguguacagcagcgccaacaacugcaccuucgaguacgugucccagccuuuccugauggaccuggaaggcaagcagggcaacuucaagaaccugcgcgaguucguguuuaagaacaucgacggcuacuucaagaucuacagcaagcacaccccuaucaaccucgugcggggccugccucagggcuucucugcucuggaaccccugguggaucugcccaucggcaucaacaucacccgguuucagacacugcacaucagcuaccugacaccuggcgauagcagcagcggauggacagcuggugccgccgcuuacuaugugggcuaccugcagccuagaaccuuccugcugaaguacaacgagaacggcaccaucaccgacgccguggauugugcucuggauccucugagcgagacaaagugcacccugaaguccuucaccguggaaaagggcaucuaccagaccagcaacuuccgggugcagcccaccgaauccaucgugcgguuccccaauaucaccaaucugugccccuucggcgagguguucaaugccaccagauucgccucuguguacgccuggaaccggaagcggaucagcaauugcguggccgacuacuccgugcuguacaacuccgccagcuucagcaccuucaagugcuacggcguguccccuaccaagcugaacgaccugugcuucacaaacguguacgccgacagcuucgugauccggggagaugaagugcggcagauugccccuggacagacaggcaacaucgccgacuacaacuacaagcugcccgacgacuucaccggcugugugauugccuggaacagcaacaaccuggacuccaaagucggcggcaacuacaauuaccuguaccggcuguuccggaaguccaaucugaagcccuucgagcgggacaucuccaccgagaucuaucaggccggcagcaccccuuguaacggcgugaagggcuucaacugcuacuucccacugcaguccuacggcuuucagcccacauacggcgugggcuaucagcccuacagagugguggugcugagcuucgaacugcugcaugccccugccacagugugcggcccuaagaaaagcaccaaucucgugaagaacaaaugcgugaacuucaacuucaacggccugaccggcaccggcgugcugacagagagcaacaagaaguuccugccauuccagcaguuuggccgggauaucgccgauaccacagacgccguuagagauccccagacacuggaaauccuggacaucaccccuugcagcuucggcggagugucugugaucaccccuggcaccaacaccagcaaucagguggcagugcuguaccagggcgugaacuguaccgaagugcccguggccauucacgccgaucagcugacaccuacauggcggguguacuccaccggcagcaauguguuucagaccagagccggcugucugaucggagccgagcacgugaacaauagcuacgagugcgacauccccaucggcgcuggaaucugcgccagcuaccagacacagacaaacagcccucggagagccagaagcguggccagccagagcaucauugccuacacaaugucucugggcguggagaacagcguggccuacuccaacaacucuaucgcuauccccaccaacuucaccaucagcgugaccacagagauccugccuguguccaugaccaagaccagcguggacugcaccauguacaucugcggcgauuccaccgagugcuccaaccugcugcugcaguacggcagcuucugcacccagcugaauagagcccugacagggaucgccguggaacaggacaagaacacccaagagguguucgcccaagugaagcagaucuacaagaccccuccuaucaaggacuucggcggcuucaauuucagccagauucugcccgauccuagcaagcccagcaagcggagcuucaucgaggaccugcuguucaacaaagugacacuggccgacgccggcuucaucaagcaguauggcgauugucugggcgacauugccgccagggaucugauuugcgcccagaaguuuaacggacugacagugcugccuccucugcugaccgaugagaugaucgcccaguacacaucugcccugcuggccggcacaaucacaagcggcuggacauuuggagcaggcgccgcucugcagauccccuuugcuaugcagauggccuaccgguucaacggcaucggagugacccagaaugugcuguacgagaaccagaagcugaucgccaaccaguucaacagcgccaucggcaagauccaggacagccugagcagcacagcaagcgcccugggaaagcugcaggacguggucaaccagaaugcccaggcacugaacacccuggucaagcagcuguccuccaacuucggcgccaucagcucugugcugaacgauauccugagcagacuggacccuccugaggccgaggugcagaucgacagacugaucacaggcagacugcagagccuccagacauacgugacccagcagcugaucagagccgccgagauuagagccucugccaaucuggccgccaccaagaugucugagugugugcugggccagagcaagagaguggacuuuugcggcaagggcuaccaccugaugagcuucccucagucugccccucacggcgugguguuucugcacgugacauaugugcccgcucaagagaagaauuucaccaccgcuccagccaucugccacgacggcaaagcccacuuuccuagagaaggcguguucguguccaacggcacccauugguucgugacacagcggaacuucuacgagccccagaucaucaccaccgacaacaccuucgugucuggcaacugcgacgucgugaucggcauugugaacaauaccguguacgacccucugcagcccgagcuggacagcuucaaagaggaacuggacaaguacuuuaagaaccacacaagccccgacguggaccugggcgauaucagcggaaucaaugccagcgucgugaacauccagaaagagaucgaccggcugaacgagguggccaagaaucugaacgagagccugaucgaccugcaagaacuggggaaguacgagcaguacaucaaguggcccugguacaucuggcugggcuuuaucgccggacugauugccaucgugauggucacaaucaugcuguguugcaugaccagcugcuguagcugccugaagggcuguuguagcuguggcagcugcugcaaguucgacgaggacgauucugagcccgugcugaagggcgugaaacugcacuacacaugauaauaggcuggagccucgguggccuagcuucuugccccuugggccuccccccagccccuccuccccuuccugcacccguacccccguggucuuugaauaaagucugagugggcggcaaaaaaaaaaaaaaaaaaaaaaaaaaaaaaaaaaaaaaaaaaaaaaaaaaaaaaaaaaaaaaaaaaaaaaaaaaaaaaaaaaaaaaaaaaaaaaaaaaaa

SEQ ID NO: 26262 - RNA, 4095 nt, Artificial Sequence
  SARS-CoV-2/Wuhan/WIV05/2019__EPI_ISL_402128 spike protein mRNA gc mod (1-1273)(K986P_V987P_K986P_V987P_E484K_D614G)
gggaaauaagagagaaaagaagaguaagaagaaauauaagaccccggcgccgccaccauguucguguuccuggugcugcugccucugguguccagccagugugugaaccugaccaccagaacacagcugccuccagccuacaccaacagcuuuaccagaggcguguacuaccccgacaagguguucagauccagcgugcugcacucuacccaggaccuguuccugccuuucuucagcaacgugaccugguuccacgccauccacguguccggcaccaauggcaccaagagauucgacaaccccgugcugcccuucaacgacgggguguacuuugccagcaccgagaaguccaacaucaucagaggcuggaucuucggcaccacacuggacagcaagacccagagccugcugaucgugaacaacgccaccaacguggucaucaaagugugcgaguuccaguucugcaacgaccccuuccugggcgucuacuaccacaagaacaacaagagcuggauggaaagcgaguuccggguguacagcagcgccaacaacugcaccuucgaguacgugucccagccuuuccugauggaccuggaaggcaagcagggcaacuucaagaaccugcgcgaguucguguuuaagaacaucgacggcuacuucaagaucuacagcaagcacaccccuaucaaccucgugcgggaucugccucagggcuucucugcucuggaaccccugguggaucugcccaucggcaucaacaucacccgguuucagacacugcuggcccugcacagaagcuaccugacaccuggcgauagcagcagcggauggacagcuggugccgccgcuuacuaugugggcuaccugcagccuagaaccuuccugcugaaguacaacgagaacggcaccaucaccgacgccguggauugugcucuggauccucugagcgagacaaagugcacccugaaguccuucaccguggaaaagggcaucuaccagaccagcaacuuccgggugcagcccaccgaauccaucgugcgguuccccaauaucaccaaucugugccccuucggcgagguguucaaugccaccagauucgccucuguguacgccuggaaccggaagcggaucagcaauugcguggccgacuacuccgugcuguacaacuccgccagcuucagcaccuucaagugcuacggcguguccccuaccaagcugaacgaccugugcuucacaaacguguacgccgacagcuucgugauccggggagaugaagugcggcagauugccccuggacagacaggcaagaucgccgacuacaacuacaagcugcccgacgacuucaccggcugugugauugccuggaacagcaacaaccuggacuccaaagucggcggcaacuacaauuaccuguaccggcuguuccggaaguccaaucugaagcccuucgagcgggacaucuccaccgagaucuaucaggccggcagcaccccuuguaacggcgugaagggcuucaacugcuacuucccacugcaguccuacggcuuucagcccacaaauggcgugggcuaucagcccuacagagugguggugcugagcuucgaacugcugcaugccccugccacagugugcggcccuaagaaaagcaccaaucucgugaagaacaaaugcgugaacuucaacuucaacggccugaccggcaccggcgugcugacagagagcaacaagaaguuccugccauuccagcaguuuggccgggauaucgccgauaccacagacgccguuagagauccccagacacuggaaauccuggacaucaccccuugcagcuucggcggagugucugugaucaccccuggcaccaacaccagcaaucagguggcagugcuguaccagggcgugaacuguaccgaagugcccguggccauucacgccgaucagcugacaccuacauggcggguguacuccaccggcagcaauguguuucagaccagagccggcugucugaucggagccgagcacgugaacaauagcuacgagugcgacauccccaucggcgcuggaaucugcgccagcuaccagacacagacaaacagcccucggagagccagaagcguggccagccagagcaucauugccuacacaaugucucugggcgccgagaacagcguggccuacuccaacaacucuaucgcuauccccaccaacuucaccaucagcgugaccacagagauccugccuguguccaugaccaagaccagcguggacugcaccauguacaucugcggcgauuccaccgagugcuccaaccugcugcugcaguacggcagcuucugcacccagcugaauagagcccugacagggaucgccguggaacaggacaagaacacccaagagguguucgcccaagugaagcagaucuacaagaccccuccuaucaaggacuucggcggcuucaauuucagccagauucugcccgauccuagcaagcccagcaagcggagcuucaucgaggaccugcuguucaacaaagugacacuggccgacgccggcuucaucaagcaguauggcgauugucugggcgacauugccgccagggaucugauuugcgcccagaaguuuaacggacugacagugcugccuccucugcugaccgaugagaugaucgcccaguacacaucugcccugcuggccggcacaaucacaagcggcuggacauuuggagcaggcgccgcucugcagauccccuuugcuaugcagauggccuaccgguucaacggcaucggagugacccagaaugugcuguacgagaaccagaagcugaucgccaaccaguucaacagcgccaucggcaagauccaggacagccugagcagcacagcaagcgcccugggaaagcugcaggacguggucaaccagaaugcccaggcacugaacacccuggucaagcagcuguccuccaacuucggcgccaucagcucugugcugaacgauauccugagcagacuggacccuccugaggccgaggugcagaucgacagacugaucacaggcagacugcagagccuccagacauacgugacccagcagcugaucagagccgccgagauuagagccucugccaaucuggccgccaccaagaugucugagugugugcugggccagagcaagagaguggacuuuugcggcaagggcuaccaccugaugagcuucccucagucugccccucacggcgugguguuucugcacgugacauaugugcccgcucaagagaagaauuucaccaccgcuccagccaucugccacgacggcaaagcccacuuuccuagagaaggcguguucguguccaacggcacccauugguucgugacacagcggaacuucuacgagccccagaucaucaccaccgacaacaccuucgugucuggcaacugcgacgucgugaucggcauugugaacaauaccguguacgacccucugcagcccgagcuggacagcuucaaagaggaacuggacaaguacuuuaagaaccacacaagccccgacguggaccugggcgauaucagcggaaucaaugccagcgucgugaacauccagaaagagaucgaccggcugaacgagguggccaagaaucugaacgagagccugaucgaccugcaagaacuggggaaguacgagcaguacaucaaguggcccugguacaucuggcugggcuuuaucgccggacugauugccaucgugauggucacaaucaugcuguguugcaugaccagcugcuguagcugccugaagggcuguuguagcuguggcagcugcugcaaguucgacgaggacgauucugagcccgugcugaagggcgugaaacugcacuacacaugauaauaggcuggagccucgguggccuagcuucuugccccuugggccuccccccagccccuccuccccuuccugcacccguacccccguggucuuugaauaaagucugagugggcggcaaaaaaaaaaaaaaaaaaaaaaaaaaaaaaaaaaaaaaaaaaaaaaaaaaaaaaaaaaaaaaaaaaaaaaaaaaaaaaaaaaaaaaaaaaaaaaaaaaaa

SEQ ID NO: 26263 - RNA, 4095 nt, Artificial Sequence
  SARS-CoV-2/Wuhan/WIV05/2019__EPI_ISL_402128 spike protein mRNA gc mod (1-1273)(K986P_V987P_K986P_V987P_L18F_T20N_P26S_D138Y_R190S_K417T _E484K_N501Y_D614G_H655Y_T1027I)
gggaaauaagagagaaaagaagaguaagaagaaauauaagaccccggcgccgccaccauguucguguuccuggugcugcugccucugguguccagccagugugugaacuucaccaacagaacacagcugccuagcgccuacaccaacagcuuuaccagaggcguguacuaccccgacaagguguucagauccagcgugcugcacucuacccaggaccuguuccugccuuucuucagcaacgugaccugguuccacgccauccacguguccggcaccaauggcaccaagagauucgacaaccccgugcugcccuucaacgacgggguguacuuugccagcaccgagaaguccaacaucaucagaggcuggaucuucggcaccacacuggacagcaagacccagagccugcugaucgugaacaacgccaccaacguggucaucaaagugugcgaguuccaguucugcaacuaccccuuccugggcgucuacuaccacaagaacaacaagagcuggauggaaagcgaguuccggguguacagcagcgccaacaacugcaccuucgaguacgugucccagccuuuccugauggaccuggaaggcaagcagggcaacuucaagaaccugagcgaguucguguuuaagaacaucgacggcuacuucaagaucuacagcaagcacaccccuaucaaccucgugcgggaucugccucagggcuucucugcucuggaaccccugguggaucugcccaucggcaucaacaucacccgguuucagacacugcuggcccugcacagaagcuaccugacaccuggcgauagcagcagcggauggacagcuggugccgccgcuuacuaugugggcuaccugcagccuagaaccuuccugcugaaguacaacgagaacggcaccaucaccgacgccguggauugugcucuggauccucugagcgagacaaagugcacccugaaguccuucaccguggaaaagggcaucuaccagaccagcaacuuccgggugcagcccaccgaauccaucgugcgguuccccaauaucaccaaucugugccccuucggcgagguguucaaugccaccagauucgccucuguguacgccuggaaccggaagcggaucagcaauugcguggccgacuacuccgugcuguacaacuccgccagcuucagcaccuucaagugcuacggcguguccccuaccaagcugaacgaccugugcuucacaaacguguacgccgacagcuucgugauccggggagaugaagugcggcagauugccccuggacagacaggcaccaucgccgacuacaacuacaagcugcccgacgacuucaccggcugugugauugccuggaacagcaacaaccuggacuccaaagucggcggcaacuacaauuaccuguaccggcuguuccggaaguccaaucugaagcccuucgagcgggacaucuccaccgagaucuaucaggccggcagcaccccuuguaacggcgugaagggcuucaacugcuacuucccacugcaguccuacggcuuucagcccacauacggcgugggcuaucagcccuacagagugguggugcugagcuucgaacugcugcaugccccugccacagugugcggcccuaagaaaagcaccaaucucgugaagaacaaaugcgugaacuucaacuucaacggccugaccggcaccggcgugcugacagagagcaacaagaaguuccugccauuccagcaguuuggccgggauaucgccgauaccacagacgccguuagagauccccagacacuggaaauccuggacaucaccccuugcagcuucggcggagugucugugaucaccccuggcaccaacaccagcaaucagguggcagugcuguaccagggcgugaacuguaccgaagugcccguggccauucacgccgaucagcugacaccuacauggcggguguacuccaccggcagcaauguguuucagaccagagccggcugucugaucggagccgaguacgugaacaauagcuacgagugcgacauccccaucggcgcuggaaucugcgccagcuaccagacacagacaaacagcccucggagagccagaagcguggccagccagagcaucauugccuacacaaugucucugggcgccgagaacagcguggccuacuccaacaacucuaucgcuauccccaccaacuucaccaucagcgugaccacagagauccugccuguguccaugaccaagaccagcguggacugcaccauguacaucugcggcgauuccaccgagugcuccaaccugcugcugcaguacggcagcuucugcacccagcugaauagagcccugacagggaucgccguggaacaggacaagaacacccaagagguguucgcccaagugaagcagaucuacaagaccccuccuaucaaggacuucggcggcuucaauuucagccagauucugcccgauccuagcaagcccagcaagcggagcuucaucgaggaccugcuguucaacaaagugacacuggccgacgccggcuucaucaagcaguauggcgauugucugggcgacauugccgccagggaucugauuugcgcccagaaguuuaacggacugacagugcugccuccucugcugaccgaugagaugaucgcccaguacacaucugcccugcuggccggcacaaucacaagcggcuggacauuuggagcaggcgccgcucugcagauccccuuugcuaugcagauggccuaccgguucaacggcaucggagugacccagaaugugcuguacgagaaccagaagcugaucgccaaccaguucaacagcgccaucggcaagauccaggacagccugagcagcacagcaagcgcccugggaaagcugcaggacguggucaaccagaaugcccaggcacugaacacccuggucaagcagcuguccuccaacuucggcgccaucagcucugugcugaacgauauccugagcagacuggacccuccugaggccgaggugcagaucgacagacugaucacaggcagacugcagagccuccagacauacgugacccagcagcugaucagagccgccgagauuagagccucugccaaucuggccgccaucaagaugucugagugugugcugggccagagcaagagaguggacuuuugcggcaagggcuaccaccugaugagcuucccucagucugccccucacggcgugguguuucugcacgugacauaugugcccgcucaagagaagaauuucaccaccgcuccagccaucugccacgacggcaaagcccacuuuccuagagaaggcguguucguguccaacggcacccauugguucgugacacagcggaacuucuacgagccccagaucaucaccaccgacaacaccuucgugucuggcaacugcgacgucgugaucggcauugugaacaauaccguguacgacccucugcagcccgagcuggacagcuucaaagaggaacuggacaaguacuuuaagaaccacacaagccccgacguggaccugggcgauaucagcggaaucaaugccagcgucgugaacauccagaaagagaucgaccggcugaacgagguggccaagaaucugaacgagagccugaucgaccugcaagaacuggggaaguacgagcaguacaucaaguggcccugguacaucuggcugggcuuuaucgccggacugauugccaucgugauggucacaaucaugcuguguugcaugaccagcugcuguagcugccugaagggcuguuguagcuguggcagcugcugcaaguucgacgaggacgauucugagcccgugcugaagggcgugaaacugcacuacacaugauaauaggcuggagccucgguggccuagcuucuugccccuugggccuccccccagccccuccuccccuuccugcacccguacccccguggucuuugaauaaagucugagugggcggcaaaaaaaaaaaaaaaaaaaaaaaaaaaaaaaaaaaaaaaaaaaaaaaaaaaaaaaaaaaaaaaaaaaaaaaaaaaaaaaaaaaaaaaaaaaaaaaaaaaa

SEQ ID NO: 26264 - RNA, 4095 nt, Artificial Sequence
  SARS-CoV-2/Wuhan/WIV05/2019__EPI_ISL_402128 spike protein mRNA gc mod (1-1273)(K986P_V987P_K986P_V987P_S13I_W152C_L452R_D614G)
gggaaauaagagagaaaagaagaguaagaagaaauauaagaccccggcgccgccaccauguucguguuccuggugcugcugccucugguguccauccagugugugaaccugaccaccagaacacagcugccuccagccuacaccaacagcuuuaccagaggcguguacuaccccgacaagguguucagauccagcgugcugcacucuacccaggaccuguuccugccuuucuucagcaacgugaccugguuccacgccauccacguguccggcaccaauggcaccaagagauucgacaaccccgugcugcccuucaacgacgggguguacuuugccagcaccgagaaguccaacaucaucagaggcuggaucuucggcaccacacuggacagcaagacccagagccugcugaucgugaacaacgccaccaacguggucaucaaagugugcgaguuccaguucugcaacgaccccuuccugggcgucuacuaccacaagaacaacaagagcugcauggaaagcgaguuccggguguacagcagcgccaacaacugcaccuucgaguacgugucccagccuuuccugauggaccuggaaggcaagcagggcaacuucaagaaccugcgcgaguucguguuuaagaacaucgacggcuacuucaagaucuacagcaagcacaccccuaucaaccucgugcgggaucugccucagggcuucucugcucuggaaccccugguggaucugcccaucggcaucaacaucacccgguuucagacacugcuggcccugcacagaagcuaccugacaccuggcgauagcagcagcggauggacagcuggugccgccgcuuacuaugugggcuaccugcagccuagaaccuuccugcugaaguacaacgagaacggcaccaucaccgacgccguggauugugcucuggauccucugagcgagacaaagugcacccugaaguccuucaccguggaaaagggcaucuaccagaccagcaacuuccgggugcagcccaccgaauccaucgugcgguuccccaauaucaccaaucugugccccuucggcgagguguucaaugccaccagauucgccucuguguacgccuggaaccggaagcggaucagcaauugcguggccgacuacuccgugcuguacaacuccgccagcuucagcaccuucaagugcuacggcguguccccuaccaagcugaacgaccugugcuucacaaacguguacgccgacagcuucgugauccggggagaugaagugcggcagauugccccuggacagacaggcaagaucgccgacuacaacuacaagcugcccgacgacuucaccggcugugugauugccuggaacagcaacaaccuggacuccaaagucggcggcaacuacaauuaccgcuaccggcuguuccggaaguccaaucugaagcccuucgagcgggacaucuccaccgagaucuaucaggccggcagcaccccuuguaacggcguggaaggcuucaacugcuacuucccacugcaguccuacggcuuucagcccacaaauggcgugggcuaucagcccuacagagugguggugcugagcuucgaacugcugcaugccccugccacagugugcggcccuaagaaaagcaccaaucucgugaagaacaaaugcgugaacuucaacuucaacggccugaccggcaccggcgugcugacagagagcaacaagaaguuccugccauuccagcaguuuggccgggauaucgccgauaccacagacgccguuagagauccccagacacuggaaauccuggacaucaccccuugcagcuucggcggagugucugugaucaccccuggcaccaacaccagcaaucagguggcagugcuguaccagggcgugaacuguaccgaagugcccguggccauucacgccgaucagcugacaccuacauggcggguguacuccaccggcagcaauguguuucagaccagagccggcugucugaucggagccgagcacgugaacaauagcuacgagugcgacauccccaucggcgcuggaaucugcgccagcuaccagacacagacaaacagcccucggagagccagaagcguggccagccagagcaucauugccuacacaaugucucugggcgccgagaacagcguggccuacuccaacaacucuaucgcuauccccaccaacuucaccaucagcgugaccacagagauccugccuguguccaugaccaagaccagcguggacugcaccauguacaucugcggcgauuccaccgagugcuccaaccugcugcugcaguacggcagcuucugcacccagcugaauagagcccugacagggaucgccguggaacaggacaagaacacccaagagguguucgcccaagugaagcagaucuacaagaccccuccuaucaaggacuucggcggcuucaauuucagccagauucugcccgauccuagcaagcccagcaagcggagcuucaucgaggaccugcuguucaacaaagugacacuggccgacgccggcuucaucaagcaguauggcgauugucugggcgacauugccgccagggaucugauuugcgcccagaaguuuaacggacugacagugcugccuccucugcugaccgaugagaugaucgcccaguacacaucugcccugcuggccggcacaaucacaagcggcuggacauuuggagcaggcgccgcucugcagauccccuuugcuaugcagauggccuaccgguucaacggcaucggagugacccagaaugugcuguacgagaaccagaagcugaucgccaaccaguucaacagcgccaucggcaagauccaggacagccugagcagcacagcaagcgcccugggaaagcugcaggacguggucaaccagaaugcccaggcacugaacacccuggucaagcagcuguccuccaacuucggcgccaucagcucugugcugaacgauauccugagcagacuggacccuccugaggccgaggugcagaucgacagacugaucacaggcagacugcagagccuccagacauacgugacccagcagcugaucagagccgccgagauuagagccucugccaaucuggccgccaccaagaugucugagugugugcugggccagagcaagagaguggacuuuugcggcaagggcuaccaccugaugagcuucccucagucugccccucacggcgugguguuucugcacgugacauaugugcccgcucaagagaagaauuucaccaccgcuccagccaucugccacgacggcaaagcccacuuuccuagagaaggcguguucguguccaacggcacccauugguucgugacacagcggaacuucuacgagccccagaucaucaccaccgacaacaccuucgugucuggcaacugcgacgucgugaucggcauugugaacaauaccguguacgacccucugcagcccgagcuggacagcuucaaagaggaacuggacaaguacuuuaagaaccacacaagccccgacguggaccugggcgauaucagcggaaucaaugccagcgucgugaacauccagaaagagaucgaccggcugaacgagguggccaagaaucugaacgagagccugaucgaccugcaagaacuggggaaguacgagcaguacaucaaguggcccugguacaucuggcugggcuuuaucgccggacugauugccaucgugauggucacaaucaugcuguguugcaugaccagcugcuguagcugccugaagggcuguuguagcuguggcagcugcugcaaguucgacgaggacgauucugagcccgugcugaagggcgugaaacugcacuacacaugauaauaggcuggagccucgguggccuagcuucuugccccuugggccuccccccagccccuccuccccuuccugcacccguacccccguggucuuugaauaaagucugagugggcggcaaaaaaaaaaaaaaaaaaaaaaaaaaaaaaaaaaaaaaaaaaaaaaaaaaaaaaaaaaaaaaaaaaaaaaaaaaaaaaaaaaaaaaaaaaaaaaaaaaaa

SEQ ID NO: 26265 - RNA, 1603 nt, Artificial Sequence
  SARS-CoV-2/Wuhan/WIV05/2019__EPI_ISL_402128 spike protein mRNA gc (1-15,334-528) Ferritin construct
agaauaaacuaguauucuucugguccccacagacucagagagaacccgccaccauguucguguuccugguccuccugccccuggugagcucccagugcaaccugugccccuucggcgagguguucaacgccacccgguucgccagcgucuacgccuggaaccgcaagcggaucuccaacugcguggcggacuacagcgugcuguacaacuccgccagcuucuccacguucaagugcuacggcgucagccccaccaagcucaacgaccugugcuucaccaacguguacgccgacuccuucgugauccgcggggacgagguccggcagaucgcccccggccagaccgggaagaucgccgacuacaacuacaagcugccggacgacuucacgggcugcgugaucgcguggaacagcaacaaccucgacuccaaggucgggggcaacuacaacuaccuguaccgccuguuccgcaagagcaaccucaagcccuucgagcgggacaucuccaccgagaucuaccaggccggcagcacccccugcaacgggguggagggcuucaacugcuacuucccccugcaguccuacggguuccagccgaccaacggcgugggguaccagcccuaccggguggucgugcugagcuucgagcuccugcacgcccccgccacggugugcggccccaagggcggggguggaagcggcggggguggaagugacaucaucaagcuccugaacgagcaggucaacaaggagaugcaguccagcaaccuguacauguccaugagcuccuggugcuacacccacagccucgacggcgccgggcuguuccuguucgaccacgccgcggaggaguacgagcacgccaagaagcucaucaucuuccugaacgagaacaacgugcccgugcagcugaccuccaucagcgccccggagcacaaguucgagggccucacgcagaucuuccagaaggccuacgagcacgagcagcacaucuccgagagcaucaacaacaucguggaccacgccaucaaguccaaggaccacgcgaccuucaacuuccugcagugguacgucgccgagcagcacgaggaggaggugcuguucaaggacauccucgacaagaucgagcugaucgggaacgagaaccacggccuguaccucgccgaccaguacgugaaggggaucgccaagagccgcaaguccugaugacucgagcugguacugcaugcacgcaaugcuagcugccccuuucccguccuggguaccccgagucucccccgaccucgggucccagguaugcucccaccuccaccugccccacucaccaccucugcuaguuccagacaccucccaagcacgcagcaaugcagcucaaaacgcuuagccuagccacacccccacgggaaacagcagugauuaaccuuuagcaauaaacgaaaguuuaacuaagcuauacuaaccccaggguuggucaauuucgugccagccacacccuggagcuagcaaaaaaaaaaaaaaaaaaaaaaaaaaaaaaaaaaaaaaaaaaaaaaaaaaaaaaaaaaaaaaaaaaaaaaaaaaaaaaaaaaaaaaaaaaaaaaaaaaaa

SEQ ID NO: 26266 - RNA, 1201 nt, Artificial Sequence
  SARS-CoV-2/Wuhan/WIV05/2019__EPI_ISL_402128 spike protein mRNA gc (334-528) Foldon construct
agaauaaacuaguauucuucugguccccacagacucagagagaacccgccaccaugcccaugggcagccugcagccgcucgccacccuguaccugcucgggaugcugguggccuccguccuggcgaaccugugccccuucggcgagguguucaacgccacccgguucgccagcgucuacgccuggaaccgcaagcggaucuccaacugcguggcggacuacagcgugcuguacaacuccgccagcuucuccacguucaagugcuacggcgucagccccaccaagcucaacgaccugugcuucaccaacguguacgccgacuccuucgugauccgcggggacgagguccggcagaucgcccccggccagaccgggaagaucgccgacuacaacuacaagcugccggacgacuucacgggcugcgugaucgcguggaacagcaacaaccucgacuccaaggucgggggcaacuacaacuaccuguaccgccuguuccgcaagagcaaccucaagcccuucgagcgggacaucuccaccgagaucuaccaggccggcagcacccccugcaacgggguggagggcuucaacugcuacuucccccugcaguccuacggguuccagccgaccaacggcgugggguaccagcccuaccggguggucgugcugagcuucgagcuccugcacgcccccgccacggugugcggccccaagggcagcggcggguacauccccgaggccccgcgcgacggccaggccuacgugcggaaggacggcgaguggguccugcugagcaccuuccucugaugacucgagcugguacugcaugcacgcaaugcuagcugccccuuucccguccuggguaccccgagucucccccgaccucgggucccagguaugcucccaccuccaccugccccacucaccaccucugcuaguuccagacaccucccaagcacgcagcaaugcagcucaaaacgcuuagccuagccacacccccacgggaaacagcagugauuaaccuuuagcaauaaacgaaaguuuaacuaagcuauacuaaccccaggguuggucaauuucgugccagccacacccuggagcuagcaaaaaaaaaaaaaaaaaaaaaaaaaaaaaaaaaaaaaaaaaaaaaaaaaaaaaaaaaaaaaaaaaaaaaaaaaaaaaaaaaaaaaaaaaaaaaaaaaaaa

SEQ ID NO: 26267 - RNA, 1579 nt, Artificial Sequence
  SARS-CoV-2/Wuhan/WIV05/2019__EPI_ISL_402128 spike protein mRNA gc (1-15,334-528) LumSynth construct
agaauaaacuaguauucuucugguccccacagacucagagagaacccgccaccauguucguguuccugguccuccugccccuggugagcucccagugcaaccugugccccuucggcgagguguucaacgccacccgguucgccagcgucuacgccuggaaccgcaagcggaucuccaacugcguggcggacuacagcgugcuguacaacuccgccagcuucuccacguucaagugcuacggcgucagccccaccaagcucaacgaccugugcuucaccaacguguacgccgacuccuucgugauccgcggggacgagguccggcagaucgcccccggccagaccgggaagaucgccgacuacaacuacaagcugccggacgacuucacgggcugcgugaucgcguggaacagcaacaaccucgacuccaaggucgggggcaacuacaacuaccuguaccgccuguuccgcaagagcaaccucaagcccuucgagcgggacaucuccaccgagaucuaccaggccggcagcacccccugcaacgggguggagggcuucaacugcuacuucccccugcaguccuacggguuccagccgaccaacggcgugggguaccagcccuaccggguggucgugcugagcuucgagcuccugcacgcccccgccacggugugcggccccaagggcggcggcggcuccggaggcggagguagcgggggacagaucuacgagggcaagcugaccgccgaggggcuccgcuucggcaucguggccagccgguucaaccacgcgcuggucgaccgccugguggagggggccaucgacgccaucgugcggcacggcgggcgcgaggaggacaucacccucguccgggugcccggcuccugggagaucccgguggccgccggcgagcuggcccgcaaggaggacaucgacgcggucaucgccaucggggugcugauccggggcgccacgccccacuucgacuacaucgccagcgagguguccaaggggcucgcggaccugagccuggagcuccgcaagcccaucaccuucggcgucaucaccgccgacacccuggagcaggccaucgagcgggccgggacgaagcacggcaacaagggcugggaggccgcgcuguccgccaucgagauggccaaccucuucaagagccugcgcugaugacucgagcugguacugcaugcacgcaaugcuagcugccccuuucccguccuggguaccccgagucucccccgaccucgggucccagguaugcucccaccuccaccugccccacucaccaccucugcuaguuccagacaccucccaagcacgcagcaaugcagcucaaaacgcuuagccuagccacacccccacgggaaacagcagugauuaaccuuuagcaauaaacgaaaguuuaacuaagcuauacuaaccccaggguuggucaauuucgugccagccacacccuggagcuagcaaaaaaaaaaaaaaaaaaaaaaaaaaaaaaaaaaaaaaaaaaaaaaaaaaaaaaaaaaaaaaaaaaaaaaaaaaaaaaaaaaaaaaaaaaaaaaaaaaaa

SEQ ID NO: 26268 - RNA, 1540 nt, Artificial Sequence
  SARS-CoV-2/Wuhan/WIV05/2019__EPI_ISL_402128 spike protein mRNA gc (334-528) LumSynth construct
agaauaaacuaguauucuucugguccccacagacucagagagaacccgccaccaugcagaucuacgagggcaagcugaccgccgaggggcuccgcuucggcaucguggccagccgguucaaccacgcgcuggucgaccgccugguggagggggccaucgacgccaucgugcggcacggcgggcgcgaggaggacaucacccucguccgggugcccggcuccugggagaucccgguggccgccggcgagcuggcccgcaaggaggacaucgacgcggucaucgccaucggggugcugauccggggcgccacgccccacuucgacuacaucgccagcgagguguccaaggggcucgcggaccugagccuggagcuccgcaagcccaucaccuucggcgucaucaccgccgacacccuggagcaggccaucgagcgggccgggacgaagcacggcaacaagggcugggaggccgcgcuguccgccaucgagauggccaaccucuucaagagccugcgcggcgggggcgggagcggcgggggcggcuccgggggcgggaaccugugccccuucggcgagguguucaacgccacccgguucgccagcgucuacgccuggaaccgcaagcggaucuccaacugcguggcggacuacagcgugcuguacaacuccgccagcuucuccacguucaagugcuacggcgucagccccaccaagcucaacgaccugugcuucaccaacguguacgccgacuccuucgugauccgcggggacgagguccggcagaucgcccccggccagaccgggaagaucgccgacuacaacuacaagcugccggacgacuucacgggcugcgugaucgcguggaacagcaacaaccucgacuccaaggucgggggcaacuacaacuaccuguaccgccuguuccgcaagagcaaccucaagcccuucgagcgggacaucuccaccgagaucuaccaggccggcagcacccccugcaacgggguggagggcuucaacugcuacuucccccugcaguccuacggguuccagccgaccaacggcgugggguaccagcccuaccggguggucgugcugagcuucgagcuccugcacgcccccgccacggugugcggccccaagugaugacucgagcugguacugcaugcacgcaaugcuagcugccccuuucccguccuggguaccccgagucucccccgaccucgggucccagguaugcucccaccuccaccugccccacucaccaccucugcuaguuccagacaccucccaagcacgcagcaaugcagcucaaaacgcuuagccuagccacacccccacgggaaacagcagugauuaaccuuuagcaauaaacgaaaguuuaacuaagcuauacuaaccccaggguuggucaauuucgugccagccacacccuggagcuagcaaaaaaaaaaaaaaaaaaaaaaaaaaaaaaaaaaaaaaaaaaaaaaaaaaaaaaaaaaaaaaaaaaaaaaaaaaaaaaaaaaaaaaaaaaaaaaaaaaaa

SEQ ID NO: 26269 - RNA, 4273 nt, Artificial Sequence
  SARS-CoV-2/Wuhan/WIV05/2019__EPI_ISL_402128 spike protein mRNA gc (1-1273)
agaauaaacuaguauucuucugguccccacagacucagagagaacccgccaccauguucguguuccugguccuccugccccuggugagcucccagugcgugaaccucaccacccgcacgcagcugccgcccgccuacaccaacagcuucacccggggcgucuacuaccccgacaagguguuccgcuccagcgugcugcacuccacccaggaccucuuccugcccuucuucagcaacgucacgugguuccacgccauccacguguccgggaccaacggcaccaagcgguucgacaacccggugcugcccuucaacgacggggucuacuucgcgagcaccgagaaguccaacaucauccgcggcuggaucuucgggacgacccucgacagcaagacccagucccugcugaucgugaacaacgccaccaacguggucaucaaggugugcgaguuccaguucugcaacgaccccuuccucggcguguacuaccacaagaacaacaagagcuggauggaguccgaguuccgggucuacagcuccgccaacaacugcacguucgaguacgugagccagcccuuccugauggaccuggagggcaagcaggggaacuucaagaaccuccgcgaguucguguucaagaacaucgacggcuacuucaagaucuacuccaagcacaccccgaucaaccugguccgggaccugccccagggguucagcgcccucgagccccugguggaccugcccaucggcaucaacaucacccgcuuccagacccuccuggcccugcaccgguccuaccucacgccgggggacagcagcuccggcuggaccgcgggcgccgccgccuacuacgugggguaccugcagccccgcaccuuccugcucaaguacaacgagaacggcaccaucacggacgcggucgacugcgcccuggacccccugagcgagaccaagugcacccucaaguccuucaccguggagaaggggaucuaccagacgagcaacuuccgggugcagcccaccgaguccaucguccgcuucccgaacaucaccaaccugugccccuucggcgagguguucaacgccacccgguucgccagcgucuacgccuggaaccgcaagcggaucuccaacugcguggcggacuacagcgugcuguacaacuccgccagcuucuccacguucaagugcuacggcgucagccccaccaagcucaacgaccugugcuucaccaacguguacgccgacuccuucgugauccgcggggacgagguccggcagaucgcccccggccagaccgggaagaucgccgacuacaacuacaagcugccggacgacuucacgggcugcgugaucgcguggaacagcaacaaccucgacuccaaggucgggggcaacuacaacuaccuguaccgccuguuccgcaagagcaaccucaagcccuucgagcgggacaucuccaccgagaucuaccaggccggcagcacccccugcaacgggguggagggcuucaacugcuacuucccccugcaguccuacggguuccagccgaccaacggcgugggguaccagcccuaccggguggucgugcugagcuucgagcuccugcacgcccccgccacggugugcggccccaagaaguccaccaaccuggucaagaacaagugcgugaacuucaacuucaacggccucaccgggaccggcgugcugaccgagagcaacaagaaguuccugccguuccagcaguucgggcgcgacaucgccgacacgaccgacgcgguccgcgacccccagacccuggagauccucgacaucacccccugcagcuucggcgggguguccgugaucacgccgggcaccaacaccagcaaccaggucgccgugcuguaccaggacgugaacugcaccgagguccccguggccauccacgccgaccagcugacgcccaccuggcggguguacuccaccggcagcaacgucuuccagacccgcgccgggugccucaucggcgcggagcacgugaacaacuccuacgagugcgacauccccaucggggccggcaucugcgccagcuaccagacgcagaccaacuccccgcggcgcgcccggagcguggcgucccagagcaucaucgccuacaccaugucccugggcgccgagaacagcgucgccuacuccaacaacagcaucgccauccccaccaacuucacgaucuccgugaccaccgagauccugcccgugagcaugaccaagacgagcgucgacugcaccauguacaucugcggggacuccaccgagugcagcaaccuccugcugcaguacggcuccuucugcacccagcucaaccgcgcgcugacggggaucgccguggagcaggacaagaacacccaggagguguucgcccaggucaagcagaucuacaagacgcccccgaucaaggacuucggcggguucaacuucagccagauccugcccgaccccuccaagcccagcaagcgguccuucaucgaggaccuccuguucaacaaggugacccuggccgacgccggcuucaucaagcaguacggcgacugccucggggacaucgcggcccgcgaccugaucugcgcccagaaguucaacggccugaccgugcucccgccccugcugaccgacgagaugaucgcccaguacaccagcgcccuccuggcggggaccaucacguccggcuggaccuucggggccggcgccgcccugcagauccccuucgcgaugcagauggccuaccgguucaacggcaucggggucacccagaacgugcucuacgagaaccagaagcugaucgccaaccaguucaacagcgccaucggcaagauccaggacucccugagcuccaccgccagcgcgcucgggaagcugcaggacguggucaaccagaacgcccaggcccugaacacgcucgugaagcagcuguccagcaacuucggcgccaucuccagcgugcugaacgacauccucucccgccuggacaaggucgaggccgaggugcagaucgaccggcugaucaccgggcgccuccagagccugcagaccuacgugacccagcagcugauccgggcggccgagauccgcgccagcgccaaccucgccgcgaccaagauguccgagugcguccugggccagagcaagcggguggacuucugcggcaagggguaccaccugauguccuucccccagagcgccccgcacggcguggucuuccuccacgugacguacguccccgcccaggagaagaacuucaccaccgcccccgcgaucugccacgacgggaaggcccacuucccccgcgagggcguguucguguccaacgggacccacugguucgucacgcagcggaacuucuacgagccgcagaucaucaccaccgacaacaccuucgugagcggcaacugcgacguggucaucggcaucgugaacaacacgguguacgacccccugcagcccgagcuggacuccuucaaggaggagcucgacaaguacuucaagaaccacaccagccccgacgucgaccugggggacaucuccggcaucaacgccagcguggugaacauccagaaggagaucgaccgccugaacgaggucgccaagaaccucaacgagucccugaucgaccugcaggagcucgggaaguacgagcaguacaucaaguggccgugguacaucuggcugggcuucaucgccggccugaucgcgaucgugauggugaccaucaugcucugcugcaugaccagcugcugcuccugccugaaggggugcugcagcugcggcuccugcugcaaguucgacgaggacgacagcgagcccguccugaagggggugaagcuccacuacacgugaugacucgagcugguacugcaugcacgcaaugcuagcugccccuuucccguccuggguaccccgagucucccccgaccucgggucccagguaugcucccaccuccaccugccccacucaccaccucugcuaguuccagacaccucccaagcacgcagcaaugcagcucaaaacgcuuagccuagccacacccccacgggaaacagcagugauuaaccuuuagcaauaaacgaaaguuuaacuaagcuauacuaaccccaggguuggucaauuucgugccagccacacccuggagcuagcaaaaaaaaaaaaaaaaaaaaaaaaaaaaaaaaaaaaaaaaaaaaaaaaaaaaaaaaaaaaaaaaaaaaaaaaaaaaaaaaaaaaaaaaaaaaaaaaaaaa

SEQ ID NO: 26270 - RNA, 4273 nt, Artificial Sequence
  SARS-CoV-2/Wuhan/WIV05/2019__EPI_ISL_402128 spike protein mRNA gc (1-1273)(D614G)
agaauaaacuaguauucuucugguccccacagacucagagagaacccgccaccauguucguguuccugguccuccugccccuggugagcucccagugcgugaaccucaccacccgcacgcagcugccgcccgccuacaccaacagcuucacccggggcgucuacuaccccgacaagguguuccgcuccagcgugcugcacuccacccaggaccucuuccugcccuucuucagcaacgucacgugguuccacgccauccacguguccgggaccaacggcaccaagcgguucgacaacccggugcugcccuucaacgacggggucuacuucgcgagcaccgagaaguccaacaucauccgcggcuggaucuucgggacgacccucgacagcaagacccagucccugcugaucgugaacaacgccaccaacguggucaucaaggugugcgaguuccaguucugcaacgaccccuuccucggcguguacuaccacaagaacaacaagagcuggauggaguccgaguuccgggucuacagcuccgccaacaacugcacguucgaguacgugagccagcccuuccugauggaccuggagggcaagcaggggaacuucaagaaccuccgcgaguucguguucaagaacaucgacggcuacuucaagaucuacuccaagcacaccccgaucaaccugguccgggaccugccccagggguucagcgcccucgagccccugguggaccugcccaucggcaucaacaucacccgcuuccagacccuccuggcccugcaccgguccuaccucacgccgggggacagcagcuccggcuggaccgcgggcgccgccgccuacuacgugggguaccugcagccccgcaccuuccugcucaaguacaacgagaacggcaccaucacggacgcggucgacugcgcccuggacccccugagcgagaccaagugcacccucaaguccuucaccguggagaaggggaucuaccagacgagcaacuuccgggugcagcccaccgaguccaucguccgcuucccgaacaucaccaaccugugccccuucggcgagguguucaacgccacccgguucgccagcgucuacgccuggaaccgcaagcggaucuccaacugcguggcggacuacagcgugcuguacaacuccgccagcuucuccacguucaagugcuacggcgucagccccaccaagcucaacgaccugugcuucaccaacguguacgccgacuccuucgugauccgcggggacgagguccggcagaucgcccccggccagaccgggaagaucgccgacuacaacuacaagcugccggacgacuucacgggcugcgugaucgcguggaacagcaacaaccucgacuccaaggucgggggcaacuacaacuaccuguaccgccuguuccgcaagagcaaccucaagcccuucgagcgggacaucuccaccgagaucuaccaggccggcagcacccccugcaacgggguggagggcuucaacugcuacuucccccugcaguccuacggguuccagccgaccaacggcgugggguaccagcccuaccggguggucgugcugagcuucgagcuccugcacgcccccgccacggugugcggccccaagaaguccaccaaccuggucaagaacaagugcgugaacuucaacuucaacggccucaccgggaccggcgugcugaccgagagcaacaagaaguuccugccguuccagcaguucgggcgcgacaucgccgacacgaccgacgcgguccgcgacccccagacccuggagauccucgacaucacccccugcagcuucggcgggguguccgugaucacgccgggcaccaacaccagcaaccaggucgccgugcuguaccagggcgugaacugcaccgagguccccguggccauccacgccgaccagcugacgcccaccuggcggguguacuccaccggcagcaacgucuuccagacccgcgccgggugccucaucggcgcggagcacgugaacaacuccuacgagugcgacauccccaucggggccggcaucugcgccagcuaccagacgcagaccaacuccccgcggcgcgcccggagcguggcgucccagagcaucaucgccuacaccaugucccugggcgccgagaacagcgucgccuacuccaacaacagcaucgccauccccaccaacuucacgaucuccgugaccaccgagauccugcccgugagcaugaccaagacgagcgucgacugcaccauguacaucugcggggacuccaccgagugcagcaaccuccugcugcaguacggcuccuucugcacccagcucaaccgcgcgcugacggggaucgccguggagcaggacaagaacacccaggagguguucgcccaggucaagcagaucuacaagacgcccccgaucaaggacuucggcggguucaacuucagccagauccugcccgaccccuccaagcccagcaagcgguccuucaucgaggaccuccuguucaacaaggugacccuggccgacgccggcuucaucaagcaguacggcgacugccucggggacaucgcggcccgcgaccugaucugcgcccagaaguucaacggccugaccgugcucccgccccugcugaccgacgagaugaucgcccaguacaccagcgcccuccuggcggggaccaucacguccggcuggaccuucggggccggcgccgcccugcagauccccuucgcgaugcagauggccuaccgguucaacggcaucggggucacccagaacgugcucuacgagaaccagaagcugaucgccaaccaguucaacagcgccaucggcaagauccaggacucccugagcuccaccgccagcgcgcucgggaagcugcaggacguggucaaccagaacgcccaggcccugaacacgcucgugaagcagcuguccagcaacuucggcgccaucuccagcgugcugaacgacauccucucccgccuggacaaggucgaggccgaggugcagaucgaccggcugaucaccgggcgccuccagagccugcagaccuacgugacccagcagcugauccgggcggccgagauccgcgccagcgccaaccucgccgcgaccaagauguccgagugcguccugggccagagcaagcggguggacuucugcggcaagggguaccaccugauguccuucccccagagcgccccgcacggcguggucuuccuccacgugacguacguccccgcccaggagaagaacuucaccaccgcccccgcgaucugccacgacgggaaggcccacuucccccgcgagggcguguucguguccaacgggacccacugguucgucacgcagcggaacuucuacgagccgcagaucaucaccaccgacaacaccuucgugagcggcaacugcgacguggucaucggcaucgugaacaacacgguguacgacccccugcagcccgagcuggacuccuucaaggaggagcucgacaaguacuucaagaaccacaccagccccgacgucgaccugggggacaucuccggcaucaacgccagcguggugaacauccagaaggagaucgaccgccugaacgaggucgccaagaaccucaacgagucccugaucgaccugcaggagcucgggaaguacgagcaguacaucaaguggccgugguacaucuggcugggcuucaucgccggccugaucgcgaucgugauggugaccaucaugcucugcugcaugaccagcugcugcuccugccugaaggggugcugcagcugcggcuccugcugcaaguucgacgaggacgacagcgagcccguccugaagggggugaagcuccacuacacgugaugacucgagcugguacugcaugcacgcaaugcuagcugccccuuucccguccuggguaccccgagucucccccgaccucgggucccagguaugcucccaccuccaccugccccacucaccaccucugcuaguuccagacaccucccaagcacgcagcaaugcagcucaaaacgcuuagccuagccacacccccacgggaaacagcagugauuaaccuuuagcaauaaacgaaaguuuaacuaagcuauacuaaccccaggguuggucaauuucgugccagccacacccuggagcuagcaaaaaaaaaaaaaaaaaaaaaaaaaaaaaaaaaaaaaaaaaaaaaaaaaaaaaaaaaaaaaaaaaaaaaaaaaaaaaaaaaaaaaaaaaaaaaaaaaaaa

SEQ ID NO: 26271 - RNA, 4273 nt, Artificial Sequence
  SARS-CoV-2/Wuhan/WIV05/2019__EPI_ISL_402128 spike protein mRNA gc (1-1273)(A222V_D614G)
agaauaaacuaguauucuucugguccccacagacucagagagaacccgccaccauguucguguuccugguccuccugccccuggugagcucccagugcgugaaccucaccacccgcacgcagcugccgcccgccuacaccaacagcuucacccggggcgucuacuaccccgacaagguguuccgcuccagcgugcugcacuccacccaggaccucuuccugcccuucuucagcaacgucacgugguuccacgccauccacguguccgggaccaacggcaccaagcgguucgacaacccggugcugcccuucaacgacggggucuacuucgcgagcaccgagaaguccaacaucauccgcggcuggaucuucgggacgacccucgacagcaagacccagucccugcugaucgugaacaacgccaccaacguggucaucaaggugugcgaguuccaguucugcaacgaccccuuccucggcguguacuaccacaagaacaacaagagcuggauggaguccgaguuccgggucuacagcuccgccaacaacugcacguucgaguacgugagccagcccuuccugauggaccuggagggcaagcaggggaacuucaagaaccuccgcgaguucguguucaagaacaucgacggcuacuucaagaucuacuccaagcacaccccgaucaaccugguccgggaccugccccagggguucagcguccucgagccccugguggaccugcccaucggcaucaacaucacccgcuuccagacccuccuggcccugcaccgguccuaccucacgccgggggacagcagcuccggcuggaccgcgggcgccgccgccuacuacgugggguaccugcagccccgcaccuuccugcucaaguacaacgagaacggcaccaucacggacgcggucgacugcgcccuggacccccugagcgagaccaagugcacccucaaguccuucaccguggagaaggggaucuaccagacgagcaacuuccgggugcagcccaccgaguccaucguccgcuucccgaacaucaccaaccugugccccuucggcgagguguucaacgccacccgguucgccagcgucuacgccuggaaccgcaagcggaucuccaacugcguggcggacuacagcgugcuguacaacuccgccagcuucuccacguucaagugcuacggcgucagccccaccaagcucaacgaccugugcuucaccaacguguacgccgacuccuucgugauccgcggggacgagguccggcagaucgcccccggccagaccgggaagaucgccgacuacaacuacaagcugccggacgacuucacgggcugcgugaucgcguggaacagcaacaaccucgacuccaaggucgggggcaacuacaacuaccuguaccgccuguuccgcaagagcaaccucaagcccuucgagcgggacaucuccaccgagaucuaccaggccggcagcacccccugcaacgggguggagggcuucaacugcuacuucccccugcaguccuacggguuccagccgaccaacggcgugggguaccagcccuaccggguggucgugcugagcuucgagcuccugcacgcccccgccacggugugcggccccaagaaguccaccaaccuggucaagaacaagugcgugaacuucaacuucaacggccucaccgggaccggcgugcugaccgagagcaacaagaaguuccugccguuccagcaguucgggcgcgacaucgccgacacgaccgacgcgguccgcgacccccagacccuggagauccucgacaucacccccugcagcuucggcgggguguccgugaucacgccgggcaccaacaccagcaaccaggucgccgugcuguaccagggcgugaacugcaccgagguccccguggccauccacgccgaccagcugacgcccaccuggcggguguacuccaccggcagcaacgucuuccagacccgcgccgggugccucaucggcgcggagcacgugaacaacuccuacgagugcgacauccccaucggggccggcaucugcgccagcuaccagacgcagaccaacuccccgcggcgcgcccggagcguggcgucccagagcaucaucgccuacaccaugucccugggcgccgagaacagcgucgccuacuccaacaacagcaucgccauccccaccaacuucacgaucuccgugaccaccgagauccugcccgugagcaugaccaagacgagcgucgacugcaccauguacaucugcggggacuccaccgagugcagcaaccuccugcugcaguacggcuccuucugcacccagcucaaccgcgcgcugacggggaucgccguggagcaggacaagaacacccaggagguguucgcccaggucaagcagaucuacaagacgcccccgaucaaggacuucggcggguucaacuucagccagauccugcccgaccccuccaagcccagcaagcgguccuucaucgaggaccuccuguucaacaaggugacccuggccgacgccggcuucaucaagcaguacggcgacugccucggggacaucgcggcccgcgaccugaucugcgcccagaaguucaacggccugaccgugcucccgccccugcugaccgacgagaugaucgcccaguacaccagcgcccuccuggcggggaccaucacguccggcuggaccuucggggccggcgccgcccugcagauccccuucgcgaugcagauggccuaccgguucaacggcaucggggucacccagaacgugcucuacgagaaccagaagcugaucgccaaccaguucaacagcgccaucggcaagauccaggacucccugagcuccaccgccagcgcgcucgggaagcugcaggacguggucaaccagaacgcccaggcccugaacacgcucgugaagcagcuguccagcaacuucggcgccaucuccagcgugcugaacgacauccucucccgccuggacaaggucgaggccgaggugcagaucgaccggcugaucaccgggcgccuccagagccugcagaccuacgugacccagcagcugauccgggcggccgagauccgcgccagcgccaaccucgccgcgaccaagauguccgagugcguccugggccagagcaagcggguggacuucugcggcaagggguaccaccugauguccuucccccagagcgccccgcacggcguggucuuccuccacgugacguacguccccgcccaggagaagaacuucaccaccgcccccgcgaucugccacgacgggaaggcccacuucccccgcgagggcguguucguguccaacgggacccacugguucgucacgcagcggaacuucuacgagccgcagaucaucaccaccgacaacaccuucgugagcggcaacugcgacguggucaucggcaucgugaacaacacgguguacgacccccugcagcccgagcuggacuccuucaaggaggagcucgacaaguacuucaagaaccacaccagccccgacgucgaccugggggacaucuccggcaucaacgccagcguggugaacauccagaaggagaucgaccgccugaacgaggucgccaagaaccucaacgagucccugaucgaccugcaggagcucgggaaguacgagcaguacaucaaguggccgugguacaucuggcugggcuucaucgccggccugaucgcgaucgugauggugaccaucaugcucugcugcaugaccagcugcugcuccugccugaaggggugcugcagcugcggcuccugcugcaaguucgacgaggacgacagcgagcccguccugaagggggugaagcuccacuacacgugaugacucgagcugguacugcaugcacgcaaugcuagcugccccuuucccguccuggguaccccgagucucccccgaccucgggucccagguaugcucccaccuccaccugccccacucaccaccucugcuaguuccagacaccucccaagcacgcagcaaugcagcucaaaacgcuuagccuagccacacccccacgggaaacagcagugauuaaccuuuagcaauaaacgaaaguuuaacuaagcuauacuaaccccaggguuggucaauuucgugccagccacacccuggagcuagcaaaaaaaaaaaaaaaaaaaaaaaaaaaaaaaaaaaaaaaaaaaaaaaaaaaaaaaaaaaaaaaaaaaaaaaaaaaaaaaaaaaaaaaaaaaaaaaaaaaa

SEQ ID NO: 26272 - RNA, 4273 nt, Artificial Sequence
  SARS-CoV-2/Wuhan/WIV05/2019__EPI_ISL_402128 spike protein mRNA gc (1-1273)(N439K_D614G)
agaauaaacuaguauucuucugguccccacagacucagagagaacccgccaccauguucguguuccugguccuccugccccuggugagcucccagugcgugaaccucaccacccgcacgcagcugccgcccgccuacaccaacagcuucacccggggcgucuacuaccccgacaagguguuccgcuccagcgugcugcacuccacccaggaccucuuccugcccuucuucagcaacgucacgugguuccacgccauccacguguccgggaccaacggcaccaagcgguucgacaacccggugcugcccuucaacgacggggucuacuucgcgagcaccgagaaguccaacaucauccgcggcuggaucuucgggacgacccucgacagcaagacccagucccugcugaucgugaacaacgccaccaacguggucaucaaggugugcgaguuccaguucugcaacgaccccuuccucggcguguacuaccacaagaacaacaagagcuggauggaguccgaguuccgggucuacagcuccgccaacaacugcacguucgaguacgugagccagcccuuccugauggaccuggagggcaagcaggggaacuucaagaaccuccgcgaguucguguucaagaacaucgacggcuacuucaagaucuacuccaagcacaccccgaucaaccugguccgggaccugccccagggguucagcgcccucgagccccugguggaccugcccaucggcaucaacaucacccgcuuccagacccuccuggcccugcaccgguccuaccucacgccgggggacagcagcuccggcuggaccgcgggcgccgccgccuacuacgugggguaccugcagccccgcaccuuccugcucaaguacaacgagaacggcaccaucacggacgcggucgacugcgcccuggacccccugagcgagaccaagugcacccucaaguccuucaccguggagaaggggaucuaccagacgagcaacuuccgggugcagcccaccgaguccaucguccgcuucccgaacaucaccaaccugugccccuucggcgagguguucaacgccacccgguucgccagcgucuacgccuggaaccgcaagcggaucuccaacugcguggcggacuacagcgugcuguacaacuccgccagcuucuccacguucaagugcuacggcgucagccccaccaagcucaacgaccugugcuucaccaacguguacgccgacuccuucgugauccgcggggacgagguccggcagaucgcccccggccagaccgggaagaucgccgacuacaacuacaagcugccggacgacuucacgggcugcgugaucgcguggaacagcaagaaccucgacuccaaggucgggggcaacuacaacuaccuguaccgccuguuccgcaagagcaaccucaagcccuucgagcgggacaucuccaccgagaucuaccaggccggcagcacccccugcaacgggguggagggcuucaacugcuacuucccccugcaguccuacggguuccagccgaccaacggcgugggguaccagcccuaccggguggucgugcugagcuucgagcuccugcacgcccccgccacggugugcggccccaagaaguccaccaaccuggucaagaacaagugcgugaacuucaacuucaacggccucaccgggaccggcgugcugaccgagagcaacaagaaguuccugccguuccagcaguucgggcgcgacaucgccgacacgaccgacgcgguccgcgacccccagacccuggagauccucgacaucacccccugcagcuucggcgggguguccgugaucacgccgggcaccaacaccagcaaccaggucgccgugcuguaccagggcgugaacugcaccgagguccccguggccauccacgccgaccagcugacgcccaccuggcggguguacuccaccggcagcaacgucuuccagacccgcgccgggugccucaucggcgcggagcacgugaacaacuccuacgagugcgacauccccaucggggccggcaucugcgccagcuaccagacgcagaccaacuccccgcggcgcgcccggagcguggcgucccagagcaucaucgccuacaccaugucccugggcgccgagaacagcgucgccuacuccaacaacagcaucgccauccccaccaacuucacgaucuccgugaccaccgagauccugcccgugagcaugaccaagacgagcgucgacugcaccauguacaucugcggggacuccaccgagugcagcaaccuccugcugcaguacggcuccuucugcacccagcucaaccgcgcgcugacggggaucgccguggagcaggacaagaacacccaggagguguucgcccaggucaagcagaucuacaagacgcccccgaucaaggacuucggcggguucaacuucagccagauccugcccgaccccuccaagcccagcaagcgguccuucaucgaggaccuccuguucaacaaggugacccuggccgacgccggcuucaucaagcaguacggcgacugccucggggacaucgcggcccgcgaccugaucugcgcccagaaguucaacggccugaccgugcucccgccccugcugaccgacgagaugaucgcccaguacaccagcgcccuccuggcggggaccaucacguccggcuggaccuucggggccggcgccgcccugcagauccccuucgcgaugcagauggccuaccgguucaacggcaucggggucacccagaacgugcucuacgagaaccagaagcugaucgccaaccaguucaacagcgccaucggcaagauccaggacucccugagcuccaccgccagcgcgcucgggaagcugcaggacguggucaaccagaacgcccaggcccugaacacgcucgugaagcagcuguccagcaacuucggcgccaucuccagcgugcugaacgacauccucucccgccuggacaaggucgaggccgaggugcagaucgaccggcugaucaccgggcgccuccagagccugcagaccuacgugacccagcagcugauccgggcggccgagauccgcgccagcgccaaccucgccgcgaccaagauguccgagugcguccugggccagagcaagcggguggacuucugcggcaagggguaccaccugauguccuucccccagagcgccccgcacggcguggucuuccuccacgugacguacguccccgcccaggagaagaacuucaccaccgcccccgcgaucugccacgacgggaaggcccacuucccccgcgagggcguguucguguccaacgggacccacugguucgucacgcagcggaacuucuacgagccgcagaucaucaccaccgacaacaccuucgugagcggcaacugcgacguggucaucggcaucgugaacaacacgguguacgacccccugcagcccgagcuggacuccuucaaggaggagcucgacaaguacuucaagaaccacaccagccccgacgucgaccugggggacaucuccggcaucaacgccagcguggugaacauccagaaggagaucgaccgccugaacgaggucgccaagaaccucaacgagucccugaucgaccugcaggagcucgggaaguacgagcaguacaucaaguggccgugguacaucuggcugggcuucaucgccggccugaucgcgaucgugauggugaccaucaugcucugcugcaugaccagcugcugcuccugccugaaggggugcugcagcugcggcuccugcugcaaguucgacgaggacgacagcgagcccguccugaagggggugaagcuccacuacacgugaugacucgagcugguacugcaugcacgcaaugcuagcugccccuuucccguccuggguaccccgagucucccccgaccucgggucccagguaugcucccaccuccaccugccccacucaccaccucugcuaguuccagacaccucccaagcacgcagcaaugcagcucaaaacgcuuagccuagccacacccccacgggaaacagcagugauuaaccuuuagcaauaaacgaaaguuuaacuaagcuauacuaaccccaggguuggucaauuucgugccagccacacccuggagcuagcaaaaaaaaaaaaaaaaaaaaaaaaaaaaaaaaaaaaaaaaaaaaaaaaaaaaaaaaaaaaaaaaaaaaaaaaaaaaaaaaaaaaaaaaaaaaaaaaaaaa

SEQ ID NO: 26273 - RNA, 4273 nt, Artificial Sequence
  SARS-CoV-2/Wuhan/WIV05/2019__EPI_ISL_402128 spike protein mRNA gc (1-1273)(S477N_D614G)
agaauaaacuaguauucuucugguccccacagacucagagagaacccgccaccauguucguguuccugguccuccugccccuggugagcucccagugcgugaaccucaccacccgcacgcagcugccgcccgccuacaccaacagcuucacccggggcgucuacuaccccgacaagguguuccgcuccagcgugcugcacuccacccaggaccucuuccugcccuucuucagcaacgucacgugguuccacgccauccacguguccgggaccaacggcaccaagcgguucgacaacccggugcugcccuucaacgacggggucuacuucgcgagcaccgagaaguccaacaucauccgcggcuggaucuucgggacgacccucgacagcaagacccagucccugcugaucgugaacaacgccaccaacguggucaucaaggugugcgaguuccaguucugcaacgaccccuuccucggcguguacuaccacaagaacaacaagagcuggauggaguccgaguuccgggucuacagcuccgccaacaacugcacguucgaguacgugagccagcccuuccugauggaccuggagggcaagcaggggaacuucaagaaccuccgcgaguucguguucaagaacaucgacggcuacuucaagaucuacuccaagcacaccccgaucaaccugguccgggaccugccccagggguucagcgcccucgagccccugguggaccugcccaucggcaucaacaucacccgcuuccagacccuccuggcccugcaccgguccuaccucacgccgggggacagcagcuccggcuggaccgcgggcgccgccgccuacuacgugggguaccugcagccccgcaccuuccugcucaaguacaacgagaacggcaccaucacggacgcggucgacugcgcccuggacccccugagcgagaccaagugcacccucaaguccuucaccguggagaaggggaucuaccagacgagcaacuuccgggugcagcccaccgaguccaucguccgcuucccgaacaucaccaaccugugccccuucggcgagguguucaacgccacccgguucgccagcgucuacgccuggaaccgcaagcggaucuccaacugcguggcggacuacagcgugcuguacaacuccgccagcuucuccacguucaagugcuacggcgucagccccaccaagcucaacgaccugugcuucaccaacguguacgccgacuccuucgugauccgcggggacgagguccggcagaucgcccccggccagaccgggaagaucgccgacuacaacuacaagcugccggacgacuucacgggcugcgugaucgcguggaacagcaacaaccucgacuccaaggucgggggcaacuacaacuaccuguaccgccuguuccgcaagagcaaccucaagcccuucgagcgggacaucuccaccgagaucuaccaggccggcaacacccccugcaacgggguggagggcuucaacugcuacuucccccugcaguccuacggguuccagccgaccaacggcgugggguaccagcccuaccggguggucgugcugagcuucgagcuccugcacgcccccgccacggugugcggccccaagaaguccaccaaccuggucaagaacaagugcgugaacuucaacuucaacggccucaccgggaccggcgugcugaccgagagcaacaagaaguuccugccguuccagcaguucgggcgcgacaucgccgacacgaccgacgcgguccgcgacccccagacccuggagauccucgacaucacccccugcagcuucggcgggguguccgugaucacgccgggcaccaacaccagcaaccaggucgccgugcuguaccagggcgugaacugcaccgagguccccguggccauccacgccgaccagcugacgcccaccuggcggguguacuccaccggcagcaacgucuuccagacccgcgccgggugccucaucggcgcggagcacgugaacaacuccuacgagugcgacauccccaucggggccggcaucugcgccagcuaccagacgcagaccaacuccccgcggcgcgcccggagcguggcgucccagagcaucaucgccuacaccaugucccugggcgccgagaacagcgucgccuacuccaacaacagcaucgccauccccaccaacuucacgaucuccgugaccaccgagauccugcccgugagcaugaccaagacgagcgucgacugcaccauguacaucugcggggacuccaccgagugcagcaaccuccugcugcaguacggcuccuucugcacccagcucaaccgcgcgcugacggggaucgccguggagcaggacaagaacacccaggagguguucgcccaggucaagcagaucuacaagacgcccccgaucaaggacuucggcggguucaacuucagccagauccugcccgaccccuccaagcccagcaagcgguccuucaucgaggaccuccuguucaacaaggugacccuggccgacgccggcuucaucaagcaguacggcgacugccucggggacaucgcggcccgcgaccugaucugcgcccagaaguucaacggccugaccgugcucccgccccugcugaccgacgagaugaucgcccaguacaccagcgcccuccuggcggggaccaucacguccggcuggaccuucggggccggcgccgcccugcagauccccuucgcgaugcagauggccuaccgguucaacggcaucggggucacccagaacgugcucuacgagaaccagaagcugaucgccaaccaguucaacagcgccaucggcaagauccaggacucccugagcuccaccgccagcgcgcucgggaagcugcaggacguggucaaccagaacgcccaggcccugaacacgcucgugaagcagcuguccagcaacuucggcgccaucuccagcgugcugaacgacauccucucccgccuggacaaggucgaggccgaggugcagaucgaccggcugaucaccgggcgccuccagagccugcagaccuacgugacccagcagcugauccgggcggccgagauccgcgccagcgccaaccucgccgcgaccaagauguccgagugcguccugggccagagcaagcggguggacuucugcggcaagggguaccaccugauguccuucccccagagcgccccgcacggcguggucuuccuccacgugacguacguccccgcccaggagaagaacuucaccaccgcccccgcgaucugccacgacgggaaggcccacuucccccgcgagggcguguucguguccaacgggacccacugguucgucacgcagcggaacuucuacgagccgcagaucaucaccaccgacaacaccuucgugagcggcaacugcgacguggucaucggcaucgugaacaacacgguguacgacccccugcagcccgagcuggacuccuucaaggaggagcucgacaaguacuucaagaaccacaccagccccgacgucgaccugggggacaucuccggcaucaacgccagcguggugaacauccagaaggagaucgaccgccugaacgaggucgccaagaaccucaacgagucccugaucgaccugcaggagcucgggaaguacgagcaguacaucaaguggccgugguacaucuggcugggcuucaucgccggccugaucgcgaucgugauggugaccaucaugcucugcugcaugaccagcugcugcuccugccugaaggggugcugcagcugcggcuccugcugcaaguucgacgaggacgacagcgagcccguccugaagggggugaagcuccacuacacgugaugacucgagcugguacugcaugcacgcaaugcuagcugccccuuucccguccuggguaccccgagucucccccgaccucgggucccagguaugcucccaccuccaccugccccacucaccaccucugcuaguuccagacaccucccaagcacgcagcaaugcagcucaaaacgcuuagccuagccacacccccacgggaaacagcagugauuaaccuuuagcaauaaacgaaaguuuaacuaagcuauacuaaccccaggguuggucaauuucgugccagccacacccuggagcuagcaaaaaaaaaaaaaaaaaaaaaaaaaaaaaaaaaaaaaaaaaaaaaaaaaaaaaaaaaaaaaaaaaaaaaaaaaaaaaaaaaaaaaaaaaaaaaaaaaaaa

SEQ ID NO: 26274 - RNA, 4273 nt, Artificial Sequence
  SARS-CoV-2/Wuhan/WIV05/2019__EPI_ISL_402128 spike protein mRNA gc (1-1273)(N501Y_D614G)
agaauaaacuaguauucuucugguccccacagacucagagagaacccgccaccauguucguguuccugguccuccugccccuggugagcucccagugcgugaaccucaccacccgcacgcagcugccgcccgccuacaccaacagcuucacccggggcgucuacuaccccgacaagguguuccgcuccagcgugcugcacuccacccaggaccucuuccugcccuucuucagcaacgucacgugguuccacgccauccacguguccgggaccaacggcaccaagcgguucgacaacccggugcugcccuucaacgacggggucuacuucgcgagcaccgagaaguccaacaucauccgcggcuggaucuucgggacgacccucgacagcaagacccagucccugcugaucgugaacaacgccaccaacguggucaucaaggugugcgaguuccaguucugcaacgaccccuuccucggcguguacuaccacaagaacaacaagagcuggauggaguccgaguuccgggucuacagcuccgccaacaacugcacguucgaguacgugagccagcccuuccugauggaccuggagggcaagcaggggaacuucaagaaccuccgcgaguucguguucaagaacaucgacggcuacuucaagaucuacuccaagcacaccccgaucaaccugguccgggaccugccccagggguucagcgcccucgagccccugguggaccugcccaucggcaucaacaucacccgcuuccagacccuccuggcccugcaccgguccuaccucacgccgggggacagcagcuccggcuggaccgcgggcgccgccgccuacuacgugggguaccugcagccccgcaccuuccugcucaaguacaacgagaacggcaccaucacggacgcggucgacugcgcccuggacccccugagcgagaccaagugcacccucaaguccuucaccguggagaaggggaucuaccagacgagcaacuuccgggugcagcccaccgaguccaucguccgcuucccgaacaucaccaaccugugccccuucggcgagguguucaacgccacccgguucgccagcgucuacgccuggaaccgcaagcggaucuccaacugcguggcggacuacagcgugcuguacaacuccgccagcuucuccacguucaagugcuacggcgucagccccaccaagcucaacgaccugugcuucaccaacguguacgccgacuccuucgugauccgcggggacgagguccggcagaucgcccccggccagaccgggaagaucgccgacuacaacuacaagcugccggacgacuucacgggcugcgugaucgcguggaacagcaacaaccucgacuccaaggucgggggcaacuacaacuaccuguaccgccuguuccgcaagagcaaccucaagcccuucgagcgggacaucuccaccgagaucuaccaggccggcagcacccccugcaacgggguggagggcuucaacugcuacuucccccugcaguccuacggguuccagccgaccuacggcgugggguaccagcccuaccggguggucgugcugagcuucgagcuccugcacgcccccgccacggugugcggccccaagaaguccaccaaccuggucaagaacaagugcgugaacuucaacuucaacggccucaccgggaccggcgugcugaccgagagcaacaagaaguuccugccguuccagcaguucgggcgcgacaucgccgacacgaccgacgcgguccgcgacccccagacccuggagauccucgacaucacccccugcagcuucggcgggguguccgugaucacgccgggcaccaacaccagcaaccaggucgccgugcuguaccagggcgugaacugcaccgagguccccguggccauccacgccgaccagcugacgcccaccuggcggguguacuccaccggcagcaacgucuuccagacccgcgccgggugccucaucggcgcggagcacgugaacaacuccuacgagugcgacauccccaucggggccggcaucugcgccagcuaccagacgcagaccaacuccccgcggcgcgcccggagcguggcgucccagagcaucaucgccuacaccaugucccugggcgccgagaacagcgucgccuacuccaacaacagcaucgccauccccaccaacuucacgaucuccgugaccaccgagauccugcccgugagcaugaccaagacgagcgucgacugcaccauguacaucugcggggacuccaccgagugcagcaaccuccugcugcaguacggcuccuucugcacccagcucaaccgcgcgcugacggggaucgccguggagcaggacaagaacacccaggagguguucgcccaggucaagcagaucuacaagacgcccccgaucaaggacuucggcggguucaacuucagccagauccugcccgaccccuccaagcccagcaagcgguccuucaucgaggaccuccuguucaacaaggugacccuggccgacgccggcuucaucaagcaguacggcgacugccucggggacaucgcggcccgcgaccugaucugcgcccagaaguucaacggccugaccgugcucccgccccugcugaccgacgagaugaucgcccaguacaccagcgcccuccuggcggggaccaucacguccggcuggaccuucggggccggcgccgcccugcagauccccuucgcgaugcagauggccuaccgguucaacggcaucggggucacccagaacgugcucuacgagaaccagaagcugaucgccaaccaguucaacagcgccaucggcaagauccaggacucccugagcuccaccgccagcgcgcucgggaagcugcaggacguggucaaccagaacgcccaggcccugaacacgcucgugaagcagcuguccagcaacuucggcgccaucuccagcgugcugaacgacauccucucccgccuggacaaggucgaggccgaggugcagaucgaccggcugaucaccgggcgccuccagagccugcagaccuacgugacccagcagcugauccgggcggccgagauccgcgccagcgccaaccucgccgcgaccaagauguccgagugcguccugggccagagcaagcggguggacuucugcggcaagggguaccaccugauguccuucccccagagcgccccgcacggcguggucuuccuccacgugacguacguccccgcccaggagaagaacuucaccaccgcccccgcgaucugccacgacgggaaggcccacuucccccgcgagggcguguucguguccaacgggacccacugguucgucacgcagcggaacuucuacgagccgcagaucaucaccaccgacaacaccuucgugagcggcaacugcgacguggucaucggcaucgugaacaacacgguguacgacccccugcagcccgagcuggacuccuucaaggaggagcucgacaaguacuucaagaaccacaccagccccgacgucgaccugggggacaucuccggcaucaacgccagcguggugaacauccagaaggagaucgaccgccugaacgaggucgccaagaaccucaacgagucccugaucgaccugcaggagcucgggaaguacgagcaguacaucaaguggccgugguacaucuggcugggcuucaucgccggccugaucgcgaucgugauggugaccaucaugcucugcugcaugaccagcugcugcuccugccugaaggggugcugcagcugcggcuccugcugcaaguucgacgaggacgacagcgagcccguccugaagggggugaagcuccacuacacgugaugacucgagcugguacugcaugcacgcaaugcuagcugccccuuucccguccuggguaccccgagucucccccgaccucgggucccagguaugcucccaccuccaccugccccacucaccaccucugcuaguuccagacaccucccaagcacgcagcaaugcagcucaaaacgcuuagccuagccacacccccacgggaaacagcagugauuaaccuuuagcaauaaacgaaaguuuaacuaagcuauacuaaccccaggguuggucaauuucgugccagccacacccuggagcuagcaaaaaaaaaaaaaaaaaaaaaaaaaaaaaaaaaaaaaaaaaaaaaaaaaaaaaaaaaaaaaaaaaaaaaaaaaaaaaaaaaaaaaaaaaaaaaaaaaaaa

SEQ ID NO: 26275 - RNA, 4267 nt, Artificial Sequence
  SARS-CoV-2/Wuhan/WIV05/2019__EPI_ISL_402128 spike protein mRNA gc (1-1273)(H69del_V70del_D614G)
agaauaaacuaguauucuucugguccccacagacucagagagaacccgccaccauguucguguuccugguccuccugccccuggugagcucccagugcgugaaccucaccacccgcacgcagcugccgcccgccuacaccaacagcuucacccggggcgucuacuaccccgacaagguguuccgcuccagcgugcugcacuccacccaggaccucuuccugcccuucuucagcaacgucacgugguuccacgccaucuccgggaccaacggcaccaagcgguucgacaacccggugcugcccuucaacgacggggucuacuucgcgagcaccgagaaguccaacaucauccgcggcuggaucuucgggacgacccucgacagcaagacccagucccugcugaucgugaacaacgccaccaacguggucaucaaggugugcgaguuccaguucugcaacgaccccuuccucggcguguacuaccacaagaacaacaagagcuggauggaguccgaguuccgggucuacagcuccgccaacaacugcacguucgaguacgugagccagcccuuccugauggaccuggagggcaagcaggggaacuucaagaaccuccgcgaguucguguucaagaacaucgacggcuacuucaagaucuacuccaagcacaccccgaucaaccugguccgggaccugccccagggguucagcgcccucgagccccugguggaccugcccaucggcaucaacaucacccgcuuccagacccuccuggcccugcaccgguccuaccucacgccgggggacagcagcuccggcuggaccgcgggcgccgccgccuacuacgugggguaccugcagccccgcaccuuccugcucaaguacaacgagaacggcaccaucacggacgcggucgacugcgcccuggacccccugagcgagaccaagugcacccucaaguccuucaccguggagaaggggaucuaccagacgagcaacuuccgggugcagcccaccgaguccaucguccgcuucccgaacaucaccaaccugugccccuucggcgagguguucaacgccacccgguucgccagcgucuacgccuggaaccgcaagcggaucuccaacugcguggcggacuacagcgugcuguacaacuccgccagcuucuccacguucaagugcuacggcgucagccccaccaagcucaacgaccugugcuucaccaacguguacgccgacuccuucgugauccgcggggacgagguccggcagaucgcccccggccagaccgggaagaucgccgacuacaacuacaagcugccggacgacuucacgggcugcgugaucgcguggaacagcaacaaccucgacuccaaggucgggggcaacuacaacuaccuguaccgccuguuccgcaagagcaaccucaagcccuucgagcgggacaucuccaccgagaucuaccaggccggcagcacccccugcaacgggguggagggcuucaacugcuacuucccccugcaguccuacggguuccagccgaccaacggcgugggguaccagcccuaccggguggucgugcugagcuucgagcuccugcacgcccccgccacggugugcggccccaagaaguccaccaaccuggucaagaacaagugcgugaacuucaacuucaacggccucaccgggaccggcgugcugaccgagagcaacaagaaguuccugccguuccagcaguucgggcgcgacaucgccgacacgaccgacgcgguccgcgacccccagacccuggagauccucgacaucacccccugcagcuucggcgggguguccgugaucacgccgggcaccaacaccagcaaccaggucgccgugcuguaccagggcgugaacugcaccgagguccccguggccauccacgccgaccagcugacgcccaccuggcggguguacuccaccggcagcaacgucuuccagacccgcgccgggugccucaucggcgcggagcacgugaacaacuccuacgagugcgacauccccaucggggccggcaucugcgccagcuaccagacgcagaccaacuccccgcggcgcgcccggagcguggcgucccagagcaucaucgccuacaccaugucccugggcgccgagaacagcgucgccuacuccaacaacagcaucgccauccccaccaacuucacgaucuccgugaccaccgagauccugcccgugagcaugaccaagacgagcgucgacugcaccauguacaucugcggggacuccaccgagugcagcaaccuccugcugcaguacggcuccuucugcacccagcucaaccgcgcgcugacggggaucgccguggagcaggacaagaacacccaggagguguucgcccaggucaagcagaucuacaagacgcccccgaucaaggacuucggcggguucaacuucagccagauccugcccgaccccuccaagcccagcaagcgguccuucaucgaggaccuccuguucaacaaggugacccuggccgacgccggcuucaucaagcaguacggcgacugccucggggacaucgcggcccgcgaccugaucugcgcccagaaguucaacggccugaccgugcucccgccccugcugaccgacgagaugaucgcccaguacaccagcgcccuccuggcggggaccaucacguccggcuggaccuucggggccggcgccgcccugcagauccccuucgcgaugcagauggccuaccgguucaacggcaucggggucacccagaacgugcucuacgagaaccagaagcugaucgccaaccaguucaacagcgccaucggcaagauccaggacucccugagcuccaccgccagcgcgcucgggaagcugcaggacguggucaaccagaacgcccaggcccugaacacgcucgugaagcagcuguccagcaacuucggcgccaucuccagcgugcugaacgacauccucucccgccuggacaaggucgaggccgaggugcagaucgaccggcugaucaccgggcgccuccagagccugcagaccuacgugacccagcagcugauccgggcggccgagauccgcgccagcgccaaccucgccgcgaccaagauguccgagugcguccugggccagagcaagcggguggacuucugcggcaagggguaccaccugauguccuucccccagagcgccccgcacggcguggucuuccuccacgugacguacguccccgcccaggagaagaacuucaccaccgcccccgcgaucugccacgacgggaaggcccacuucccccgcgagggcguguucguguccaacgggacccacugguucgucacgcagcggaacuucuacgagccgcagaucaucaccaccgacaacaccuucgugagcggcaacugcgacguggucaucggcaucgugaacaacacgguguacgacccccugcagcccgagcuggacuccuucaaggaggagcucgacaaguacuucaagaaccacaccagccccgacgucgaccugggggacaucuccggcaucaacgccagcguggugaacauccagaaggagaucgaccgccugaacgaggucgccaagaaccucaacgagucccugaucgaccugcaggagcucgggaaguacgagcaguacaucaaguggccgugguacaucuggcugggcuucaucgccggccugaucgcgaucgugauggugaccaucaugcucugcugcaugaccagcugcugcuccugccugaaggggugcugcagcugcggcuccugcugcaaguucgacgaggacgacagcgagcccguccugaagggggugaagcuccacuacacgugaugacucgagcugguacugcaugcacgcaaugcuagcugccccuuucccguccuggguaccccgagucucccccgaccucgggucccagguaugcucccaccuccaccugccccacucaccaccucugcuaguuccagacaccucccaagcacgcagcaaugcagcucaaaacgcuuagccuagccacacccccacgggaaacagcagugauuaaccuuuagcaauaaacgaaaguuuaacuaagcuauacuaaccccaggguuggucaauuucgugccagccacacccuggagcuagcaaaaaaaaaaaaaaaaaaaaaaaaaaaaaaaaaaaaaaaaaaaaaaaaaaaaaaaaaaaaaaaaaaaaaaaaaaaaaaaaaaaaaaaaaaaaaaaaaaaa

SEQ ID NO: 26276 - RNA, 4273 nt, Artificial Sequence
  SARS-CoV-2/Wuhan/WIV05/2019__EPI_ISL_402128 spike protein mRNA gc (1-1273)(Y453F_D614G)
agaauaaacuaguauucuucugguccccacagacucagagagaacccgccaccauguucguguuccugguccuccugccccuggugagcucccagugcgugaaccucaccacccgcacgcagcugccgcccgccuacaccaacagcuucacccggggcgucuacuaccccgacaagguguuccgcuccagcgugcugcacuccacccaggaccucuuccugcccuucuucagcaacgucacgugguuccacgccauccacguguccgggaccaacggcaccaagcgguucgacaacccggugcugcccuucaacgacggggucuacuucgcgagcaccgagaaguccaacaucauccgcggcuggaucuucgggacgacccucgacagcaagacccagucccugcugaucgugaacaacgccaccaacguggucaucaaggugugcgaguuccaguucugcaacgaccccuuccucggcguguacuaccacaagaacaacaagagcuggauggaguccgaguuccgggucuacagcuccgccaacaacugcacguucgaguacgugagccagcccuuccugauggaccuggagggcaagcaggggaacuucaagaaccuccgcgaguucguguucaagaacaucgacggcuacuucaagaucuacuccaagcacaccccgaucaaccugguccgggaccugccccagggguucagcgcccucgagccccugguggaccugcccaucggcaucaacaucacccgcuuccagacccuccuggcccugcaccgguccuaccucacgccgggggacagcagcuccggcuggaccgcgggcgccgccgccuacuacgugggguaccugcagccccgcaccuuccugcucaaguacaacgagaacggcaccaucacggacgcggucgacugcgcccuggacccccugagcgagaccaagugcacccucaaguccuucaccguggagaaggggaucuaccagacgagcaacuuccgggugcagcccaccgaguccaucguccgcuucccgaacaucaccaaccugugccccuucggcgagguguucaacgccacccgguucgccagcgucuacgccuggaaccgcaagcggaucuccaacugcguggcggacuacagcgugcuguacaacuccgccagcuucuccacguucaagugcuacggcgucagccccaccaagcucaacgaccugugcuucaccaacguguacgccgacuccuucgugauccgcggggacgagguccggcagaucgcccccggccagaccgggaagaucgccgacuacaacuacaagcugccggacgacuucacgggcugcgugaucgcguggaacagcaacaaccucgacuccaaggucgggggcaacuacaacuaccuguuccgccuguuccgcaagagcaaccucaagcccuucgagcgggacaucuccaccgagaucuaccaggccggcagcacccccugcaacgggguggagggcuucaacugcuacuucccccugcaguccuacggguuccagccgaccaacggcgugggguaccagcccuaccggguggucgugcugagcuucgagcuccugcacgcccccgccacggugugcggccccaagaaguccaccaaccuggucaagaacaagugcgugaacuucaacuucaacggccucaccgggaccggcgugcugaccgagagcaacaagaaguuccugccguuccagcaguucgggcgcgacaucgccgacacgaccgacgcgguccgcgacccccagacccuggagauccucgacaucacccccugcagcuucggcgggguguccgugaucacgccgggcaccaacaccagcaaccaggucgccgugcuguaccagggcgugaacugcaccgagguccccguggccauccacgccgaccagcugacgcccaccuggcggguguacuccaccggcagcaacgucuuccagacccgcgccgggugccucaucggcgcggagcacgugaacaacuccuacgagugcgacauccccaucggggccggcaucugcgccagcuaccagacgcagaccaacuccccgcggcgcgcccggagcguggcgucccagagcaucaucgccuacaccaugucccugggcgccgagaacagcgucgccuacuccaacaacagcaucgccauccccaccaacuucacgaucuccgugaccaccgagauccugcccgugagcaugaccaagacgagcgucgacugcaccauguacaucugcggggacuccaccgagugcagcaaccuccugcugcaguacggcuccuucugcacccagcucaaccgcgcgcugacggggaucgccguggagcaggacaagaacacccaggagguguucgcccaggucaagcagaucuacaagacgcccccgaucaaggacuucggcggguucaacuucagccagauccugcccgaccccuccaagcccagcaagcgguccuucaucgaggaccuccuguucaacaaggugacccuggccgacgccggcuucaucaagcaguacggcgacugccucggggacaucgcggcccgcgaccugaucugcgcccagaaguucaacggccugaccgugcucccgccccugcugaccgacgagaugaucgcccaguacaccagcgcccuccuggcggggaccaucacguccggcuggaccuucggggccggcgccgcccugcagauccccuucgcgaugcagauggccuaccgguucaacggcaucggggucacccagaacgugcucuacgagaaccagaagcugaucgccaaccaguucaacagcgccaucggcaagauccaggacucccugagcuccaccgccagcgcgcucgggaagcugcaggacguggucaaccagaacgcccaggcccugaacacgcucgugaagcagcuguccagcaacuucggcgccaucuccagcgugcugaacgacauccucucccgccuggacaaggucgaggccgaggugcagaucgaccggcugaucaccgggcgccuccagagccugcagaccuacgugacccagcagcugauccgggcggccgagauccgcgccagcgccaaccucgccgcgaccaagauguccgagugcguccugggccagagcaagcggguggacuucugcggcaagggguaccaccugauguccuucccccagagcgccccgcacggcguggucuuccuccacgugacguacguccccgcccaggagaagaacuucaccaccgcccccgcgaucugccacgacgggaaggcccacuucccccgcgagggcguguucguguccaacgggacccacugguucgucacgcagcggaacuucuacgagccgcagaucaucaccaccgacaacaccuucgugagcggcaacugcgacguggucaucggcaucgugaacaacacgguguacgacccccugcagcccgagcuggacuccuucaaggaggagcucgacaaguacuucaagaaccacaccagccccgacgucgaccugggggacaucuccggcaucaacgccagcguggugaacauccagaaggagaucgaccgccugaacgaggucgccaagaaccucaacgagucccugaucgaccugcaggagcucgggaaguacgagcaguacaucaaguggccgugguacaucuggcugggcuucaucgccggccugaucgcgaucgugauggugaccaucaugcucugcugcaugaccagcugcugcuccugccugaaggggugcugcagcugcggcuccugcugcaaguucgacgaggacgacagcgagcccguccugaagggggugaagcuccacuacacgugaugacucgagcugguacugcaugcacgcaaugcuagcugccccuuucccguccuggguaccccgagucucccccgaccucgggucccagguaugcucccaccuccaccugccccacucaccaccucugcuaguuccagacaccucccaagcacgcagcaaugcagcucaaaacgcuuagccuagccacacccccacgggaaacagcagugauuaaccuuuagcaauaaacgaaaguuuaacuaagcuauacuaaccccaggguuggucaauuucgugccagccacacccuggagcuagcaaaaaaaaaaaaaaaaaaaaaaaaaaaaaaaaaaaaaaaaaaaaaaaaaaaaaaaaaaaaaaaaaaaaaaaaaaaaaaaaaaaaaaaaaaaaaaaaaaaa

SEQ ID NO: 26277 - RNA, 4273 nt, Artificial Sequence
  SARS-CoV-2/Wuhan/WIV05/2019__EPI_ISL_402128 spike protein mRNA gc (1-1273)(D614G_I692V)
agaauaaacuaguauucuucugguccccacagacucagagagaacccgccaccauguucguguuccugguccuccugccccuggugagcucccagugcgugaaccucaccacccgcacgcagcugccgcccgccuacaccaacagcuucacccggggcgucuacuaccccgacaagguguuccgcuccagcgugcugcacuccacccaggaccucuuccugcccuucuucagcaacgucacgugguuccacgccauccacguguccgggaccaacggcaccaagcgguucgacaacccggugcugcccuucaacgacggggucuacuucgcgagcaccgagaaguccaacaucauccgcggcuggaucuucgggacgacccucgacagcaagacccagucccugcugaucgugaacaacgccaccaacguggucaucaaggugugcgaguuccaguucugcaacgaccccuuccucggcguguacuaccacaagaacaacaagagcuggauggaguccgaguuccgggucuacagcuccgccaacaacugcacguucgaguacgugagccagcccuuccugauggaccuggagggcaagcaggggaacuucaagaaccuccgcgaguucguguucaagaacaucgacggcuacuucaagaucuacuccaagcacaccccgaucaaccugguccgggaccugccccagggguucagcgcccucgagccccugguggaccugcccaucggcaucaacaucacccgcuuccagacccuccuggcccugcaccgguccuaccucacgccgggggacagcagcuccggcuggaccgcgggcgccgccgccuacuacgugggguaccugcagccccgcaccuuccugcucaaguacaacgagaacggcaccaucacggacgcggucgacugcgcccuggacccccugagcgagaccaagugcacccucaaguccuucaccguggagaaggggaucuaccagacgagcaacuuccgggugcagcccaccgaguccaucguccgcuucccgaacaucaccaaccugugccccuucggcgagguguucaacgccacccgguucgccagcgucuacgccuggaaccgcaagcggaucuccaacugcguggcggacuacagcgugcuguacaacuccgccagcuucuccacguucaagugcuacggcgucagccccaccaagcucaacgaccugugcuucaccaacguguacgccgacuccuucgugauccgcggggacgagguccggcagaucgcccccggccagaccgggaagaucgccgacuacaacuacaagcugccggacgacuucacgggcugcgugaucgcguggaacagcaacaaccucgacuccaaggucgggggcaacuacaacuaccuguaccgccuguuccgcaagagcaaccucaagcccuucgagcgggacaucuccaccgagaucuaccaggccggcagcacccccugcaacgggguggagggcuucaacugcuacuucccccugcaguccuacggguuccagccgaccaacggcgugggguaccagcccuaccggguggucgugcugagcuucgagcuccugcacgcccccgccacggugugcggccccaagaaguccaccaaccuggucaagaacaagugcgugaacuucaacuucaacggccucaccgggaccggcgugcugaccgagagcaacaagaaguuccugccguuccagcaguucgggcgcgacaucgccgacacgaccgacgcgguccgcgacccccagacccuggagauccucgacaucacccccugcagcuucggcgggguguccgugaucacgccgggcaccaacaccagcaaccaggucgccgugcuguaccagggcgugaacugcaccgagguccccguggccauccacgccgaccagcugacgcccaccuggcggguguacuccaccggcagcaacgucuuccagacccgcgccgggugccucaucggcgcggagcacgugaacaacuccuacgagugcgacauccccaucggggccggcaucugcgccagcuaccagacgcagaccaacuccccgcggcgcgcccggagcguggcgucccagagcgucaucgccuacaccaugucccugggcgccgagaacagcgucgccuacuccaacaacagcaucgccauccccaccaacuucacgaucuccgugaccaccgagauccugcccgugagcaugaccaagacgagcgucgacugcaccauguacaucugcggggacuccaccgagugcagcaaccuccugcugcaguacggcuccuucugcacccagcucaaccgcgcgcugacggggaucgccguggagcaggacaagaacacccaggagguguucgcccaggucaagcagaucuacaagacgcccccgaucaaggacuucggcggguucaacuucagccagauccugcccgaccccuccaagcccagcaagcgguccuucaucgaggaccuccuguucaacaaggugacccuggccgacgccggcuucaucaagcaguacggcgacugccucggggacaucgcggcccgcgaccugaucugcgcccagaaguucaacggccugaccgugcucccgccccugcugaccgacgagaugaucgcccaguacaccagcgcccuccuggcggggaccaucacguccggcuggaccuucggggccggcgccgcccugcagauccccuucgcgaugcagauggccuaccgguucaacggcaucggggucacccagaacgugcucuacgagaaccagaagcugaucgccaaccaguucaacagcgccaucggcaagauccaggacucccugagcuccaccgccagcgcgcucgggaagcugcaggacguggucaaccagaacgcccaggcccugaacacgcucgugaagcagcuguccagcaacuucggcgccaucuccagcgugcugaacgacauccucucccgccuggacaaggucgaggccgaggugcagaucgaccggcugaucaccgggcgccuccagagccugcagaccuacgugacccagcagcugauccgggcggccgagauccgcgccagcgccaaccucgccgcgaccaagauguccgagugcguccugggccagagcaagcggguggacuucugcggcaagggguaccaccugauguccuucccccagagcgccccgcacggcguggucuuccuccacgugacguacguccccgcccaggagaagaacuucaccaccgcccccgcgaucugccacgacgggaaggcccacuucccccgcgagggcguguucguguccaacgggacccacugguucgucacgcagcggaacuucuacgagccgcagaucaucaccaccgacaacaccuucgugagcggcaacugcgacguggucaucggcaucgugaacaacacgguguacgacccccugcagcccgagcuggacuccuucaaggaggagcucgacaaguacuucaagaaccacaccagccccgacgucgaccugggggacaucuccggcaucaacgccagcguggugaacauccagaaggagaucgaccgccugaacgaggucgccaagaaccucaacgagucccugaucgaccugcaggagcucgggaaguacgagcaguacaucaaguggccgugguacaucuggcugggcuucaucgccggccugaucgcgaucgugauggugaccaucaugcucugcugcaugaccagcugcugcuccugccugaaggggugcugcagcugcggcuccugcugcaaguucgacgaggacgacagcgagcccguccugaagggggugaagcuccacuacacgugaugacucgagcugguacugcaugcacgcaaugcuagcugccccuuucccguccuggguaccccgagucucccccgaccucgggucccagguaugcucccaccuccaccugccccacucaccaccucugcuaguuccagacaccucccaagcacgcagcaaugcagcucaaaacgcuuagccuagccacacccccacgggaaacagcagugauuaaccuuuagcaauaaacgaaaguuuaacuaagcuauacuaaccccaggguuggucaauuucgugccagccacacccuggagcuagcaaaaaaaaaaaaaaaaaaaaaaaaaaaaaaaaaaaaaaaaaaaaaaaaaaaaaaaaaaaaaaaaaaaaaaaaaaaaaaaaaaaaaaaaaaaaaaaaaaaa

SEQ ID NO: 26278 - RNA, 4273 nt, Artificial Sequence
  SARS-CoV-2/Wuhan/WIV05/2019__EPI_ISL_402128 spike protein mRNA gc (1-1273)(D614G_M1229I)
agaauaaacuaguauucuucugguccccacagacucagagagaacccgccaccauguucguguuccugguccuccugccccuggugagcucccagugcgugaaccucaccacccgcacgcagcugccgcccgccuacaccaacagcuucacccggggcgucuacuaccccgacaagguguuccgcuccagcgugcugcacuccacccaggaccucuuccugcccuucuucagcaacgucacgugguuccacgccauccacguguccgggaccaacggcaccaagcgguucgacaacccggugcugcccuucaacgacggggucuacuucgcgagcaccgagaaguccaacaucauccgcggcuggaucuucgggacgacccucgacagcaagacccagucccugcugaucgugaacaacgccaccaacguggucaucaaggugugcgaguuccaguucugcaacgaccccuuccucggcguguacuaccacaagaacaacaagagcuggauggaguccgaguuccgggucuacagcuccgccaacaacugcacguucgaguacgugagccagcccuuccugauggaccuggagggcaagcaggggaacuucaagaaccuccgcgaguucguguucaagaacaucgacggcuacuucaagaucuacuccaagcacaccccgaucaaccugguccgggaccugccccagggguucagcgcccucgagccccugguggaccugcccaucggcaucaacaucacccgcuuccagacccuccuggcccugcaccgguccuaccucacgccgggggacagcagcuccggcuggaccgcgggcgccgccgccuacuacgugggguaccugcagccccgcaccuuccugcucaaguacaacgagaacggcaccaucacggacgcggucgacugcgcccuggacccccugagcgagaccaagugcacccucaaguccuucaccguggagaaggggaucuaccagacgagcaacuuccgggugcagcccaccgaguccaucguccgcuucccgaacaucaccaaccugugccccuucggcgagguguucaacgccacccgguucgccagcgucuacgccuggaaccgcaagcggaucuccaacugcguggcggacuacagcgugcuguacaacuccgccagcuucuccacguucaagugcuacggcgucagccccaccaagcucaacgaccugugcuucaccaacguguacgccgacuccuucgugauccgcggggacgagguccggcagaucgcccccggccagaccgggaagaucgccgacuacaacuacaagcugccggacgacuucacgggcugcgugaucgcguggaacagcaacaaccucgacuccaaggucgggggcaacuacaacuaccuguaccgccuguuccgcaagagcaaccucaagcccuucgagcgggacaucuccaccgagaucuaccaggccggcagcacccccugcaacgggguggagggcuucaacugcuacuucccccugcaguccuacggguuccagccgaccaacggcgugggguaccagcccuaccggguggucgugcugagcuucgagcuccugcacgcccccgccacggugugcggccccaagaaguccaccaaccuggucaagaacaagugcgugaacuucaacuucaacggccucaccgggaccggcgugcugaccgagagcaacaagaaguuccugccguuccagcaguucgggcgcgacaucgccgacacgaccgacgcgguccgcgacccccagacccuggagauccucgacaucacccccugcagcuucggcgggguguccgugaucacgccgggcaccaacaccagcaaccaggucgccgugcuguaccagggcgugaacugcaccgagguccccguggccauccacgccgaccagcugacgcccaccuggcggguguacuccaccggcagcaacgucuuccagacccgcgccgggugccucaucggcgcggagcacgugaacaacuccuacgagugcgacauccccaucggggccggcaucugcgccagcuaccagacgcagaccaacuccccgcggcgcgcccggagcguggcgucccagagcaucaucgccuacaccaugucccugggcgccgagaacagcgucgccuacuccaacaacagcaucgccauccccaccaacuucacgaucuccgugaccaccgagauccugcccgugagcaugaccaagacgagcgucgacugcaccauguacaucugcggggacuccaccgagugcagcaaccuccugcugcaguacggcuccuucugcacccagcucaaccgcgcgcugacggggaucgccguggagcaggacaagaacacccaggagguguucgcccaggucaagcagaucuacaagacgcccccgaucaaggacuucggcggguucaacuucagccagauccugcccgaccccuccaagcccagcaagcgguccuucaucgaggaccuccuguucaacaaggugacccuggccgacgccggcuucaucaagcaguacggcgacugccucggggacaucgcggcccgcgaccugaucugcgcccagaaguucaacggccugaccgugcucccgccccugcugaccgacgagaugaucgcccaguacaccagcgcccuccuggcggggaccaucacguccggcuggaccuucggggccggcgccgcccugcagauccccuucgcgaugcagauggccuaccgguucaacggcaucggggucacccagaacgugcucuacgagaaccagaagcugaucgccaaccaguucaacagcgccaucggcaagauccaggacucccugagcuccaccgccagcgcgcucgggaagcugcaggacguggucaaccagaacgcccaggcccugaacacgcucgugaagcagcuguccagcaacuucggcgccaucuccagcgugcugaacgacauccucucccgccuggacaaggucgaggccgaggugcagaucgaccggcugaucaccgggcgccuccagagccugcagaccuacgugacccagcagcugauccgggcggccgagauccgcgccagcgccaaccucgccgcgaccaagauguccgagugcguccugggccagagcaagcggguggacuucugcggcaagggguaccaccugauguccuucccccagagcgccccgcacggcguggucuuccuccacgugacguacguccccgcccaggagaagaacuucaccaccgcccccgcgaucugccacgacgggaaggcccacuucccccgcgagggcguguucguguccaacgggacccacugguucgucacgcagcggaacuucuacgagccgcagaucaucaccaccgacaacaccuucgugagcggcaacugcgacguggucaucggcaucgugaacaacacgguguacgacccccugcagcccgagcuggacuccuucaaggaggagcucgacaaguacuucaagaaccacaccagccccgacgucgaccugggggacaucuccggcaucaacgccagcguggugaacauccagaaggagaucgaccgccugaacgaggucgccaagaaccucaacgagucccugaucgaccugcaggagcucgggaaguacgagcaguacaucaaguggccgugguacaucuggcugggcuucaucgccggccugaucgcgaucgugaucgugaccaucaugcucugcugcaugaccagcugcugcuccugccugaaggggugcugcagcugcggcuccugcugcaaguucgacgaggacgacagcgagcccguccugaagggggugaagcuccacuacacgugaugacucgagcugguacugcaugcacgcaaugcuagcugccccuuucccguccuggguaccccgagucucccccgaccucgggucccagguaugcucccaccuccaccugccccacucaccaccucugcuaguuccagacaccucccaagcacgcagcaaugcagcucaaaacgcuuagccuagccacacccccacgggaaacagcagugauuaaccuuuagcaauaaacgaaaguuuaacuaagcuauacuaaccccaggguuggucaauuucgugccagccacacccuggagcuagcaaaaaaaaaaaaaaaaaaaaaaaaaaaaaaaaaaaaaaaaaaaaaaaaaaaaaaaaaaaaaaaaaaaaaaaaaaaaaaaaaaaaaaaaaaaaaaaaaaaa

SEQ ID NO: 26279 - RNA, 4267 nt, Artificial Sequence
  SARS-CoV-2/Wuhan/WIV05/2019__EPI_ISL_402128 spike protein mRNA gc (1-1273)(H69del_V70del_A222V_Y453F_S477N_D614G_I692V)
agaauaaacuaguauucuucugguccccacagacucagagagaacccgccaccauguucguguuccugguccuccugccccuggugagcucccagugcgugaaccucaccacccgcacgcagcugccgcccgccuacaccaacagcuucacccggggcgucuacuaccccgacaagguguuccgcuccagcgugcugcacuccacccaggaccucuuccugcccuucuucagcaacgucacgugguuccacgccaucuccgggaccaacggcaccaagcgguucgacaacccggugcugcccuucaacgacggggucuacuucgcgagcaccgagaaguccaacaucauccgcggcuggaucuucgggacgacccucgacagcaagacccagucccugcugaucgugaacaacgccaccaacguggucaucaaggugugcgaguuccaguucugcaacgaccccuuccucggcguguacuaccacaagaacaacaagagcuggauggaguccgaguuccgggucuacagcuccgccaacaacugcacguucgaguacgugagccagcccuuccugauggaccuggagggcaagcaggggaacuucaagaaccuccgcgaguucguguucaagaacaucgacggcuacuucaagaucuacuccaagcacaccccgaucaaccugguccgggaccugccccagggguucagcguccucgagccccugguggaccugcccaucggcaucaacaucacccgcuuccagacccuccuggcccugcaccgguccuaccucacgccgggggacagcagcuccggcuggaccgcgggcgccgccgccuacuacgugggguaccugcagccccgcaccuuccugcucaaguacaacgagaacggcaccaucacggacgcggucgacugcgcccuggacccccugagcgagaccaagugcacccucaaguccuucaccguggagaaggggaucuaccagacgagcaacuuccgggugcagcccaccgaguccaucguccgcuucccgaacaucaccaaccugugccccuucggcgagguguucaacgccacccgguucgccagcgucuacgccuggaaccgcaagcggaucuccaacugcguggcggacuacagcgugcuguacaacuccgccagcuucuccacguucaagugcuacggcgucagccccaccaagcucaacgaccugugcuucaccaacguguacgccgacuccuucgugauccgcggggacgagguccggcagaucgcccccggccagaccgggaagaucgccgacuacaacuacaagcugccggacgacuucacgggcugcgugaucgcguggaacagcaacaaccucgacuccaaggucgggggcaacuacaacuaccuguuccgccuguuccgcaagagcaaccucaagcccuucgagcgggacaucuccaccgagaucuaccaggccggcaacacccccugcaacgggguggagggcuucaacugcuacuucccccugcaguccuacggguuccagccgaccaacggcgugggguaccagcccuaccggguggucgugcugagcuucgagcuccugcacgcccccgccacggugugcggccccaagaaguccaccaaccuggucaagaacaagugcgugaacuucaacuucaacggccucaccgggaccggcgugcugaccgagagcaacaagaaguuccugccguuccagcaguucgggcgcgacaucgccgacacgaccgacgcgguccgcgacccccagacccuggagauccucgacaucacccccugcagcuucggcgggguguccgugaucacgccgggcaccaacaccagcaaccaggucgccgugcuguaccagggcgugaacugcaccgagguccccguggccauccacgccgaccagcugacgcccaccuggcggguguacuccaccggcagcaacgucuuccagacccgcgccgggugccucaucggcgcggagcacgugaacaacuccuacgagugcgacauccccaucggggccggcaucugcgccagcuaccagacgcagaccaacuccccgcggcgcgcccggagcguggcgucccagagcgucaucgccuacaccaugucccugggcgccgagaacagcgucgccuacuccaacaacagcaucgccauccccaccaacuucacgaucuccgugaccaccgagauccugcccgugagcaugaccaagacgagcgucgacugcaccauguacaucugcggggacuccaccgagugcagcaaccuccugcugcaguacggcuccuucugcacccagcucaaccgcgcgcugacggggaucgccguggagcaggacaagaacacccaggagguguucgcccaggucaagcagaucuacaagacgcccccgaucaaggacuucggcggguucaacuucagccagauccugcccgaccccuccaagcccagcaagcgguccuucaucgaggaccuccuguucaacaaggugacccuggccgacgccggcuucaucaagcaguacggcgacugccucggggacaucgcggcccgcgaccugaucugcgcccagaaguucaacggccugaccgugcucccgccccugcugaccgacgagaugaucgcccaguacaccagcgcccuccuggcggggaccaucacguccggcuggaccuucggggccggcgccgcccugcagauccccuucgcgaugcagauggccuaccgguucaacggcaucggggucacccagaacgugcucuacgagaaccagaagcugaucgccaaccaguucaacagcgccaucggcaagauccaggacucccugagcuccaccgccagcgcgcucgggaagcugcaggacguggucaaccagaacgcccaggcccugaacacgcucgugaagcagcuguccagcaacuucggcgccaucuccagcgugcugaacgacauccucucccgccuggacaaggucgaggccgaggugcagaucgaccggcugaucaccgggcgccuccagagccugcagaccuacgugacccagcagcugauccgggcggccgagauccgcgccagcgccaaccucgccgcgaccaagauguccgagugcguccugggccagagcaagcggguggacuucugcggcaagggguaccaccugauguccuucccccagagcgccccgcacggcguggucuuccuccacgugacguacguccccgcccaggagaagaacuucaccaccgcccccgcgaucugccacgacgggaaggcccacuucccccgcgagggcguguucguguccaacgggacccacugguucgucacgcagcggaacuucuacgagccgcagaucaucaccaccgacaacaccuucgugagcggcaacugcgacguggucaucggcaucgugaacaacacgguguacgacccccugcagcccgagcuggacuccuucaaggaggagcucgacaaguacuucaagaaccacaccagccccgacgucgaccugggggacaucuccggcaucaacgccagcguggugaacauccagaaggagaucgaccgccugaacgaggucgccaagaaccucaacgagucccugaucgaccugcaggagcucgggaaguacgagcaguacaucaaguggccgugguacaucuggcugggcuucaucgccggccugaucgcgaucgugauggugaccaucaugcucugcugcaugaccagcugcugcuccugccugaaggggugcugcagcugcggcuccugcugcaaguucgacgaggacgacagcgagcccguccugaagggggugaagcuccacuacacgugaugacucgagcugguacugcaugcacgcaaugcuagcugccccuuucccguccuggguaccccgagucucccccgaccucgggucccagguaugcucccaccuccaccugccccacucaccaccucugcuaguuccagacaccucccaagcacgcagcaaugcagcucaaaacgcuuagccuagccacacccccacgggaaacagcagugauuaaccuuuagcaauaaacgaaaguuuaacuaagcuauacuaaccccaggguuggucaauuucgugccagccacacccuggagcuagcaaaaaaaaaaaaaaaaaaaaaaaaaaaaaaaaaaaaaaaaaaaaaaaaaaaaaaaaaaaaaaaaaaaaaaaaaaaaaaaaaaaaaaaaaaaaaaaaaaaa

SEQ ID NO: 26280 - RNA, 4267 nt, Artificial Sequence
  SARS-CoV-2/Wuhan/WIV05/2019__EPI_ISL_402128 spike protein mRNA gc (1-1273)(H69del_V70del_Y453F_D614G_I692V_M1229I)
agaauaaacuaguauucuucugguccccacagacucagagagaacccgccaccauguucguguuccugguccuccugccccuggugagcucccagugcgugaaccucaccacccgcacgcagcugccgcccgccuacaccaacagcuucacccggggcgucuacuaccccgacaagguguuccgcuccagcgugcugcacuccacccaggaccucuuccugcccuucuucagcaacgucacgugguuccacgccaucuccgggaccaacggcaccaagcgguucgacaacccggugcugcccuucaacgacggggucuacuucgcgagcaccgagaaguccaacaucauccgcggcuggaucuucgggacgacccucgacagcaagacccagucccugcugaucgugaacaacgccaccaacguggucaucaaggugugcgaguuccaguucugcaacgaccccuuccucggcguguacuaccacaagaacaacaagagcuggauggaguccgaguuccgggucuacagcuccgccaacaacugcacguucgaguacgugagccagcccuuccugauggaccuggagggcaagcaggggaacuucaagaaccuccgcgaguucguguucaagaacaucgacggcuacuucaagaucuacuccaagcacaccccgaucaaccugguccgggaccugccccagggguucagcgcccucgagccccugguggaccugcccaucggcaucaacaucacccgcuuccagacccuccuggcccugcaccgguccuaccucacgccgggggacagcagcuccggcuggaccgcgggcgccgccgccuacuacgugggguaccugcagccccgcaccuuccugcucaaguacaacgagaacggcaccaucacggacgcggucgacugcgcccuggacccccugagcgagaccaagugcacccucaaguccuucaccguggagaaggggaucuaccagacgagcaacuuccgggugcagcccaccgaguccaucguccgcuucccgaacaucaccaaccugugccccuucggcgagguguucaacgccacccgguucgccagcgucuacgccuggaaccgcaagcggaucuccaacugcguggcggacuacagcgugcuguacaacuccgccagcuucuccacguucaagugcuacggcgucagccccaccaagcucaacgaccugugcuucaccaacguguacgccgacuccuucgugauccgcggggacgagguccggcagaucgcccccggccagaccgggaagaucgccgacuacaacuacaagcugccggacgacuucacgggcugcgugaucgcguggaacagcaacaaccucgacuccaaggucgggggcaacuacaacuaccuguuccgccuguuccgcaagagcaaccucaagcccuucgagcgggacaucuccaccgagaucuaccaggccggcagcacccccugcaacgggguggagggcuucaacugcuacuucccccugcaguccuacggguuccagccgaccaacggcgugggguaccagcccuaccggguggucgugcugagcuucgagcuccugcacgcccccgccacggugugcggccccaagaaguccaccaaccuggucaagaacaagugcgugaacuucaacuucaacggccucaccgggaccggcgugcugaccgagagcaacaagaaguuccugccguuccagcaguucgggcgcgacaucgccgacacgaccgacgcgguccgcgacccccagacccuggagauccucgacaucacccccugcagcuucggcgggguguccgugaucacgccgggcaccaacaccagcaaccaggucgccgugcuguaccagggcgugaacugcaccgagguccccguggccauccacgccgaccagcugacgcccaccuggcggguguacuccaccggcagcaacgucuuccagacccgcgccgggugccucaucggcgcggagcacgugaacaacuccuacgagugcgacauccccaucggggccggcaucugcgccagcuaccagacgcagaccaacuccccgcggcgcgcccggagcguggcgucccagagcgugaucgccuacaccaugucccugggcgccgagaacagcgucgccuacuccaacaacagcaucgccauccccaccaacuucacgaucuccgugaccaccgagauccugcccgugagcaugaccaagacgagcgucgacugcaccauguacaucugcggggacuccaccgagugcagcaaccuccugcugcaguacggcuccuucugcacccagcucaaccgcgcgcugacggggaucgccguggagcaggacaagaacacccaggagguguucgcccaggucaagcagaucuacaagacgcccccgaucaaggacuucggcggguucaacuucagccagauccugcccgaccccuccaagcccagcaagcgguccuucaucgaggaccuccuguucaacaaggugacccuggccgacgccggcuucaucaagcaguacggcgacugccucggggacaucgcggcccgcgaccugaucugcgcccagaaguucaacggccugaccgugcucccgccccugcugaccgacgagaugaucgcccaguacaccagcgcccuccuggcggggaccaucacguccggcuggaccuucggggccggcgccgcccugcagauccccuucgcgaugcagauggccuaccgguucaacggcaucggggucacccagaacgugcucuacgagaaccagaagcugaucgccaaccaguucaacagcgccaucggcaagauccaggacucccugagcuccaccgccagcgcgcucgggaagcugcaggacguggucaaccagaacgcccaggcccugaacacgcucgugaagcagcuguccagcaacuucggcgccaucuccagcgugcugaacgacauccucucccgccuggacaaggucgaggccgaggugcagaucgaccggcugaucaccgggcgccuccagagccugcagaccuacgugacccagcagcugauccgggcggccgagauccgcgccagcgccaaccucgccgcgaccaagauguccgagugcguccugggccagagcaagcggguggacuucugcggcaagggguaccaccugauguccuucccccagagcgccccgcacggcguggucuuccuccacgugacguacguccccgcccaggagaagaacuucaccaccgcccccgcgaucugccacgacgggaaggcccacuucccccgcgagggcguguucguguccaacgggacccacugguucgucacgcagcggaacuucuacgagccgcagaucaucaccaccgacaacaccuucgugagcggcaacugcgacguggucaucggcaucgugaacaacacgguguacgacccccugcagcccgagcuggacuccuucaaggaggagcucgacaaguacuucaagaaccacaccagccccgacgucgaccugggggacaucuccggcaucaacgccagcguggugaacauccagaaggagaucgaccgccugaacgaggucgccaagaaccucaacgagucccugaucgaccugcaggagcucgggaaguacgagcaguacaucaaguggccgugguacaucuggcugggcuucaucgccggccugaucgcgaucgugaucgugaccaucaugcucugcugcaugaccagcugcugcuccugccugaaggggugcugcagcugcggcuccugcugcaaguucgacgaggacgacagcgagcccguccugaagggggugaagcuccacuacacgugaugacucgagcugguacugcaugcacgcaaugcuagcugccccuuucccguccuggguaccccgagucucccccgaccucgggucccagguaugcucccaccuccaccugccccacucaccaccucugcuaguuccagacaccucccaagcacgcagcaaugcagcucaaaacgcuuagccuagccacacccccacgggaaacagcagugauuaaccuuuagcaauaaacgaaaguuuaacuaagcuauacuaaccccaggguuggucaauuucgugccagccacacccuggagcuagcaaaaaaaaaaaaaaaaaaaaaaaaaaaaaaaaaaaaaaaaaaaaaaaaaaaaaaaaaaaaaaaaaaaaaaaaaaaaaaaaaaaaaaaaaaaaaaaaaaaa

SEQ ID NO: 26281 - RNA, 4264 nt, Artificial Sequence
  SARS-CoV-2/Wuhan/WIV05/2019__EPI_ISL_402128 spike protein mRNA gc (1-1273)(H69del_V70del_Y144del_N501Y_A570D_D614G_P681H_T716I_S982 A_D1118H)
agaauaaacuaguauucuucugguccccacagacucagagagaacccgccaccauguucguguuccugguccuccugccccuggugagcucccagugcgugaaccucaccacccgcacgcagcugccgcccgccuacaccaacagcuucacccggggcgucuacuaccccgacaagguguuccgcuccagcgugcugcacuccacccaggaccucuuccugcccuucuucagcaacgucacgugguuccacgccaucuccgggaccaacggcaccaagcgguucgacaacccggugcugcccuucaacgacggggucuacuucgcgagcaccgagaaguccaacaucauccgcggcuggaucuucgggacgacccucgacagcaagacccagucccugcugaucgugaacaacgccaccaacguggucaucaaggugugcgaguuccaguucugcaacgaccccuuccucggcguguaccacaagaacaacaagagcuggauggaguccgaguuccgggucuacagcuccgccaacaacugcacguucgaguacgugagccagcccuuccugauggaccuggagggcaagcaggggaacuucaagaaccuccgcgaguucguguucaagaacaucgacggcuacuucaagaucuacuccaagcacaccccgaucaaccugguccgggaccugccccagggguucagcgcccucgagccccugguggaccugcccaucggcaucaacaucacccgcuuccagacccuccuggcccugcaccgguccuaccucacgccgggggacagcagcuccggcuggaccgcgggcgccgccgccuacuacgugggguaccugcagccccgcaccuuccugcucaaguacaacgagaacggcaccaucacggacgcggucgacugcgcccuggacccccugagcgagaccaagugcacccucaaguccuucaccguggagaaggggaucuaccagacgagcaacuuccgggugcagcccaccgaguccaucguccgcuucccgaacaucaccaaccugugccccuucggcgagguguucaacgccacccgguucgccagcgucuacgccuggaaccgcaagcggaucuccaacugcguggcggacuacagcgugcuguacaacuccgccagcuucuccacguucaagugcuacggcgucagccccaccaagcucaacgaccugugcuucaccaacguguacgccgacuccuucgugauccgcggggacgagguccggcagaucgcccccggccagaccgggaagaucgccgacuacaacuacaagcugccggacgacuucacgggcugcgugaucgcguggaacagcaacaaccucgacuccaaggucgggggcaacuacaacuaccuguaccgccuguuccgcaagagcaaccucaagcccuucgagcgggacaucuccaccgagaucuaccaggccggcagcacccccugcaacgggguggagggcuucaacugcuacuucccccugcaguccuacggguuccagccgaccuacggcgugggguaccagcccuaccggguggucgugcugagcuucgagcuccugcacgcccccgccacggugugcggccccaagaaguccaccaaccuggucaagaacaagugcgugaacuucaacuucaacggccucaccgggaccggcgugcugaccgagagcaacaagaaguuccugccguuccagcaguucgggcgcgacaucgacgacacgaccgacgcgguccgcgacccccagacccuggagauccucgacaucacccccugcagcuucggcgggguguccgugaucacgccgggcaccaacaccagcaaccaggucgccgugcuguaccagggcgugaacugcaccgagguccccguggccauccacgccgaccagcugacgcccaccuggcggguguacuccaccggcagcaacgucuuccagacccgcgccgggugccucaucggcgcggagcacgugaacaacuccuacgagugcgacauccccaucggggccggcaucugcgccagcuaccagacgcagaccaacucccaccggcgcgcccggagcguggcgucccagagcaucaucgccuacaccaugucccugggcgccgagaacagcgucgccuacuccaacaacagcaucgccauccccaucaacuucacgaucuccgugaccaccgagauccugcccgugagcaugaccaagacgagcgucgacugcaccauguacaucugcggggacuccaccgagugcagcaaccuccugcugcaguacggcuccuucugcacccagcucaaccgcgcgcugacggggaucgccguggagcaggacaagaacacccaggagguguucgcccaggucaagcagaucuacaagacgcccccgaucaaggacuucggcggguucaacuucagccagauccugcccgaccccuccaagcccagcaagcgguccuucaucgaggaccuccuguucaacaaggugacccuggccgacgccggcuucaucaagcaguacggcgacugccucggggacaucgcggcccgcgaccugaucugcgcccagaaguucaacggccugaccgugcucccgccccugcugaccgacgagaugaucgcccaguacaccagcgcccuccuggcggggaccaucacguccggcuggaccuucggggccggcgccgcccugcagauccccuucgcgaugcagauggccuaccgguucaacggcaucggggucacccagaacgugcucuacgagaaccagaagcugaucgccaaccaguucaacagcgccaucggcaagauccaggacucccugagcuccaccgccagcgcgcucgggaagcugcaggacguggucaaccagaacgcccaggcccugaacacgcucgugaagcagcuguccagcaacuucggcgccaucuccagcgugcugaacgacauccucgcccgccuggacaaggucgaggccgaggugcagaucgaccggcugaucaccgggcgccuccagagccugcagaccuacgugacccagcagcugauccgggcggccgagauccgcgccagcgccaaccucgccgcgaccaagauguccgagugcguccugggccagagcaagcggguggacuucugcggcaagggguaccaccugauguccuucccccagagcgccccgcacggcguggucuuccuccacgugacguacguccccgcccaggagaagaacuucaccaccgcccccgcgaucugccacgacgggaaggcccacuucccccgcgagggcguguucguguccaacgggacccacugguucgucacgcagcggaacuucuacgagccgcagaucaucaccacccacaacaccuucgugagcggcaacugcgacguggucaucggcaucgugaacaacacgguguacgacccccugcagcccgagcuggacuccuucaaggaggagcucgacaaguacuucaagaaccacaccagccccgacgucgaccugggggacaucuccggcaucaacgccagcguggugaacauccagaaggagaucgaccgccugaacgaggucgccaagaaccucaacgagucccugaucgaccugcaggagcucgggaaguacgagcaguacaucaaguggccgugguacaucuggcugggcuucaucgccggccugaucgcgaucgugauggugaccaucaugcucugcugcaugaccagcugcugcuccugccugaaggggugcugcagcugcggcuccugcugcaaguucgacgaggacgacagcgagcccguccugaagggggugaagcuccacuacacgugaugacucgagcugguacugcaugcacgcaaugcuagcugccccuuucccguccuggguaccccgagucucccccgaccucgggucccagguaugcucccaccuccaccugccccacucaccaccucugcuaguuccagacaccucccaagcacgcagcaaugcagcucaaaacgcuuagccuagccacacccccacgggaaacagcagugauuaaccuuuagcaauaaacgaaaguuuaacuaagcuauacuaaccccaggguuggucaauuucgugccagccacacccuggagcuagcaaaaaaaaaaaaaaaaaaaaaaaaaaaaaaaaaaaaaaaaaaaaaaaaaaaaaaaaaaaaaaaaaaaaaaaaaaaaaaaaaaaaaaaaaaaaaaaaaaaa

SEQ ID NO: 26282 - RNA, 4273 nt, Artificial Sequence
  SARS-CoV-2/Wuhan/WIV05/2019__EPI_ISL_402128 spike protein mRNA gc (1-1273)(K417N_E484K_N501Y_D614G)
agaauaaacuaguauucuucugguccccacagacucagagagaacccgccaccauguucguguuccugguccuccugccccuggugagcucccagugcgugaaccucaccacccgcacgcagcugccgcccgccuacaccaacagcuucacccggggcgucuacuaccccgacaagguguuccgcuccagcgugcugcacuccacccaggaccucuuccugcccuucuucagcaacgucacgugguuccacgccauccacguguccgggaccaacggcaccaagcgguucgacaacccggugcugcccuucaacgacggggucuacuucgcgagcaccgagaaguccaacaucauccgcggcuggaucuucgggacgacccucgacagcaagacccagucccugcugaucgugaacaacgccaccaacguggucaucaaggugugcgaguuccaguucugcaacgaccccuuccucggcguguacuaccacaagaacaacaagagcuggauggaguccgaguuccgggucuacagcuccgccaacaacugcacguucgaguacgugagccagcccuuccugauggaccuggagggcaagcaggggaacuucaagaaccuccgcgaguucguguucaagaacaucgacggcuacuucaagaucuacuccaagcacaccccgaucaaccugguccgggaccugccccagggguucagcgcccucgagccccugguggaccugcccaucggcaucaacaucacccgcuuccagacccuccuggcccugcaccgguccuaccucacgccgggggacagcagcuccggcuggaccgcgggcgccgccgccuacuacgugggguaccugcagccccgcaccuuccugcucaaguacaacgagaacggcaccaucacggacgcggucgacugcgcccuggacccccugagcgagaccaagugcacccucaaguccuucaccguggagaaggggaucuaccagacgagcaacuuccgggugcagcccaccgaguccaucguccgcuucccgaacaucaccaaccugugccccuucggcgagguguucaacgccacccgguucgccagcgucuacgccuggaaccgcaagcggaucuccaacugcguggcggacuacagcgugcuguacaacuccgccagcuucuccacguucaagugcuacggcgucagccccaccaagcucaacgaccugugcuucaccaacguguacgccgacuccuucgugauccgcggggacgagguccggcagaucgcccccggccagaccgggaacaucgccgacuacaacuacaagcugccggacgacuucacgggcugcgugaucgcguggaacagcaacaaccucgacuccaaggucgggggcaacuacaacuaccuguaccgccuguuccgcaagagcaaccucaagcccuucgagcgggacaucuccaccgagaucuaccaggccggcagcacccccugcaacggggugaagggcuucaacugcuacuucccccugcaguccuacggguuccagccgaccuacggcgugggguaccagcccuaccggguggucgugcugagcuucgagcuccugcacgcccccgccacggugugcggccccaagaaguccaccaaccuggucaagaacaagugcgugaacuucaacuucaacggccucaccgggaccggcgugcugaccgagagcaacaagaaguuccugccguuccagcaguucgggcgcgacaucgccgacacgaccgacgcgguccgcgacccccagacccuggagauccucgacaucacccccugcagcuucggcgggguguccgugaucacgccgggcaccaacaccagcaaccaggucgccgugcuguaccagggcgugaacugcaccgagguccccguggccauccacgccgaccagcugacgcccaccuggcggguguacuccaccggcagcaacgucuuccagacccgcgccgggugccucaucggcgcggagcacgugaacaacuccuacgagugcgacauccccaucggggccggcaucugcgccagcuaccagacgcagaccaacuccccgcggcgcgcccggagcguggcgucccagagcaucaucgccuacaccaugucccugggcgccgagaacagcgucgccuacuccaacaacagcaucgccauccccaccaacuucacgaucuccgugaccaccgagauccugcccgugagcaugaccaagacgagcgucgacugcaccauguacaucugcggggacuccaccgagugcagcaaccuccugcugcaguacggcuccuucugcacccagcucaaccgcgcgcugacggggaucgccguggagcaggacaagaacacccaggagguguucgcccaggucaagcagaucuacaagacgcccccgaucaaggacuucggcggguucaacuucagccagauccugcccgaccccuccaagcccagcaagcgguccuucaucgaggaccuccuguucaacaaggugacccuggccgacgccggcuucaucaagcaguacggcgacugccucggggacaucgcggcccgcgaccugaucugcgcccagaaguucaacggccugaccgugcucccgccccugcugaccgacgagaugaucgcccaguacaccagcgcccuccuggcggggaccaucacguccggcuggaccuucggggccggcgccgcccugcagauccccuucgcgaugcagauggccuaccgguucaacggcaucggggucacccagaacgugcucuacgagaaccagaagcugaucgccaaccaguucaacagcgccaucggcaagauccaggacucccugagcuccaccgccagcgcgcucgggaagcugcaggacguggucaaccagaacgcccaggcccugaacacgcucgugaagcagcuguccagcaacuucggcgccaucuccagcgugcugaacgacauccucucccgccuggacaaggucgaggccgaggugcagaucgaccggcugaucaccgggcgccuccagagccugcagaccuacgugacccagcagcugauccgggcggccgagauccgcgccagcgccaaccucgccgcgaccaagauguccgagugcguccugggccagagcaagcggguggacuucugcggcaagggguaccaccugauguccuucccccagagcgccccgcacggcguggucuuccuccacgugacguacguccccgcccaggagaagaacuucaccaccgcccccgcgaucugccacgacgggaaggcccacuucccccgcgagggcguguucguguccaacgggacccacugguucgucacgcagcggaacuucuacgagccgcagaucaucaccaccgacaacaccuucgugagcggcaacugcgacguggucaucggcaucgugaacaacacgguguacgacccccugcagcccgagcuggacuccuucaaggaggagcucgacaaguacuucaagaaccacaccagccccgacgucgaccugggggacaucuccggcaucaacgccagcguggugaacauccagaaggagaucgaccgccugaacgaggucgccaagaaccucaacgagucccugaucgaccugcaggagcucgggaaguacgagcaguacaucaaguggccgugguacaucuggcugggcuucaucgccggccugaucgcgaucgugauggugaccaucaugcucugcugcaugaccagcugcugcuccugccugaaggggugcugcagcugcggcuccugcugcaaguucgacgaggacgacagcgagcccguccugaagggggugaagcuccacuacacgugaugacucgagcugguacugcaugcacgcaaugcuagcugccccuuucccguccuggguaccccgagucucccccgaccucgggucccagguaugcucccaccuccaccugccccacucaccaccucugcuaguuccagacaccucccaagcacgcagcaaugcagcucaaaacgcuuagccuagccacacccccacgggaaacagcagugauuaaccuuuagcaauaaacgaaaguuuaacuaagcuauacuaaccccaggguuggucaauuucgugccagccacacccuggagcuagcaaaaaaaaaaaaaaaaaaaaaaaaaaaaaaaaaaaaaaaaaaaaaaaaaaaaaaaaaaaaaaaaaaaaaaaaaaaaaaaaaaaaaaaaaaaaaaaaaaaa

SEQ ID NO: 26283 - RNA, 4264 nt, Artificial Sequence
  SARS-CoV-2/Wuhan/WIV05/2019__EPI_ISL_402128 spike protein mRNA gc (1-1273)(L18F_D80A_D215G_L242del_A243del_L244del_R246I_K417N_E484 K_N501Y_D614G_A701V)
agaauaaacuaguauucuucugguccccacagacucagagagaacccgccaccauguucguguuccugguccuccugccccuggugagcucccagugcgugaacuucaccacccgcacgcagcugccgcccgccuacaccaacagcuucacccggggcgucuacuaccccgacaagguguuccgcuccagcgugcugcacuccacccaggaccucuuccugcccuucuucagcaacgucacgugguuccacgccauccacguguccgggaccaacggcaccaagcgguucgccaacccggugcugcccuucaacgacggggucuacuucgcgagcaccgagaaguccaacaucauccgcggcuggaucuucgggacgacccucgacagcaagacccagucccugcugaucgugaacaacgccaccaacguggucaucaaggugugcgaguuccaguucugcaacgaccccuuccucggcguguacuaccacaagaacaacaagagcuggauggaguccgaguuccgggucuacagcuccgccaacaacugcacguucgaguacgugagccagcccuuccugauggaccuggagggcaagcaggggaacuucaagaaccuccgcgaguucguguucaagaacaucgacggcuacuucaagaucuacuccaagcacaccccgaucaaccugguccggggccugccccagggguucagcgcccucgagccccugguggaccugcccaucggcaucaacaucacccgcuuccagacccuccacaucuccuaccucacgccgggggacagcagcuccggcuggaccgcgggcgccgccgccuacuacgugggguaccugcagccccgcaccuuccugcucaaguacaacgagaacggcaccaucacggacgcggucgacugcgcccuggacccccugagcgagaccaagugcacccucaaguccuucaccguggagaaggggaucuaccagacgagcaacuuccgggugcagcccaccgaguccaucguccgcuucccgaacaucaccaaccugugccccuucggcgagguguucaacgccacccgguucgccagcgucuacgccuggaaccgcaagcggaucuccaacugcguggcggacuacagcgugcuguacaacuccgccagcuucuccacguucaagugcuacggcgucagccccaccaagcucaacgaccugugcuucaccaacguguacgccgacuccuucgugauccgcggggacgagguccggcagaucgcccccggccagaccgggaacaucgccgacuacaacuacaagcugccggacgacuucacgggcugcgugaucgcguggaacagcaacaaccucgacuccaaggucgggggcaacuacaacuaccuguaccgccuguuccgcaagagcaaccucaagcccuucgagcgggacaucuccaccgagaucuaccaggccggcagcacccccugcaacggggugaagggcuucaacugcuacuucccccugcaguccuacggguuccagccgaccuacggcgugggguaccagcccuaccggguggucgugcugagcuucgagcuccugcacgcccccgccacggugugcggccccaagaaguccaccaaccuggucaagaacaagugcgugaacuucaacuucaacggccucaccgggaccggcgugcugaccgagagcaacaagaaguuccugccguuccagcaguucgggcgcgacaucgccgacacgaccgacgcgguccgcgacccccagacccuggagauccucgacaucacccccugcagcuucggcgggguguccgugaucacgccgggcaccaacaccagcaaccaggucgccgugcuguaccagggcgugaacugcaccgagguccccguggccauccacgccgaccagcugacgcccaccuggcggguguacuccaccggcagcaacgucuuccagacccgcgccgggugccucaucggcgcggagcacgugaacaacuccuacgagugcgacauccccaucggggccggcaucugcgccagcuaccagacgcagaccaacuccccgcggcgcgcccggagcguggcgucccagagcaucaucgccuacaccaugucccugggcguggagaacagcgucgccuacuccaacaacagcaucgccauccccaccaacuucacgaucuccgugaccaccgagauccugcccgugagcaugaccaagacgagcgucgacugcaccauguacaucugcggggacuccaccgagugcagcaaccuccugcugcaguacggcuccuucugcacccagcucaaccgcgcgcugacggggaucgccguggagcaggacaagaacacccaggagguguucgcccaggucaagcagaucuacaagacgcccccgaucaaggacuucggcggguucaacuucagccagauccugcccgaccccuccaagcccagcaagcgguccuucaucgaggaccuccuguucaacaaggugacccuggccgacgccggcuucaucaagcaguacggcgacugccucggggacaucgcggcccgcgaccugaucugcgcccagaaguucaacggccugaccgugcucccgccccugcugaccgacgagaugaucgcccaguacaccagcgcccuccuggcggggaccaucacguccggcuggaccuucggggccggcgccgcccugcagauccccuucgcgaugcagauggccuaccgguucaacggcaucggggucacccagaacgugcucuacgagaaccagaagcugaucgccaaccaguucaacagcgccaucggcaagauccaggacucccugagcuccaccgccagcgcgcucgggaagcugcaggacguggucaaccagaacgcccaggcccugaacacgcucgugaagcagcuguccagcaacuucggcgccaucuccagcgugcugaacgacauccucucccgccuggacaaggucgaggccgaggugcagaucgaccggcugaucaccgggcgccuccagagccugcagaccuacgugacccagcagcugauccgggcggccgagauccgcgccagcgccaaccucgccgcgaccaagauguccgagugcguccugggccagagcaagcggguggacuucugcggcaagggguaccaccugauguccuucccccagagcgccccgcacggcguggucuuccuccacgugacguacguccccgcccaggagaagaacuucaccaccgcccccgcgaucugccacgacgggaaggcccacuucccccgcgagggcguguucguguccaacgggacccacugguucgucacgcagcggaacuucuacgagccgcagaucaucaccaccgacaacaccuucgugagcggcaacugcgacguggucaucggcaucgugaacaacacgguguacgacccccugcagcccgagcuggacuccuucaaggaggagcucgacaaguacuucaagaaccacaccagccccgacgucgaccugggggacaucuccggcaucaacgccagcguggugaacauccagaaggagaucgaccgccugaacgaggucgccaagaaccucaacgagucccugaucgaccugcaggagcucgggaaguacgagcaguacaucaaguggccgugguacaucuggcugggcuucaucgccggccugaucgcgaucgugauggugaccaucaugcucugcugcaugaccagcugcugcuccugccugaaggggugcugcagcugcggcuccugcugcaaguucgacgaggacgacagcgagcccguccugaagggggugaagcuccacuacacgugaugacucgagcugguacugcaugcacgcaaugcuagcugccccuuucccguccuggguaccccgagucucccccgaccucgggucccagguaugcucccaccuccaccugccccacucaccaccucugcuaguuccagacaccucccaagcacgcagcaaugcagcucaaaacgcuuagccuagccacacccccacgggaaacagcagugauuaaccuuuagcaauaaacgaaaguuuaacuaagcuauacuaaccccaggguuggucaauuucgugccagccacacccuggagcuagcaaaaaaaaaaaaaaaaaaaaaaaaaaaaaaaaaaaaaaaaaaaaaaaaaaaaaaaaaaaaaaaaaaaaaaaaaaaaaaaaaaaaaaaaaaaaaaaaaaaa

SEQ ID NO: 26284 - RNA, 4273 nt, Artificial Sequence
  SARS-CoV-2/Wuhan/WIV05/2019__EPI_ISL_402128 spike protein mRNA gc (1-1273)(E484K_D614G)
agaauaaacuaguauucuucugguccccacagacucagagagaacccgccaccauguucguguuccugguccuccugccccuggugagcucccagugcgugaaccucaccacccgcacgcagcugccgcccgccuacaccaacagcuucacccggggcgucuacuaccccgacaagguguuccgcuccagcgugcugcacuccacccaggaccucuuccugcccuucuucagcaacgucacgugguuccacgccauccacguguccgggaccaacggcaccaagcgguucgacaacccggugcugcccuucaacgacggggucuacuucgcgagcaccgagaaguccaacaucauccgcggcuggaucuucgggacgacccucgacagcaagacccagucccugcugaucgugaacaacgccaccaacguggucaucaaggugugcgaguuccaguucugcaacgaccccuuccucggcguguacuaccacaagaacaacaagagcuggauggaguccgaguuccgggucuacagcuccgccaacaacugcacguucgaguacgugagccagcccuuccugauggaccuggagggcaagcaggggaacuucaagaaccuccgcgaguucguguucaagaacaucgacggcuacuucaagaucuacuccaagcacaccccgaucaaccugguccgggaccugccccagggguucagcgcccucgagccccugguggaccugcccaucggcaucaacaucacccgcuuccagacccuccuggcccugcaccgguccuaccucacgccgggggacagcagcuccggcuggaccgcgggcgccgccgccuacuacgugggguaccugcagccccgcaccuuccugcucaaguacaacgagaacggcaccaucacggacgcggucgacugcgcccuggacccccugagcgagaccaagugcacccucaaguccuucaccguggagaaggggaucuaccagacgagcaacuuccgggugcagcccaccgaguccaucguccgcuucccgaacaucaccaaccugugccccuucggcgagguguucaacgccacccgguucgccagcgucuacgccuggaaccgcaagcggaucuccaacugcguggcggacuacagcgugcuguacaacuccgccagcuucuccacguucaagugcuacggcgucagccccaccaagcucaacgaccugugcuucaccaacguguacgccgacuccuucgugauccgcggggacgagguccggcagaucgcccccggccagaccgggaagaucgccgacuacaacuacaagcugccggacgacuucacgggcugcgugaucgcguggaacagcaacaaccucgacuccaaggucgggggcaacuacaacuaccuguaccgccuguuccgcaagagcaaccucaagcccuucgagcgggacaucuccaccgagaucuaccaggccggcagcacccccugcaacggggugaagggcuucaacugcuacuucccccugcaguccuacggguuccagccgaccaacggcgugggguaccagcccuaccggguggucgugcugagcuucgagcuccugcacgcccccgccacggugugcggccccaagaaguccaccaaccuggucaagaacaagugcgugaacuucaacuucaacggccucaccgggaccggcgugcugaccgagagcaacaagaaguuccugccguuccagcaguucgggcgcgacaucgccgacacgaccgacgcgguccgcgacccccagacccuggagauccucgacaucacccccugcagcuucggcgggguguccgugaucacgccgggcaccaacaccagcaaccaggucgccgugcuguaccagggcgugaacugcaccgagguccccguggccauccacgccgaccagcugacgcccaccuggcggguguacuccaccggcagcaacgucuuccagacccgcgccgggugccucaucggcgcggagcacgugaacaacuccuacgagugcgacauccccaucggggccggcaucugcgccagcuaccagacgcagaccaacuccccgcggcgcgcccggagcguggcgucccagagcaucaucgccuacaccaugucccugggcgccgagaacagcgucgccuacuccaacaacagcaucgccauccccaccaacuucacgaucuccgugaccaccgagauccugcccgugagcaugaccaagacgagcgucgacugcaccauguacaucugcggggacuccaccgagugcagcaaccuccugcugcaguacggcuccuucugcacccagcucaaccgcgcgcugacggggaucgccguggagcaggacaagaacacccaggagguguucgcccaggucaagcagaucuacaagacgcccccgaucaaggacuucggcggguucaacuucagccagauccugcccgaccccuccaagcccagcaagcgguccuucaucgaggaccuccuguucaacaaggugacccuggccgacgccggcuucaucaagcaguacggcgacugccucggggacaucgcggcccgcgaccugaucugcgcccagaaguucaacggccugaccgugcucccgccccugcugaccgacgagaugaucgcccaguacaccagcgcccuccuggcggggaccaucacguccggcuggaccuucggggccggcgccgcccugcagauccccuucgcgaugcagauggccuaccgguucaacggcaucggggucacccagaacgugcucuacgagaaccagaagcugaucgccaaccaguucaacagcgccaucggcaagauccaggacucccugagcuccaccgccagcgcgcucgggaagcugcaggacguggucaaccagaacgcccaggcccugaacacgcucgugaagcagcuguccagcaacuucggcgccaucuccagcgugcugaacgacauccucucccgccuggacaaggucgaggccgaggugcagaucgaccggcugaucaccgggcgccuccagagccugcagaccuacgugacccagcagcugauccgggcggccgagauccgcgccagcgccaaccucgccgcgaccaagauguccgagugcguccugggccagagcaagcggguggacuucugcggcaagggguaccaccugauguccuucccccagagcgccccgcacggcguggucuuccuccacgugacguacguccccgcccaggagaagaacuucaccaccgcccccgcgaucugccacgacgggaaggcccacuucccccgcgagggcguguucguguccaacgggacccacugguucgucacgcagcggaacuucuacgagccgcagaucaucaccaccgacaacaccuucgugagcggcaacugcgacguggucaucggcaucgugaacaacacgguguacgacccccugcagcccgagcuggacuccuucaaggaggagcucgacaaguacuucaagaaccacaccagccccgacgucgaccugggggacaucuccggcaucaacgccagcguggugaacauccagaaggagaucgaccgccugaacgaggucgccaagaaccucaacgagucccugaucgaccugcaggagcucgggaaguacgagcaguacaucaaguggccgugguacaucuggcugggcuucaucgccggccugaucgcgaucgugauggugaccaucaugcucugcugcaugaccagcugcugcuccugccugaaggggugcugcagcugcggcuccugcugcaaguucgacgaggacgacagcgagcccguccugaagggggugaagcuccacuacacgugaugacucgagcugguacugcaugcacgcaaugcuagcugccccuuucccguccuggguaccccgagucucccccgaccucgggucccagguaugcucccaccuccaccugccccacucaccaccucugcuaguuccagacaccucccaagcacgcagcaaugcagcucaaaacgcuuagccuagccacacccccacgggaaacagcagugauuaaccuuuagcaauaaacgaaaguuuaacuaagcuauacuaaccccaggguuggucaauuucgugccagccacacccuggagcuagcaaaaaaaaaaaaaaaaaaaaaaaaaaaaaaaaaaaaaaaaaaaaaaaaaaaaaaaaaaaaaaaaaaaaaaaaaaaaaaaaaaaaaaaaaaaaaaaaaaaa

SEQ ID NO: 26285 - RNA, 4273 nt, Artificial Sequence
  SARS-CoV-2/Wuhan/WIV05/2019__EPI_ISL_402128 spike protein mRNA gc (1-1273)(L18F_T20N_P26S_D138Y_R190S_K417T_E484K_N501Y_D614G_H655Y _T1027I)
agaauaaacuaguauucuucugguccccacagacucagagagaacccgccaccauguucguguuccugguccuccugccccuggugagcucccagugcgugaacuucaccaaccgcacgcagcugccgagcgccuacaccaacagcuucacccggggcgucuacuaccccgacaagguguuccgcuccagcgugcugcacuccacccaggaccucuuccugcccuucuucagcaacgucacgugguuccacgccauccacguguccgggaccaacggcaccaagcgguucgacaacccggugcugcccuucaacgacggggucuacuucgcgagcaccgagaaguccaacaucauccgcggcuggaucuucgggacgacccucgacagcaagacccagucccugcugaucgugaacaacgccaccaacguggucaucaaggugugcgaguuccaguucugcaacuaccccuuccucggcguguacuaccacaagaacaacaagagcuggauggaguccgaguuccgggucuacagcuccgccaacaacugcacguucgaguacgugagccagcccuuccugauggaccuggagggcaagcaggggaacuucaagaaccucagcgaguucguguucaagaacaucgacggcuacuucaagaucuacuccaagcacaccccgaucaaccugguccgggaccugccccagggguucagcgcccucgagccccugguggaccugcccaucggcaucaacaucacccgcuuccagacccuccuggcccugcaccgguccuaccucacgccgggggacagcagcuccggcuggaccgcgggcgccgccgccuacuacgugggguaccugcagccccgcaccuuccugcucaaguacaacgagaacggcaccaucacggacgcggucgacugcgcccuggacccccugagcgagaccaagugcacccucaaguccuucaccguggagaaggggaucuaccagacgagcaacuuccgggugcagcccaccgaguccaucguccgcuucccgaacaucaccaaccugugccccuucggcgagguguucaacgccacccgguucgccagcgucuacgccuggaaccgcaagcggaucuccaacugcguggcggacuacagcgugcuguacaacuccgccagcuucuccacguucaagugcuacggcgucagccccaccaagcucaacgaccugugcuucaccaacguguacgccgacuccuucgugauccgcggggacgagguccggcagaucgcccccggccagaccgggaccaucgccgacuacaacuacaagcugccggacgacuucacgggcugcgugaucgcguggaacagcaacaaccucgacuccaaggucgggggcaacuacaacuaccuguaccgccuguuccgcaagagcaaccucaagcccuucgagcgggacaucuccaccgagaucuaccaggccggcagcacccccugcaacggggugaagggcuucaacugcuacuucccccugcaguccuacggguuccagccgaccuacggcgugggguaccagcccuaccggguggucgugcugagcuucgagcuccugcacgcccccgccacggugugcggccccaagaaguccaccaaccuggucaagaacaagugcgugaacuucaacuucaacggccucaccgggaccggcgugcugaccgagagcaacaagaaguuccugccguuccagcaguucgggcgcgacaucgccgacacgaccgacgcgguccgcgacccccagacccuggagauccucgacaucacccccugcagcuucggcgggguguccgugaucacgccgggcaccaacaccagcaaccaggucgccgugcuguaccagggcgugaacugcaccgagguccccguggccauccacgccgaccagcugacgcccaccuggcggguguacuccaccggcagcaacgucuuccagacccgcgccgggugccucaucggcgcggaguacgugaacaacuccuacgagugcgacauccccaucggggccggcaucugcgccagcuaccagacgcagaccaacuccccgcggcgcgcccggagcguggcgucccagagcaucaucgccuacaccaugucccugggcgccgagaacagcgucgccuacuccaacaacagcaucgccauccccaccaacuucacgaucuccgugaccaccgagauccugcccgugagcaugaccaagacgagcgucgacugcaccauguacaucugcggggacuccaccgagugcagcaaccuccugcugcaguacggcuccuucugcacccagcucaaccgcgcgcugacggggaucgccguggagcaggacaagaacacccaggagguguucgcccaggucaagcagaucuacaagacgcccccgaucaaggacuucggcggguucaacuucagccagauccugcccgaccccuccaagcccagcaagcgguccuucaucgaggaccuccuguucaacaaggugacccuggccgacgccggcuucaucaagcaguacggcgacugccucggggacaucgcggcccgcgaccugaucugcgcccagaaguucaacggccugaccgugcucccgccccugcugaccgacgagaugaucgcccaguacaccagcgcccuccuggcggggaccaucacguccggcuggaccuucggggccggcgccgcccugcagauccccuucgcgaugcagauggccuaccgguucaacggcaucggggucacccagaacgugcucuacgagaaccagaagcugaucgccaaccaguucaacagcgccaucggcaagauccaggacucccugagcuccaccgccagcgcgcucgggaagcugcaggacguggucaaccagaacgcccaggcccugaacacgcucgugaagcagcuguccagcaacuucggcgccaucuccagcgugcugaacgacauccucucccgccuggacaaggucgaggccgaggugcagaucgaccggcugaucaccgggcgccuccagagccugcagaccuacgugacccagcagcugauccgggcggccgagauccgcgccagcgccaaccucgccgcgaucaagauguccgagugcguccugggccagagcaagcggguggacuucugcggcaagggguaccaccugauguccuucccccagagcgccccgcacggcguggucuuccuccacgugacguacguccccgcccaggagaagaacuucaccaccgcccccgcgaucugccacgacgggaaggcccacuucccccgcgagggcguguucguguccaacgggacccacugguucgucacgcagcggaacuucuacgagccgcagaucaucaccaccgacaacaccuucgugagcggcaacugcgacguggucaucggcaucgugaacaacacgguguacgacccccugcagcccgagcuggacuccuucaaggaggagcucgacaaguacuucaagaaccacaccagccccgacgucgaccugggggacaucuccggcaucaacgccagcguggugaacauccagaaggagaucgaccgccugaacgaggucgccaagaaccucaacgagucccugaucgaccugcaggagcucgggaaguacgagcaguacaucaaguggccgugguacaucuggcugggcuucaucgccggccugaucgcgaucgugauggugaccaucaugcucugcugcaugaccagcugcugcuccugccugaaggggugcugcagcugcggcuccugcugcaaguucgacgaggacgacagcgagcccguccugaagggggugaagcuccacuacacgugaugacucgagcugguacugcaugcacgcaaugcuagcugccccuuucccguccuggguaccccgagucucccccgaccucgggucccagguaugcucccaccuccaccugccccacucaccaccucugcuaguuccagacaccucccaagcacgcagcaaugcagcucaaaacgcuuagccuagccacacccccacgggaaacagcagugauuaaccuuuagcaauaaacgaaaguuuaacuaagcuauacuaaccccaggguuggucaauuucgugccagccacacccuggagcuagcaaaaaaaaaaaaaaaaaaaaaaaaaaaaaaaaaaaaaaaaaaaaaaaaaaaaaaaaaaaaaaaaaaaaaaaaaaaaaaaaaaaaaaaaaaaaaaaaaaaa

SEQ ID NO: 26286 - RNA, 4273 nt, Artificial Sequence
  SARS-CoV-2/Wuhan/WIV05/2019__EPI_ISL_402128 spike protein mRNA gc (1-1273)(S13I_W152C_L452R_D614G)
agaauaaacuaguauucuucugguccccacagacucagagagaacccgccaccauguucguguuccugguccuccugccccuggugagcauccagugcgugaaccucaccacccgcacgcagcugccgcccgccuacaccaacagcuucacccggggcgucuacuaccccgacaagguguuccgcuccagcgugcugcacuccacccaggaccucuuccugcccuucuucagcaacgucacgugguuccacgccauccacguguccgggaccaacggcaccaagcgguucgacaacccggugcugcccuucaacgacggggucuacuucgcgagcaccgagaaguccaacaucauccgcggcuggaucuucgggacgacccucgacagcaagacccagucccugcugaucgugaacaacgccaccaacguggucaucaaggugugcgaguuccaguucugcaacgaccccuuccucggcguguacuaccacaagaacaacaagagcugcauggaguccgaguuccgggucuacagcuccgccaacaacugcacguucgaguacgugagccagcccuuccugauggaccuggagggcaagcaggggaacuucaagaaccuccgcgaguucguguucaagaacaucgacggcuacuucaagaucuacuccaagcacaccccgaucaaccugguccgggaccugccccagggguucagcgcccucgagccccugguggaccugcccaucggcaucaacaucacccgcuuccagacccuccuggcccugcaccgguccuaccucacgccgggggacagcagcuccggcuggaccgcgggcgccgccgccuacuacgugggguaccugcagccccgcaccuuccugcucaaguacaacgagaacggcaccaucacggacgcggucgacugcgcccuggacccccugagcgagaccaagugcacccucaaguccuucaccguggagaaggggaucuaccagacgagcaacuuccgggugcagcccaccgaguccaucguccgcuucccgaacaucaccaaccugugccccuucggcgagguguucaacgccacccgguucgccagcgucuacgccuggaaccgcaagcggaucuccaacugcguggcggacuacagcgugcuguacaacuccgccagcuucuccacguucaagugcuacggcgucagccccaccaagcucaacgaccugugcuucaccaacguguacgccgacuccuucgugauccgcggggacgagguccggcagaucgcccccggccagaccgggaagaucgccgacuacaacuacaagcugccggacgacuucacgggcugcgugaucgcguggaacagcaacaaccucgacuccaaggucgggggcaacuacaacuaccgcuaccgccuguuccgcaagagcaaccucaagcccuucgagcgggacaucuccaccgagaucuaccaggccggcagcacccccugcaacgggguggagggcuucaacugcuacuucccccugcaguccuacggguuccagccgaccaacggcgugggguaccagcccuaccggguggucgugcugagcuucgagcuccugcacgcccccgccacggugugcggccccaagaaguccaccaaccuggucaagaacaagugcgugaacuucaacuucaacggccucaccgggaccggcgugcugaccgagagcaacaagaaguuccugccguuccagcaguucgggcgcgacaucgccgacacgaccgacgcgguccgcgacccccagacccuggagauccucgacaucacccccugcagcuucggcgggguguccgugaucacgccgggcaccaacaccagcaaccaggucgccgugcuguaccagggcgugaacugcaccgagguccccguggccauccacgccgaccagcugacgcccaccuggcggguguacuccaccggcagcaacgucuuccagacccgcgccgggugccucaucggcgcggagcacgugaacaacuccuacgagugcgacauccccaucggggccggcaucugcgccagcuaccagacgcagaccaacuccccgcggcgcgcccggagcguggcgucccagagcaucaucgccuacaccaugucccugggcgccgagaacagcgucgccuacuccaacaacagcaucgccauccccaccaacuucacgaucuccgugaccaccgagauccugcccgugagcaugaccaagacgagcgucgacugcaccauguacaucugcggggacuccaccgagugcagcaaccuccugcugcaguacggcuccuucugcacccagcucaaccgcgcgcugacggggaucgccguggagcaggacaagaacacccaggagguguucgcccaggucaagcagaucuacaagacgcccccgaucaaggacuucggcggguucaacuucagccagauccugcccgaccccuccaagcccagcaagcgguccuucaucgaggaccuccuguucaacaaggugacccuggccgacgccggcuucaucaagcaguacggcgacugccucggggacaucgcggcccgcgaccugaucugcgcccagaaguucaacggccugaccgugcucccgccccugcugaccgacgagaugaucgcccaguacaccagcgcccuccuggcggggaccaucacguccggcuggaccuucggggccggcgccgcccugcagauccccuucgcgaugcagauggccuaccgguucaacggcaucggggucacccagaacgugcucuacgagaaccagaagcugaucgccaaccaguucaacagcgccaucggcaagauccaggacucccugagcuccaccgccagcgcgcucgggaagcugcaggacguggucaaccagaacgcccaggcccugaacacgcucgugaagcagcuguccagcaacuucggcgccaucuccagcgugcugaacgacauccucucccgccuggacaaggucgaggccgaggugcagaucgaccggcugaucaccgggcgccuccagagccugcagaccuacgugacccagcagcugauccgggcggccgagauccgcgccagcgccaaccucgccgcgaccaagauguccgagugcguccugggccagagcaagcggguggacuucugcggcaagggguaccaccugauguccuucccccagagcgccccgcacggcguggucuuccuccacgugacguacguccccgcccaggagaagaacuucaccaccgcccccgcgaucugccacgacgggaaggcccacuucccccgcgagggcguguucguguccaacgggacccacugguucgucacgcagcggaacuucuacgagccgcagaucaucaccaccgacaacaccuucgugagcggcaacugcgacguggucaucggcaucgugaacaacacgguguacgacccccugcagcccgagcuggacuccuucaaggaggagcucgacaaguacuucaagaaccacaccagccccgacgucgaccugggggacaucuccggcaucaacgccagcguggugaacauccagaaggagaucgaccgccugaacgaggucgccaagaaccucaacgagucccugaucgaccugcaggagcucgggaaguacgagcaguacaucaaguggccgugguacaucuggcugggcuucaucgccggccugaucgcgaucgugauggugaccaucaugcucugcugcaugaccagcugcugcuccugccugaaggggugcugcagcugcggcuccugcugcaaguucgacgaggacgacagcgagcccguccugaagggggugaagcuccacuacacgugaugacucgagcugguacugcaugcacgcaaugcuagcugccccuuucccguccuggguaccccgagucucccccgaccucgggucccagguaugcucccaccuccaccugccccacucaccaccucugcuaguuccagacaccucccaagcacgcagcaaugcagcucaaaacgcuuagccuagccacacccccacgggaaacagcagugauuaaccuuuagcaauaaacgaaaguuuaacuaagcuauacuaaccccaggguuggucaauuucgugccagccacacccuggagcuagcaaaaaaaaaaaaaaaaaaaaaaaaaaaaaaaaaaaaaaaaaaaaaaaaaaaaaaaaaaaaaaaaaaaaaaaaaaaaaaaaaaaaaaaaaaaaaaaaaaaa

SEQ ID NO: 26287 - RNA, 4273 nt, Artificial Sequence; identical to SEQ ID NO: 26269
  SARS-CoV-2/Wuhan/WIV05/2019__EPI_ISL_402128 spike protein mRNA gc (1-1273)

SEQ ID NO: 26288 - RNA, 4273 nt, Artificial Sequence
  SARS-CoV-2/Wuhan/WIV05/2019__EPI_ISL_402128 spike protein mRNA gc (1-1273)(D614G)
agaauaaacuaguauucuucugguccccacagacucagagagaacccgccaccauguucguguuccugguccuccugccccuggugagcucccagugcgugaaccucaccacccgcacgcagcugccgcccgccuacaccaacagcuucacccggggcgucuacuaccccgacaagguguuccgcuccagcgugcugcacuccacccaggaccucuuccugcccuucuucagcaacgucacgugguuccacgccauccacguguccgggaccaacggcaccaagcgguucgacaacccggugcugcccuucaacgacggggucuacuucgcgagcaccgagaaguccaacaucauccgcggcuggaucuucgggacgacccucgacagcaagacccagucccugcugaucgugaacaacgccaccaacguggucaucaaggugugcgaguuccaguucugcaacgaccccuuccucggcguguacuaccacaagaacaacaagagcuggauggaguccgaguuccgggucuacagcuccgccaacaacugcacguucgaguacgugagccagcccuuccugauggaccuggagggcaagcaggggaacuucaagaaccuccgcgaguucguguucaagaacaucgacggcuacuucaagaucuacuccaagcacaccccgaucaaccugguccgggaccugccccagggguucagcgcccucgagccccugguggaccugcccaucggcaucaacaucacccgcuuccagacccuccuggcccugcaccgguccuaccucacgccgggggacagcagcuccggcuggaccgcgggcgccgccgccuacuacgugggguaccugcagccccgcaccuuccugcucaaguacaacgagaacggcaccaucacggacgcggucgacugcgcccuggacccccugagcgagaccaagugcacccucaaguccuucaccguggagaaggggaucuaccagacgagcaacuuccgggugcagcccaccgaguccaucguccgcuucccgaacaucaccaaccugugccccuucggcgagguguucaacgccacccgguucgccagcgucuacgccuggaaccgcaagcggaucuccaacugcguggcggacuacagcgugcuguacaacuccgccagcuucuccacguucaagugcuacggcgucagccccaccaagcucaacgaccugugcuucaccaacguguacgccgacuccuucgugauccgcggggacgagguccggcagaucgcccccggccagaccgggaagaucgccgacuacaacuacaagcugccggacgacuucacgggcugcgugaucgcguggaacagcaacaaccucgacuccaaggucgggggcaacuacaacuaccuguaccgccuguuccgcaagagcaaccucaagcccuucgagcgggacaucuccaccgagaucuaccaggccggcagcacccccugcaacgggguggagggcuucaacugcuacuucccccugcaguccuacggguuccagccgaccaacggcgugggguaccagcccuaccggguggucgugcugagcuucgagcuccugcacgcccccgccacggugugcggccccaagaaguccaccaaccuggucaagaacaagugcgugaacuucaacuucaacggccucaccgggaccggcgugcugaccgagagcaacaagaaguuccugccguuccagcaguucgggcgcgacaucgccgacacgaccgacgcgguccgcgacccccagacccuggagauccucgacaucacccccugcagcuucggcgggguguccgugaucacgccgggcaccaacaccagcaaccaggucgccgugcuguaccagggcgugaacugcaccgagguccccguggccauccacgccgaccagcugacgcccaccuggcggguguacuccaccgggagcaacgucuuccagacccgcgccggcugccucaucggggcggagcacgugaacaacuccuacgagugcgacauccccaucggcgccggcaucugcgccagcuaccagacgcagaccaacuccccgcggcgcgcccggagcguggcgucccagagcaucaucgccuacaccaugucccugggggccgagaacagcgucgccuacuccaacaacagcaucgccauccccaccaacuucacgaucuccgugaccaccgagauccugcccgugagcaugaccaagacgagcgucgacugcaccauguacaucugcggcgacuccaccgagugcagcaaccuccugcugcaguacggguccuucugcacccagcucaaccgcgcgcugacgggcaucgccguggagcaggacaagaacacccaggagguguucgcccaggucaagcagaucuacaagacgcccccgaucaaggacuucgggggcuucaacuucagccagauccugcccgaccccuccaagcccagcaagcgguccuucaucgaggaccuccuguucaacaaggugacccuggccgacgccggcuucaucaagcaguacggggacugccucggcgacaucgcggcccgcgaccugaucugcgcccagaaguucaacgggcugaccgugcucccgccccugcugaccgacgagaugaucgcccaguacaccagcgcccuccuggcgggcaccaucacguccggguggaccuucggcgccggcgccgcccugcagauccccuucgcgaugcagauggccuaccgguucaacgggaucggcgucacccagaacgugcucuacgagaaccagaagcugaucgccaaccaguucaacagcgccaucgggaagauccaggacucccugagcuccaccgccagcgcgcucggcaagcugcaggacguggucaaccagaacgcccaggcccugaacacgcucgugaagcagcuguccagcaacuucggggccaucuccagcgugcugaacgacauccucucccgccuggacaaggucgaggccgaggugcagaucgaccggcugaucaccggccgccuccagagccugcagaccuacgugacccagcagcugauccgggcggccgagauccgcgccagcgccaaccucgccgcgaccaagauguccgagugcguccugggccagagcaagcggguggacuucugcgggaagggcuaccaccugauguccuucccccagagcgccccgcacgggguggucuuccuccacgugacguacguccccgcccaggagaagaacuucaccaccgcccccgcgaucugccacgacggcaaggcccacuucccccgcgaggggguguucguguccaacggcacccacugguucgucacgcagcggaacuucuacgagccgcagaucaucaccaccgacaacaccuucgugagcggcaacugcgacguggucaucgggaucgugaacaacacgguguacgacccccugcagcccgagcuggacuccuucaaggaggagcucgacaaguacuucaagaaccacaccagccccgacgucgaccugggcgacaucuccgggaucaacgccagcguggugaacauccagaaggagaucgaccgccugaacgaggucgccaagaaccucaacgagucccugaucgaccugcaggagcucggcaaguacgagcaguacaucaaguggccgugguacaucuggcugggcuucaucgccgggcugaucgcgaucgugauggugaccaucaugcucugcugcaugaccagcugcugcuccugccugaagggcugcugcagcugcggguccugcugcaaguucgacgaggacgacagcgagcccguccugaagggcgugaagcuccacuacacgugaugacucgagcugguacugcaugcacgcaaugcuagcugccccuuucccguccuggguaccccgagucucccccgaccucgggucccagguaugcucccaccuccaccugccccacucaccaccucugcuaguuccagacaccucccaagcacgcagcaaugcagcucaaaacgcuuagccuagccacacccccacgggaaacagcagugauuaaccuuuagcaauaaacgaaaguuuaacuaagcuauacuaaccccaggguuggucaauuucgugccagccacacccuggagcuagcaaaaaaaaaaaaaaaaaaaaaaaaaaaaaaaaaaaaaaaaaaaaaaaaaaaaaaaaaaaaaaaaaaaaaaaaaaaaaaaaaaaaaaaaaaaaaaaaaaaa

SEQ ID NO: 26289 - RNA, 4273 nt, Artificial Sequence
  SARS-CoV-2/Wuhan/WIV05/2019__EPI_ISL_402128 spike protein mRNA gc (1-1273)(A222V_D614G)
agaauaaacuaguauucuucugguccccacagacucagagagaacccgccaccauguucguguuccugguccuccugccccuggugagcucccagugcgugaaccucaccacccgcacgcagcugccgcccgccuacaccaacagcuucacccggggcgucuacuaccccgacaagguguuccgcuccagcgugcugcacuccacccaggaccucuuccugcccuucuucagcaacgucacgugguuccacgccauccacguguccgggaccaacggcaccaagcgguucgacaacccggugcugcccuucaacgacggggucuacuucgcgagcaccgagaaguccaacaucauccgcggcuggaucuucgggacgacccucgacagcaagacccagucccugcugaucgugaacaacgccaccaacguggucaucaaggugugcgaguuccaguucugcaacgaccccuuccucggcguguacuaccacaagaacaacaagagcuggauggaguccgaguuccgggucuacagcuccgccaacaacugcacguucgaguacgugagccagcccuuccugauggaccuggagggcaagcaggggaacuucaagaaccuccgcgaguucguguucaagaacaucgacggcuacuucaagaucuacuccaagcacaccccgaucaaccugguccgggaccugccccagggguucagcgugcucgagccccugguggaccugcccaucggcaucaacaucacccgcuuccagacccuccuggcccugcaccgguccuaccucacgccgggggacagcagcuccggcuggaccgccggcgcggccgccuacuacgucggguaccugcagccccgcaccuuccugcucaaguacaacgagaacggcaccaucacggacgccguggacugcgcgcuggacccccugagcgagaccaagugcacccucaaguccuucaccguggagaaggggaucuaccagacgagcaacuuccggguccagcccaccgaguccaucgugcgcuucccgaacaucaccaaccugugccccuucggcgaggucuucaacgccacccgguucgccagcguguacgccuggaaccgcaagcggaucuccaacugcguggccgacuacagcguccuguacaacuccgcgagcuucuccacguucaagugcuacggcgugagccccaccaagcucaacgaccugugcuucaccaacguguacgccgacuccuucgucauccgcggggacgaggugcggcagaucgcccccggccagaccgggaagaucgccgacuacaacuacaagcugccggacgacuucacgggcugcgugaucgccuggaacagcaacaaccucgacuccaaggucgggggcaacuacaacuaccuguaccgccuguuccgcaagagcaaccucaagcccuucgagcgggacaucuccaccgagaucuaccaggcgggcagcacccccugcaacgggguggagggcuucaacugcuacuucccccugcaguccuacggguuccagccgaccaacggcgugggguaccagcccuaccgggucguggugcugagcuucgagcuccugcacgcccccgccacggucugcggccccaagaaguccaccaaccuggugaagaacaagugcgugaacuucaacuucaacggccucaccgggaccggcguccugaccgagagcaacaagaaguuccugccguuccagcaguucgggcgcgacaucgccgacacgaccgacgccgugcgcgacccccagacccuggagauccucgacaucacccccugcagcuucggcgggguguccgucaucacgccgggcaccaacaccagcaaccagguggcggugcuguaccagggcgucaacugcaccgaggugcccguggccauccacgccgaccagcugacgcccaccuggcgggucuacuccaccgggagcaacguguuccagacccgcgccggcugccucaucggggccgagcacgugaacaacuccuacgagugcgacauccccaucggcgcgggcaucugcgccagcuaccagacgcagaccaacuccccgcggcgcgcccggagcgucgccucccagagcaucaucgcguacaccaugucccugggggccgagaacagcguggccuacuccaacaacagcaucgccauccccaccaacuucacgaucuccgugaccaccgagauccugcccgucagcaugaccaagacgagcguggacugcaccauguacaucugcggcgacuccaccgagugcagcaaccuccugcugcaguacggguccuucugcacccagcucaaccgcgcccugacgggcaucgcgguggagcaggacaagaacacccaggaggucuucgcccaggugaagcagaucuacaagacgcccccgaucaaggacuucgggggcuucaacuucagccagauccugcccgaccccuccaagcccagcaagcgguccuucaucgaggaccuccuguucaacaaggugacccuggccgacgccggcuucaucaagcaguacggggacugccucggcgacaucgccgcgcgcgaccugaucugcgcccagaaguucaacgggcugaccguccucccgccccugcugaccgacgagaugaucgcccaguacaccagcgcccuccuggccggcaccaucacguccggguggaccuucggcgcgggcgccgcccugcagauccccuucgccaugcagauggcguaccgguucaacgggaucggcgugacccagaacgugcucuacgagaaccagaagcugaucgccaaccaguucaacagcgccaucgggaagauccaggacucccugagcuccaccgccagcgcccucggcaagcugcaggacgucgugaaccagaacgcgcaggcccugaacacgcucgugaagcagcuguccagcaacuucggggccaucuccagcguccugaacgacauccucucccgccuggacaagguggaggccgaggugcagaucgaccggcugaucaccggccgccuccagagccugcagaccuacgucacccagcagcugauccgggccgcggagauccgcgccagcgccaaccucgccgccaccaagauguccgagugcgugcugggccagagcaagcggguggacuucugcgggaagggcuaccaccugauguccuucccccagagcgcgccgcacggggucguguuccuccacgucacguacgugcccgcccaggagaagaacuucaccaccgcccccgccaucugccacgacggcaaggcgcacuucccccgcgaggggguguucgucuccaacggcacccacugguucgugacgcagcggaacuucuacgagccgcagaucaucaccaccgacaacaccuucgugagcggcaacugcgacgucgugaucgggaucgugaacaacacggucuacgacccccugcagcccgagcuggacuccuucaaggaggagcucgacaaguacuucaagaaccacaccagccccgacguggaccugggcgacaucuccgggaucaacgccagcguggucaacauccagaaggagaucgaccgccugaacgagguggccaagaaccucaacgagucccugaucgaccugcaggagcucggcaaguacgagcaguacaucaaguggccgugguacaucuggcugggcuucaucgccgggcugaucgccaucgugauggucaccaucaugcucugcugcaugaccagcugcugcuccugccugaagggcugcugcagcugcggguccugcugcaaguucgacgaggacgacagcgagcccgugcugaagggcgugaagcuccacuacacgugaugacucgagcugguacugcaugcacgcaaugcuagcugccccuuucccguccuggguaccccgagucucccccgaccucgggucccagguaugcucccaccuccaccugccccacucaccaccucugcuaguuccagacaccucccaagcacgcagcaaugcagcucaaaacgcuuagccuagccacacccccacgggaaacagcagugauuaaccuuuagcaauaaacgaaaguuuaacuaagcuauacuaaccccaggguuggucaauuucgugccagccacacccuggagcuagcaaaaaaaaaaaaaaaaaaaaaaaaaaaaaaaaaaaaaaaaaaaaaaaaaaaaaaaaaaaaaaaaaaaaaaaaaaaaaaaaaaaaaaaaaaaaaaaaaaaa

SEQ ID NO: 26290 - RNA, 4273 nt, Artificial Sequence
  SARS-CoV-2/Wuhan/WIV05/2019__EPI_ISL_402128 spike protein mRNA gc (1-1273)(N439K_D614G)
agaauaaacuaguauucuucugguccccacagacucagagagaacccgccaccauguucguguuccugguccuccugccccuggugagcucccagugcgugaaccucaccacccgcacgcagcugccgcccgccuacaccaacagcuucacccggggcgucuacuaccccgacaagguguuccgcuccagcgugcugcacuccacccaggaccucuuccugcccuucuucagcaacgucacgugguuccacgccauccacguguccgggaccaacggcaccaagcgguucgacaacccggugcugcccuucaacgacggggucuacuucgcgagcaccgagaaguccaacaucauccgcggcuggaucuucgggacgacccucgacagcaagacccagucccugcugaucgugaacaacgccaccaacguggucaucaaggugugcgaguuccaguucugcaacgaccccuuccucggcguguacuaccacaagaacaacaagagcuggauggaguccgaguuccgggucuacagcuccgccaacaacugcacguucgaguacgugagccagcccuuccugauggaccuggagggcaagcaggggaacuucaagaaccuccgcgaguucguguucaagaacaucgacggcuacuucaagaucuacuccaagcacaccccgaucaaccugguccgggaccugccccagggguucagcgcccucgagccccugguggaccugcccaucggcaucaacaucacccgcuuccagacccuccuggcccugcaccgguccuaccucacgccgggggacagcagcuccggcuggaccgcgggcgccgccgccuacuacgugggguaccugcagccccgcaccuuccugcucaaguacaacgagaacggcaccaucacggacgcggucgacugcgcccuggacccccugagcgagaccaagugcacccucaaguccuucaccguggagaaggggaucuaccagacgagcaacuuccgggugcagcccaccgaguccaucguccgcuucccgaacaucaccaaccugugccccuucggcgagguguucaacgccacccgguucgccagcgucuacgccuggaaccgcaagcggaucuccaacugcguggcggacuacagcgugcuguacaacuccgccagcuucuccacguucaagugcuacggcgucagccccaccaagcucaacgaccugugcuucaccaacguguacgccgacuccuucgugauccgcggggacgagguccggcagaucgcccccggccagaccgggaagaucgccgacuacaacuacaagcugccggacgacuucacgggcugcgugaucgcguggaacagcaagaaccucgacuccaaggucgggggcaacuacaacuaccuguaccgccuguuccgcaagagcaaccucaagcccuucgagcgggacaucuccaccgagaucuaccaggccggcagcacccccugcaacgggguggagggcuucaacugcuacuucccccugcaguccuacggguuccagccgaccaacggcgugggguaccagcccuaccggguggucgugcugagcuucgagcuccugcacgcccccgccacggugugcggccccaagaaguccaccaaccuggucaagaacaagugcgugaacuucaacuucaacggccucaccgggaccggcgugcugaccgagagcaacaagaaguuccugccguuccagcaguucgggcgcgacaucgccgacacgaccgacgcgguccgcgacccccagacccuggagauccucgacaucacccccugcagcuucggcgggguguccgugaucacgccgggcaccaacaccagcaaccaggucgccgugcuguaccagggcgugaacugcaccgagguccccguggccauccacgccgaccagcugacgcccaccuggcggguguacuccaccgggagcaacgucuuccagacccgcgccggcugccucaucggggcggagcacgugaacaacuccuacgagugcgacauccccaucggcgccggcaucugcgccagcuaccagacgcagaccaacuccccgcggcgcgcccggagcguggcgucccagagcaucaucgccuacaccaugucccugggggccgagaacagcgucgccuacuccaacaacagcaucgccauccccaccaacuucacgaucuccgugaccaccgagauccugcccgugagcaugaccaagacgagcgucgacugcaccauguacaucugcggcgacuccaccgagugcagcaaccuccugcugcaguacggguccuucugcacccagcucaaccgcgcgcugacgggcaucgccguggagcaggacaagaacacccaggagguguucgcccaggucaagcagaucuacaagacgcccccgaucaaggacuucgggggcuucaacuucagccagauccugcccgaccccuccaagcccagcaagcgguccuucaucgaggaccuccuguucaacaaggugacccuggccgacgccggcuucaucaagcaguacggggacugccucggcgacaucgcggcccgcgaccugaucugcgcccagaaguucaacgggcugaccgugcucccgccccugcugaccgacgagaugaucgcccaguacaccagcgcccuccuggcgggcaccaucacguccggguggaccuucggcgccggcgccgcccugcagauccccuucgcgaugcagauggccuaccgguucaacgggaucggcgucacccagaacgugcucuacgagaaccagaagcugaucgccaaccaguucaacagcgccaucgggaagauccaggacucccugagcuccaccgccagcgcgcucggcaagcugcaggacguggucaaccagaacgcccaggcccugaacacgcucgugaagcagcuguccagcaacuucggggccaucuccagcgugcugaacgacauccucucccgccuggacaaggucgaggccgaggugcagaucgaccggcugaucaccggccgccuccagagccugcagaccuacgugacccagcagcugauccgggcggccgagauccgcgccagcgccaaccucgccgcgaccaagauguccgagugcguccugggccagagcaagcggguggacuucugcgggaagggcuaccaccugauguccuucccccagagcgccccgcacgggguggucuuccuccacgugacguacguccccgcccaggagaagaacuucaccaccgcccccgcgaucugccacgacggcaaggcccacuucccccgcgaggggguguucguguccaacggcacccacugguucgucacgcagcggaacuucuacgagccgcagaucaucaccaccgacaacaccuucgugagcggcaacugcgacguggucaucgggaucgugaacaacacgguguacgacccccugcagcccgagcuggacuccuucaaggaggagcucgacaaguacuucaagaaccacaccagccccgacgucgaccugggcgacaucuccgggaucaacgccagcguggugaacauccagaaggagaucgaccgccugaacgaggucgccaagaaccucaacgagucccugaucgaccugcaggagcucggcaaguacgagcaguacaucaaguggccgugguacaucuggcugggcuucaucgccgggcugaucgcgaucgugauggugaccaucaugcucugcugcaugaccagcugcugcuccugccugaagggcugcugcagcugcggguccugcugcaaguucgacgaggacgacagcgagcccguccugaagggcgugaagcuccacuacacgugaugacucgagcugguacugcaugcacgcaaugcuagcugccccuuucccguccuggguaccccgagucucccccgaccucgggucccagguaugcucccaccuccaccugccccacucaccaccucugcuaguuccagacaccucccaagcacgcagcaaugcagcucaaaacgcuuagccuagccacacccccacgggaaacagcagugauuaaccuuuagcaauaaacgaaaguuuaacuaagcuauacuaaccccaggguuggucaauuucgugccagccacacccuggagcuagcaaaaaaaaaaaaaaaaaaaaaaaaaaaaaaaaaaaaaaaaaaaaaaaaaaaaaaaaaaaaaaaaaaaaaaaaaaaaaaaaaaaaaaaaaaaaaaaaaaaa

SEQ ID NO: 26291 - RNA, 4273 nt, Artificial Sequence
  SARS-CoV-2/Wuhan/WIV05/2019__EPI_ISL_402128 spike protein mRNA gc (1-1273)(S477N_D614G)
agaauaaacuaguauucuucugguccccacagacucagagagaacccgccaccauguucguguuccugguccuccugccccuggugagcucccagugcgugaaccucaccacccgcacgcagcugccgcccgccuacaccaacagcuucacccggggcgucuacuaccccgacaagguguuccgcuccagcgugcugcacuccacccaggaccucuuccugcccuucuucagcaacgucacgugguuccacgccauccacguguccgggaccaacggcaccaagcgguucgacaacccggugcugcccuucaacgacggggucuacuucgcgagcaccgagaaguccaacaucauccgcggcuggaucuucgggacgacccucgacagcaagacccagucccugcugaucgugaacaacgccaccaacguggucaucaaggugugcgaguuccaguucugcaacgaccccuuccucggcguguacuaccacaagaacaacaagagcuggauggaguccgaguuccgggucuacagcuccgccaacaacugcacguucgaguacgugagccagcccuuccugauggaccuggagggcaagcaggggaacuucaagaaccuccgcgaguucguguucaagaacaucgacggcuacuucaagaucuacuccaagcacaccccgaucaaccugguccgggaccugccccagggguucagcgcccucgagccccugguggaccugcccaucggcaucaacaucacccgcuuccagacccuccuggcccugcaccgguccuaccucacgccgggggacagcagcuccggcuggaccgcgggcgccgccgccuacuacgugggguaccugcagccccgcaccuuccugcucaaguacaacgagaacggcaccaucacggacgcggucgacugcgcccuggacccccugagcgagaccaagugcacccucaaguccuucaccguggagaaggggaucuaccagacgagcaacuuccgggugcagcccaccgaguccaucguccgcuucccgaacaucaccaaccugugccccuucggcgagguguucaacgccacccgguucgccagcgucuacgccuggaaccgcaagcggaucuccaacugcguggcggacuacagcgugcuguacaacuccgccagcuucuccacguucaagugcuacggcgucagccccaccaagcucaacgaccugugcuucaccaacguguacgccgacuccuucgugauccgcggggacgagguccggcagaucgcccccggccagaccgggaagaucgccgacuacaacuacaagcugccggacgacuucacgggcugcgugaucgcguggaacagcaacaaccucgacuccaaggucgggggcaacuacaacuaccuguaccgccuguuccgcaagagcaaccucaagcccuucgagcgggacaucuccaccgagaucuaccaggccggcaacacccccugcaacgggguggagggcuucaacugcuacuucccccugcagagcuacggguuccagccgaccaacggcgugggguaccagcccuaccggguggucgugcuguccuucgagcuccugcacgcccccgccacggugugcggccccaagaaguccaccaaccuggucaagaacaagugcgugaacuucaacuucaacggccucaccgggaccggcgugcugaccgagagcaacaagaaguuccugccguuccagcaguucgggcgcgacaucgccgacacgaccgacgcgguccgcgacccccagacccuggagauccucgacaucacccccugcagcuucggcggggugagcgugaucacgccgggcaccaacaccuccaaccaggucgccgugcuguaccagggcgugaacugcaccgagguccccguggccauccacgccgaccagcugacgcccaccuggcggguguacagcaccggguccaacgucuuccagacccgcgccggcugccucaucggggcggagcacgugaacaacagcuacgagugcgacauccccaucggcgccggcaucugcgccuccuaccagacgcagaccaacagcccgcggcgcgcccgguccguggcgagccaguccaucaucgccuacaccaugagccugggggccgagaacuccgucgccuacagcaacaacuccaucgccauccccaccaacuucacgaucagcgugaccaccgagauccugcccguguccaugaccaagacgagcgucgacugcaccauguacaucugcggcgacagcaccgagugcuccaaccuccugcugcaguacgggagcuucugcacccagcucaaccgcgcgcugacgggcaucgccguggagcaggacaagaacacccaggagguguucgcccaggucaagcagaucuacaagacgcccccgaucaaggacuucgggggcuucaacuucucccagauccugcccgaccccagcaagcccuccaagcggagcuucaucgaggaccuccuguucaacaaggugacccuggccgacgccggcuucaucaagcaguacggggacugccucggcgacaucgcggcccgcgaccugaucugcgcccagaaguucaacgggcugaccgugcucccgccccugcugaccgacgagaugaucgcccaguacaccuccgcccuccuggcgggcaccaucacgagcggguggaccuucggcgccggcgccgcccugcagauccccuucgcgaugcagauggccuaccgguucaacgggaucggcgucacccagaacgugcucuacgagaaccagaagcugaucgccaaccaguucaacuccgccaucgggaagauccaggacagccuguccagcaccgccuccgcgcucggcaagcugcaggacguggucaaccagaacgcccaggcccugaacacgcucgugaagcagcugagcuccaacuucggggccaucagcuccgugcugaacgacauccucagccgccuggacaaggucgaggccgaggugcagaucgaccggcugaucaccggccgccuccagucccugcagaccuacgugacccagcagcugauccgggcggccgagauccgcgccagcgccaaccucgccgcgaccaagaugagcgagugcguccugggccaguccaagcggguggacuucugcgggaagggcuaccaccugaugagcuucccccaguccgccccgcacgggguggucuuccuccacgugacguacguccccgcccaggagaagaacuucaccaccgcccccgcgaucugccacgacggcaaggcccacuucccccgcgaggggguguucgugagcaacggcacccacugguucgucacgcagcggaacuucuacgagccgcagaucaucaccaccgacaacaccuucguguccggcaacugcgacguggucaucgggaucgugaacaacacgguguacgacccccugcagcccgagcuggacagcuucaaggaggagcucgacaaguacuucaagaaccacaccucccccgacgucgaccugggcgacaucagcgggaucaacgccuccguggugaacauccagaaggagaucgaccgccugaacgaggucgccaagaaccucaacgagagccugaucgaccugcaggagcucggcaaguacgagcaguacaucaaguggccgugguacaucuggcugggcuucaucgccgggcugaucgcgaucgugauggugaccaucaugcucugcugcaugaccuccugcugcagcugccugaagggcugcugcuccugcgggagcugcugcaaguucgacgaggacgacuccgagcccguccugaagggcgugaagcuccacuacacgugaugacucgagcugguacugcaugcacgcaaugcuagcugccccuuucccguccuggguaccccgagucucccccgaccucgggucccagguaugcucccaccuccaccugccccacucaccaccucugcuaguuccagacaccucccaagcacgcagcaaugcagcucaaaacgcuuagccuagccacacccccacgggaaacagcagugauuaaccuuuagcaauaaacgaaaguuuaacuaagcuauacuaaccccaggguuggucaauuucgugccagccacacccuggagcuagcaaaaaaaaaaaaaaaaaaaaaaaaaaaaaaaaaaaaaaaaaaaaaaaaaaaaaaaaaaaaaaaaaaaaaaaaaaaaaaaaaaaaaaaaaaaaaaaaaaaa

SEQ ID NO: 26292 - RNA, 4273 nt, Artificial Sequence
  SARS-CoV-2/Wuhan/WIV05/2019__EPI_ISL_402128 spike protein mRNA gc (1-1273)(N501Y_D614G)
agaauaaacuaguauucuucugguccccacagacucagagagaacccgccaccauguucguguuccugguccuccugccccuggugagcucccagugcgugaaccucaccacccgcacgcagcugccgcccgccuacaccaacagcuucacccggggcgucuacuaccccgacaagguguuccgcuccagcgugcugcacuccacccaggaccucuuccugcccuucuucagcaacgucacgugguuccacgccauccacguguccgggaccaacggcaccaagcgguucgacaacccggugcugcccuucaacgacggggucuacuucgcgagcaccgagaaguccaacaucauccgcggcuggaucuucgggacgacccucgacagcaagacccagucccugcugaucgugaacaacgccaccaacguggucaucaaggugugcgaguuccaguucugcaacgaccccuuccucggcguguacuaccacaagaacaacaagagcuggauggaguccgaguuccgggucuacagcuccgccaacaacugcacguucgaguacgugagccagcccuuccugauggaccuggagggcaagcaggggaacuucaagaaccuccgcgaguucguguucaagaacaucgacggcuacuucaagaucuacuccaagcacaccccgaucaaccugguccgggaccugccccagggguucagcgcccucgagccccugguggaccugcccaucggcaucaacaucacccgcuuccagacccuccuggcccugcaccgguccuaccucacgccgggggacagcagcuccggcuggaccgcgggcgccgccgccuacuacgugggguaccugcagccccgcaccuuccugcucaaguacaacgagaacggcaccaucacggacgcggucgacugcgcccuggacccccugagcgagaccaagugcacccucaaguccuucaccguggagaaggggaucuaccagacgagcaacuuccgggugcagcccaccgaguccaucguccgcuucccgaacaucaccaaccugugccccuucggcgagguguucaacgccacccgguucgccagcgucuacgccuggaaccgcaagcggaucuccaacugcguggcggacuacagcgugcuguacaacuccgccagcuucuccacguucaagugcuacggcgucagccccaccaagcucaacgaccugugcuucaccaacguguacgccgacuccuucgugauccgcggggacgagguccggcagaucgcccccggccagaccgggaagaucgccgacuacaacuacaagcugccggacgacuucacgggcugcgugaucgcguggaacagcaacaaccucgacuccaaggucgggggcaacuacaacuaccuguaccgccuguuccgcaagagcaaccucaagcccuucgagcgggacaucuccaccgagaucuaccaggccggcagcacccccugcaacgggguggagggcuucaacugcuacuucccccugcaguccuacggguuccagccgaccuacggcgugggguaccagcccuaccggguggucgugcugagcuucgagcuccugcacgcccccgccacggugugcggccccaagaaguccaccaaccuggucaagaacaagugcgugaacuucaacuucaacggccucaccgggaccggcgugcugaccgagagcaacaagaaguuccugccguuccagcaguucgggcgcgacaucgccgacacgaccgacgcgguccgcgacccccagacccuggagauccucgacaucacccccugcagcuucggcgggguguccgugaucacgccgggcaccaacaccagcaaccaggucgccgugcuguaccagggcgugaacugcaccgagguccccguggccauccacgccgaccagcugacgcccaccuggcggguguacuccaccgggagcaacgucuuccagacccgcgccggcugccucaucggggcggagcacgugaacaacuccuacgagugcgacauccccaucggcgccggcaucugcgccagcuaccagacgcagaccaacuccccgcggcgcgcccggagcguggcgucccagagcaucaucgccuacaccaugucccugggggccgagaacagcgucgccuacuccaacaacagcaucgccauccccaccaacuucacgaucuccgugaccaccgagauccugcccgugagcaugaccaagacgagcgucgacugcaccauguacaucugcggcgacuccaccgagugcagcaaccuccugcugcaguacggguccuucugcacccagcucaaccgcgcgcugacgggcaucgccguggagcaggacaagaacacccaggagguguucgcccaggucaagcagaucuacaagacgcccccgaucaaggacuucgggggcuucaacuucagccagauccugcccgaccccuccaagcccagcaagcgguccuucaucgaggaccuccuguucaacaaggugacccuggccgacgccggcuucaucaagcaguacggggacugccucggcgacaucgcggcccgcgaccugaucugcgcccagaaguucaacgggcugaccgugcucccgccccugcugaccgacgagaugaucgcccaguacaccagcgcccuccuggcgggcaccaucacguccggguggaccuucggcgccggcgccgcccugcagauccccuucgcgaugcagauggccuaccgguucaacgggaucggcgucacccagaacgugcucuacgagaaccagaagcugaucgccaaccaguucaacagcgccaucgggaagauccaggacucccugagcuccaccgccagcgcgcucggcaagcugcaggacguggucaaccagaacgcccaggcccugaacacgcucgugaagcagcuguccagcaacuucggggccaucuccagcgugcugaacgacauccucucccgccuggacaaggucgaggccgaggugcagaucgaccggcugaucaccggccgccuccagagccugcagaccuacgugacccagcagcugauccgggcggccgagauccgcgccagcgccaaccucgccgcgaccaagauguccgagugcguccugggccagagcaagcggguggacuucugcgggaagggcuaccaccugauguccuucccccagagcgccccgcacgggguggucuuccuccacgugacguacguccccgcccaggagaagaacuucaccaccgcccccgcgaucugccacgacggcaaggcccacuucccccgcgaggggguguucguguccaacggcacccacugguucgucacgcagcggaacuucuacgagccgcagaucaucaccaccgacaacaccuucgugagcggcaacugcgacguggucaucgggaucgugaacaacacgguguacgacccccugcagcccgagcuggacuccuucaaggaggagcucgacaaguacuucaagaaccacaccagccccgacgucgaccugggcgacaucuccgggaucaacgccagcguggugaacauccagaaggagaucgaccgccugaacgaggucgccaagaaccucaacgagucccugaucgaccugcaggagcucggcaaguacgagcaguacaucaaguggccgugguacaucuggcugggcuucaucgccgggcugaucgcgaucgugauggugaccaucaugcucugcugcaugaccagcugcugcuccugccugaagggcugcugcagcugcggguccugcugcaaguucgacgaggacgacagcgagcccguccugaagggcgugaagcuccacuacacgugaugacucgagcugguacugcaugcacgcaaugcuagcugccccuuucccguccuggguaccccgagucucccccgaccucgggucccagguaugcucccaccuccaccugccccacucaccaccucugcuaguuccagacaccucccaagcacgcagcaaugcagcucaaaacgcuuagccuagccacacccccacgggaaacagcagugauuaaccuuuagcaauaaacgaaaguuuaacuaagcuauacuaaccccaggguuggucaauuucgugccagccacacccuggagcuagcaaaaaaaaaaaaaaaaaaaaaaaaaaaaaaaaaaaaaaaaaaaaaaaaaaaaaaaaaaaaaaaaaaaaaaaaaaaaaaaaaaaaaaaaaaaaaaaaaaaa

SEQ ID NO: 26293 - RNA, 4267 nt, Artificial Sequence
  SARS-CoV-2/Wuhan/WIV05/2019__EPI_ISL_402128 spike protein mRNA gc (1-1273)(H69del_V70del_D614G)
agaauaaacuaguauucuucugguccccacagacucagagagaacccgccaccauguucguguuccugguccuccugccccuggugagcucccagugcgugaaccucaccacccgcacgcagcugccgcccgccuacaccaacagcuucacccggggcgucuacuaccccgacaagguguuccgcuccagcgugcugcacuccacccaggaccucuuccugcccuucuucagcaacgucacgugguuccacgccaucuccgggaccaacggcaccaagcgguucgacaacccggugcugcccuucaacgacgggguguacuucgcgagcaccgagaaguccaacaucauccgcggcuggaucuucgggacgacccucgacagcaagacccagucccugcugaucgucaacaacgccaccaacguggugaucaaggucugcgaguuccaguucugcaacgaccccuuccucggcguguacuaccacaagaacaacaagagcuggauggaguccgaguuccggguguacagcuccgccaacaacugcacguucgaguacgucagccagcccuuccugauggaccuggagggcaagcaggggaacuucaagaaccuccgcgaguucguguucaagaacaucgacggcuacuucaagaucuacuccaagcacaccccgaucaaccuggugcgggaccugccccagggguucagcgcccucgagccccuggucgaccugcccaucggcaucaacaucacccgcuuccagacccuccuggcccugcaccgguccuaccucacgccgggggacagcagcuccggcuggaccgcgggcgccgccgccuacuacgugggguaccugcagccccgcaccuuccugcucaaguacaacgagaacggcaccaucacggacgcgguggacugcgcccuggacccccugagcgagaccaagugcacccucaaguccuucaccgucgagaaggggaucuaccagacgagcaacuuccgggugcagcccaccgaguccaucgugcgcuucccgaacaucaccaaccugugccccuucggcgaggucuucaacgccacccgguucgccagcguguacgccuggaaccgcaagcggaucuccaacugcgucgcggacuacagcgugcuguacaacuccgccagcuucuccacguucaagugcuacggcgugagccccaccaagcucaacgaccugugcuucaccaacgucuacgccgacuccuucgugauccgcggggacgaggugcggcagaucgcccccggccagaccgggaagaucgccgacuacaacuacaagcugccggacgacuucacgggcugcgucaucgcguggaacagcaacaaccucgacuccaaggucgggggcaacuacaacuaccuguaccgccuguuccgcaagagcaaccucaagcccuucgagcgggacaucuccaccgagaucuaccaggccggcagcacccccugcaacgggguggagggcuucaacugcuacuucccccugcaguccuacggguuccagccgaccaacggcgugggguaccagcccuaccggguggugguccugagcuucgagcuccugcacgcccccgccacggugugcggccccaagaaguccaccaaccuggugaagaacaagugcgucaacuucaacuucaacggccucaccgggaccggcgugcugaccgagagcaacaagaaguuccugccguuccagcaguucgggcgcgacaucgccgacacgaccgacgcggugcgcgacccccagacccuggagauccucgacaucacccccugcagcuucggcggggucuccgugaucacgccgggcaccaacaccagcaaccagguggccguccuguaccagggcgugaacugcaccgaggugcccgucgccauccacgccgaccagcugacgcccaccuggcggguguacuccaccgggagcaacguguuccagacccgcgccggcugccucaucggggcggagcacgucaacaacuccuacgagugcgacauccccaucggcgccggcaucugcgccagcuaccagacgcagaccaacuccccgcggcgcgcccggagcguggcgucccagagcaucaucgccuacaccaugucccugggggccgagaacagcguggccuacuccaacaacagcaucgccauccccaccaacuucacgaucuccgucaccaccgagauccugcccgugagcaugaccaagacgagcguggacugcaccauguacaucugcggcgacuccaccgagugcagcaaccuccugcugcaguacggguccuucugcacccagcucaaccgcgcgcugacgggcaucgccgucgagcaggacaagaacacccaggagguguucgcccaggugaagcagaucuacaagacgcccccgaucaaggacuucgggggcuucaacuucagccagauccugcccgaccccuccaagcccagcaagcgguccuucaucgaggaccuccuguucaacaaggucacccuggccgacgccggcuucaucaagcaguacggggacugccucggcgacaucgcggcccgcgaccugaucugcgcccagaaguucaacgggcugaccgugcucccgccccugcugaccgacgagaugaucgcccaguacaccagcgcccuccuggcgggcaccaucacguccggguggaccuucggcgccggcgccgcccugcagauccccuucgcgaugcagauggccuaccgguucaacgggaucggcgugacccagaacguccucuacgagaaccagaagcugaucgccaaccaguucaacagcgccaucgggaagauccaggacucccugagcuccaccgccagcgcgcucggcaagcugcaggacguggugaaccagaacgcccaggcccugaacacgcucgucaagcagcuguccagcaacuucggggccaucuccagcgugcugaacgacauccucucccgccuggacaagguggaggccgagguccagaucgaccggcugaucaccggccgccuccagagccugcagaccuacgugacccagcagcugauccgggcggccgagauccgcgccagcgccaaccucgccgcgaccaagauguccgagugcgugcugggccagagcaagcgggucgacuucugcgggaagggcuaccaccugauguccuucccccagagcgccccgcacggggugguguuccuccacgucacguacgugcccgcccaggagaagaacuucaccaccgcccccgcgaucugccacgacggcaaggcccacuucccccgcgagggggucuucguguccaacggcacccacugguucgugacgcagcggaacuucuacgagccgcagaucaucaccaccgacaacaccuucgucagcggcaacugcgacguggugaucgggaucgucaacaacacgguguacgacccccugcagcccgagcuggacuccuucaaggaggagcucgacaaguacuucaagaaccacaccagccccgacguggaccugggcgacaucuccgggaucaacgccagcgucgugaacauccagaaggagaucgaccgccugaacgagguggccaagaaccucaacgagucccugaucgaccugcaggagcucggcaaguacgagcaguacaucaaguggccgugguacaucuggcugggcuucaucgccgggcugaucgcgaucgucauggugaccaucaugcucugcugcaugaccagcugcugcuccugccugaagggcugcugcagcugcggguccugcugcaaguucgacgaggacgacagcgagcccgugcugaagggcgucaagcuccacuacacgugaugacucgagcugguacugcaugcacgcaaugcuagcugccccuuucccguccuggguaccccgagucucccccgaccucgggucccagguaugcucccaccuccaccugccccacucaccaccucugcuaguuccagacaccucccaagcacgcagcaaugcagcucaaaacgcuuagccuagccacacccccacgggaaacagcagugauuaaccuuuagcaauaaacgaaaguuuaacuaagcuauacuaaccccaggguuggucaauuucgugccagccacacccuggagcuagcaaaaaaaaaaaaaaaaaaaaaaaaaaaaaaaaaaaaaaaaaaaaaaaaaaaaaaaaaaaaaaaaaaaaaaaaaaaaaaaaaaaaaaaaaaaaaaaaaaaa

SEQ ID NO: 26294 - RNA, 4273 nt, Artificial Sequence
  SARS-CoV-2/Wuhan/WIV05/2019__EPI_ISL_402128 spike protein mRNA gc (1-1273)(Y453F_D614G)
agaauaaacuaguauucuucugguccccacagacucagagagaacccgccaccauguucguguuccugguccuccugccccuggugagcucccagugcgugaaccucaccacccgcacgcagcugccgcccgccuacaccaacagcuucacccggggcgucuacuaccccgacaagguguuccgcuccagcgugcugcacuccacccaggaccucuuccugcccuucuucagcaacgucacgugguuccacgccauccacguguccgggaccaacggcaccaagcgguucgacaacccggugcugcccuucaacgacggggucuacuucgcgagcaccgagaaguccaacaucauccgcggcuggaucuucgggacgacccucgacagcaagacccagucccugcugaucgugaacaacgccaccaacguggucaucaaggugugcgaguuccaguucugcaacgaccccuuccucggcguguacuaccacaagaacaacaagagcuggauggaguccgaguuccgggucuacagcuccgccaacaacugcacguucgaguacgugagccagcccuuccugauggaccuggagggcaagcaggggaacuucaagaaccuccgcgaguucguguucaagaacaucgacggcuacuucaagaucuacuccaagcacaccccgaucaaccugguccgggaccugccccagggguucagcgcccucgagccccugguggaccugcccaucggcaucaacaucacccgcuuccagacccuccuggcccugcaccgguccuaccucacgccgggggacagcagcuccggcuggaccgcgggcgccgccgccuacuacgugggguaccugcagccccgcaccuuccugcucaaguacaacgagaacggcaccaucacggacgcggucgacugcgcccuggacccccugagcgagaccaagugcacccucaaguccuucaccguggagaaggggaucuaccagacgagcaacuuccgggugcagcccaccgaguccaucguccgcuucccgaacaucaccaaccugugccccuucggcgagguguucaacgccacccgguucgccagcgucuacgccuggaaccgcaagcggaucuccaacugcguggcggacuacagcgugcuguacaacuccgccagcuucuccacguucaagugcuacggcgucagccccaccaagcucaacgaccugugcuucaccaacguguacgccgacuccuucgugauccgcggggacgagguccggcagaucgcccccggccagaccgggaagaucgccgacuacaacuacaagcugccggacgacuucacgggcugcgugaucgcguggaacagcaacaaccucgacuccaaggucgggggcaacuacaacuaccuguuccgccuguuccgcaagagcaaccucaagcccuucgagcgggacaucuccaccgagaucuaccaggccggcagcacccccugcaacgggguggagggcuucaacugcuacuucccccugcaguccuacggguuccagccgaccaacggcgugggguaccagcccuaccggguggucgugcugagcuucgagcuccugcacgcccccgccacggugugcggccccaagaaguccaccaaccuggucaagaacaagugcgugaacuucaacuucaacggccucaccgggaccggcgugcugaccgagagcaacaagaaguuccugccguuccagcaguucgggcgcgacaucgccgacacgaccgacgcgguccgcgacccccagacccuggagauccucgacaucacccccugcagcuucggcgggguguccgugaucacgccgggcaccaacaccagcaaccaggucgccgugcuguaccagggcgugaacugcaccgagguccccguggccauccacgccgaccagcugacgcccaccuggcggguguacuccaccgggagcaacgucuuccagacccgcgccggcugccucaucggggcggagcacgugaacaacuccuacgagugcgacauccccaucggcgccggcaucugcgccagcuaccagacgcagaccaacuccccgcggcgcgcccggagcguggcgucccagagcaucaucgccuacaccaugucccugggggccgagaacagcgucgccuacuccaacaacagcaucgccauccccaccaacuucacgaucuccgugaccaccgagauccugcccgugagcaugaccaagacgagcgucgacugcaccauguacaucugcggcgacuccaccgagugcagcaaccuccugcugcaguacggguccuucugcacccagcucaaccgcgcgcugacgggcaucgccguggagcaggacaagaacacccaggagguguucgcccaggucaagcagaucuacaagacgcccccgaucaaggacuucgggggcuucaacuucagccagauccugcccgaccccuccaagcccagcaagcgguccuucaucgaggaccuccuguucaacaaggugacccuggccgacgccggcuucaucaagcaguacggggacugccucggcgacaucgcggcccgcgaccugaucugcgcccagaaguucaacgggcugaccgugcucccgccccugcugaccgacgagaugaucgcccaguacaccagcgcccuccuggcgggcaccaucacguccggguggaccuucggcgccggcgccgcccugcagauccccuucgcgaugcagauggccuaccgguucaacgggaucggcgucacccagaacgugcucuacgagaaccagaagcugaucgccaaccaguucaacagcgccaucgggaagauccaggacucccugagcuccaccgccagcgcgcucggcaagcugcaggacguggucaaccagaacgcccaggcccugaacacgcucgugaagcagcuguccagcaacuucggggccaucuccagcgugcugaacgacauccucucccgccuggacaaggucgaggccgaggugcagaucgaccggcugaucaccggccgccuccagagccugcagaccuacgugacccagcagcugauccgggcggccgagauccgcgccagcgccaaccucgccgcgaccaagauguccgagugcguccugggccagagcaagcggguggacuucugcgggaagggcuaccaccugauguccuucccccagagcgccccgcacgggguggucuuccuccacgugacguacguccccgcccaggagaagaacuucaccaccgcccccgcgaucugccacgacggcaaggcccacuucccccgcgaggggguguucguguccaacggcacccacugguucgucacgcagcggaacuucuacgagccgcagaucaucaccaccgacaacaccuucgugagcggcaacugcgacguggucaucgggaucgugaacaacacgguguacgacccccugcagcccgagcuggacuccuucaaggaggagcucgacaaguacuucaagaaccacaccagccccgacgucgaccugggcgacaucuccgggaucaacgccagcguggugaacauccagaaggagaucgaccgccugaacgaggucgccaagaaccucaacgagucccugaucgaccugcaggagcucggcaaguacgagcaguacaucaaguggccgugguacaucuggcugggcuucaucgccgggcugaucgcgaucgugauggugaccaucaugcucugcugcaugaccagcugcugcuccugccugaagggcugcugcagcugcggguccugcugcaaguucgacgaggacgacagcgagcccguccugaagggcgugaagcuccacuacacgugaugacucgagcugguacugcaugcacgcaaugcuagcugccccuuucccguccuggguaccccgagucucccccgaccucgggucccagguaugcucccaccuccaccugccccacucaccaccucugcuaguuccagacaccucccaagcacgcagcaaugcagcucaaaacgcuuagccuagccacacccccacgggaaacagcagugauuaaccuuuagcaauaaacgaaaguuuaacuaagcuauacuaaccccaggguuggucaauuucgugccagccacacccuggagcuagcaaaaaaaaaaaaaaaaaaaaaaaaaaaaaaaaaaaaaaaaaaaaaaaaaaaaaaaaaaaaaaaaaaaaaaaaaaaaaaaaaaaaaaaaaaaaaaaaaaaa

SEQ ID NO: 26295 - RNA, 4273 nt, Artificial Sequence
  SARS-CoV-2/Wuhan/WIV05/2019__EPI_ISL_402128 spike protein mRNA gc (1-1273)(D614G_I692V)
agaauaaacuaguauucuucugguccccacagacucagagagaacccgccaccauguucguguuccugguccuccugccccuggugagcucccagugcgugaaccucaccacccgcacgcagcugccgcccgccuacaccaacagcuucacccggggcgucuacuaccccgacaagguguuccgcuccagcgugcugcacuccacccaggaccucuuccugcccuucuucagcaacgucacgugguuccacgccauccacguguccgggaccaacggcaccaagcgguucgacaacccggugcugcccuucaacgacggggucuacuucgcgagcaccgagaaguccaacaucauccgcggcuggaucuucgggacgacccucgacagcaagacccagucccugcugaucgugaacaacgccaccaacguggucaucaaggugugcgaguuccaguucugcaacgaccccuuccucggcguguacuaccacaagaacaacaagagcuggauggaguccgaguuccgggucuacagcuccgccaacaacugcacguucgaguacgugagccagcccuuccugauggaccuggagggcaagcaggggaacuucaagaaccuccgcgaguucguguucaagaacaucgacggcuacuucaagaucuacuccaagcacaccccgaucaaccugguccgggaccugccccagggguucagcgcccucgagccccugguggaccugcccaucggcaucaacaucacccgcuuccagacccuccuggcccugcaccgguccuaccucacgccgggggacagcagcuccggcuggaccgcgggcgccgccgccuacuacgugggguaccugcagccccgcaccuuccugcucaaguacaacgagaacggcaccaucacggacgcggucgacugcgcccuggacccccugagcgagaccaagugcacccucaaguccuucaccguggagaaggggaucuaccagacgagcaacuuccgggugcagcccaccgaguccaucguccgcuucccgaacaucaccaaccugugccccuucggcgagguguucaacgccacccgguucgccagcgucuacgccuggaaccgcaagcggaucuccaacugcguggcggacuacagcgugcuguacaacuccgccagcuucuccacguucaagugcuacggcgucagccccaccaagcucaacgaccugugcuucaccaacguguacgccgacuccuucgugauccgcggggacgagguccggcagaucgcccccggccagaccgggaagaucgccgacuacaacuacaagcugccggacgacuucacgggcugcgugaucgcguggaacagcaacaaccucgacuccaaggucgggggcaacuacaacuaccuguaccgccuguuccgcaagagcaaccucaagcccuucgagcgggacaucuccaccgagaucuaccaggccggcagcacccccugcaacgggguggagggcuucaacugcuacuucccccugcaguccuacggguuccagccgaccaacggcgugggguaccagcccuaccggguggucgugcugagcuucgagcuccugcacgcccccgccacggugugcggccccaagaaguccaccaaccuggucaagaacaagugcgugaacuucaacuucaacggccucaccgggaccggcgugcugaccgagagcaacaagaaguuccugccguuccagcaguucgggcgcgacaucgccgacacgaccgacgcgguccgcgacccccagacccuggagauccucgacaucacccccugcagcuucggcgggguguccgugaucacgccgggcaccaacaccagcaaccaggucgccgugcuguaccagggcgugaacugcaccgagguccccguggccauccacgccgaccagcugacgcccaccuggcggguguacuccaccgggagcaacgucuuccagacccgcgccggcugccucaucggggcggagcacgugaacaacuccuacgagugcgacauccccaucggcgccggcaucugcgccagcuaccagacgcagaccaacuccccgcggcgcgcccggagcguggcgucccagagcgucaucgccuacaccaugucccugggggccgagaacagcguggccuacuccaacaacagcaucgccauccccaccaacuucacgaucuccgugaccaccgagauccugcccgucagcaugaccaagacgagcguggacugcaccauguacaucugcggcgacuccaccgagugcagcaaccuccugcugcaguacggguccuucugcacccagcucaaccgcgcgcugacgggcaucgccguggagcaggacaagaacacccaggaggucuucgcccaggugaagcagaucuacaagacgcccccgaucaaggacuucgggggcuucaacuucagccagauccugcccgaccccuccaagcccagcaagcgguccuucaucgaggaccuccuguucaacaaggugacccuggccgacgccggcuucaucaagcaguacggggacugccucggcgacaucgcggcccgcgaccugaucugcgcccagaaguucaacgggcugaccguccucccgccccugcugaccgacgagaugaucgcccaguacaccagcgcccuccuggcgggcaccaucacguccggguggaccuucggcgccggcgccgcccugcagauccccuucgcgaugcagauggccuaccgguucaacgggaucggcgugacccagaacgugcucuacgagaaccagaagcugaucgccaaccaguucaacagcgccaucgggaagauccaggacucccugagcuccaccgccagcgcgcucggcaagcugcaggacgucgugaaccagaacgcccaggcccugaacacgcucgugaagcagcuguccagcaacuucggggccaucuccagcguccugaacgacauccucucccgccuggacaagguggaggccgaggugcagaucgaccggcugaucaccggccgccuccagagccugcagaccuacgucacccagcagcugauccgggcggccgagauccgcgccagcgccaaccucgccgcgaccaagauguccgagugcgugcugggccagagcaagcggguggacuucugcgggaagggcuaccaccugauguccuucccccagagcgccccgcacggggucguguuccuccacgucacguacgugcccgcccaggagaagaacuucaccaccgcccccgcgaucugccacgacggcaaggcccacuucccccgcgaggggguguucgucuccaacggcacccacugguucgugacgcagcggaacuucuacgagccgcagaucaucaccaccgacaacaccuucgugagcggcaacugcgacgucgugaucgggaucgugaacaacacggucuacgacccccugcagcccgagcuggacuccuucaaggaggagcucgacaaguacuucaagaaccacaccagccccgacguggaccugggcgacaucuccgggaucaacgccagcguggucaacauccagaaggagaucgaccgccugaacgagguggccaagaaccucaacgagucccugaucgaccugcaggagcucggcaaguacgagcaguacaucaaguggccgugguacaucuggcugggcuucaucgccgggcugaucgcgaucgugauggucaccaucaugcucugcugcaugaccagcugcugcuccugccugaagggcugcugcagcugcggguccugcugcaaguucgacgaggacgacagcgagcccgugcugaagggcgugaagcuccacuacacgugaugacucgagcugguacugcaugcacgcaaugcuagcugccccuuucccguccuggguaccccgagucucccccgaccucgggucccagguaugcucccaccuccaccugccccacucaccaccucugcuaguuccagacaccucccaagcacgcagcaaugcagcucaaaacgcuuagccuagccacacccccacgggaaacagcagugauuaaccuuuagcaauaaacgaaaguuuaacuaagcuauacuaaccccaggguuggucaauuucgugccagccacacccuggagcuagcaaaaaaaaaaaaaaaaaaaaaaaaaaaaaaaaaaaaaaaaaaaaaaaaaaaaaaaaaaaaaaaaaaaaaaaaaaaaaaaaaaaaaaaaaaaaaaaaaaaa

SEQ ID NO: 26296 - RNA, 4273 nt, Artificial Sequence
  SARS-CoV-2/Wuhan/WIV05/2019__EPI_ISL_402128 spike protein mRNA gc (1-1273)(D614G_M1229I)
agaauaaacuaguauucuucugguccccacagacucagagagaacccgccaccauguucguguuccugguccuccugccccuggugagcucccagugcgugaaccucaccacccgcacgcagcugccgcccgccuacaccaacagcuucacccggggcgucuacuaccccgacaagguguuccgcuccagcgugcugcacuccacccaggaccucuuccugcccuucuucagcaacgucacgugguuccacgccauccacguguccgggaccaacggcaccaagcgguucgacaacccggugcugcccuucaacgacggggucuacuucgcgagcaccgagaaguccaacaucauccgcggcuggaucuucgggacgacccucgacagcaagacccagucccugcugaucgugaacaacgccaccaacguggucaucaaggugugcgaguuccaguucugcaacgaccccuuccucggcguguacuaccacaagaacaacaagagcuggauggaguccgaguuccgggucuacagcuccgccaacaacugcacguucgaguacgugagccagcccuuccugauggaccuggagggcaagcaggggaacuucaagaaccuccgcgaguucguguucaagaacaucgacggcuacuucaagaucuacuccaagcacaccccgaucaaccugguccgggaccugccccagggguucagcgcccucgagccccugguggaccugcccaucggcaucaacaucacccgcuuccagacccuccuggcccugcaccgguccuaccucacgccgggggacagcagcuccggcuggaccgcgggcgccgccgccuacuacgugggguaccugcagccccgcaccuuccugcucaaguacaacgagaacggcaccaucacggacgcggucgacugcgcccuggacccccugagcgagaccaagugcacccucaaguccuucaccguggagaaggggaucuaccagacgagcaacuuccgggugcagcccaccgaguccaucguccgcuucccgaacaucaccaaccugugccccuucggcgagguguucaacgccacccgguucgccagcgucuacgccuggaaccgcaagcggaucuccaacugcguggcggacuacagcgugcuguacaacuccgccagcuucuccacguucaagugcuacggcgucagccccaccaagcucaacgaccugugcuucaccaacguguacgccgacuccuucgugauccgcggggacgagguccggcagaucgcccccggccagaccgggaagaucgccgacuacaacuacaagcugccggacgacuucacgggcugcgugaucgcguggaacagcaacaaccucgacuccaaggucgggggcaacuacaacuaccuguaccgccuguuccgcaagagcaaccucaagcccuucgagcgggacaucuccaccgagaucuaccaggccggcagcacccccugcaacgggguggagggcuucaacugcuacuucccccugcaguccuacggguuccagccgaccaacggcgugggguaccagcccuaccggguggucgugcugagcuucgagcuccugcacgcccccgccacggugugcggccccaagaaguccaccaaccuggucaagaacaagugcgugaacuucaacuucaacggccucaccgggaccggcgugcugaccgagagcaacaagaaguuccugccguuccagcaguucgggcgcgacaucgccgacacgaccgacgcgguccgcgacccccagacccuggagauccucgacaucacccccugcagcuucggcgggguguccgugaucacgccgggcaccaacaccagcaaccaggucgccgugcuguaccagggcgugaacugcaccgagguccccguggccauccacgccgaccagcugacgcccaccuggcggguguacuccaccgggagcaacgucuuccagacccgcgccggcugccucaucggggcggagcacgugaacaacuccuacgagugcgacauccccaucggcgccggcaucugcgccagcuaccagacgcagaccaacuccccgcggcgcgcccggagcguggcgucccagagcaucaucgccuacaccaugucccugggggccgagaacagcgucgccuacuccaacaacagcaucgccauccccaccaacuucacgaucuccgugaccaccgagauccugcccgugagcaugaccaagacgagcgucgacugcaccauguacaucugcggcgacuccaccgagugcagcaaccuccugcugcaguacggguccuucugcacccagcucaaccgcgcgcugacgggcaucgccguggagcaggacaagaacacccaggagguguucgcccaggucaagcagaucuacaagacgcccccgaucaaggacuucgggggcuucaacuucagccagauccugcccgaccccuccaagcccagcaagcgguccuucaucgaggaccuccuguucaacaaggugacccuggccgacgccggcuucaucaagcaguacggggacugccucggcgacaucgcggcccgcgaccugaucugcgcccagaaguucaacgggcugaccgugcucccgccccugcugaccgacgagaugaucgcccaguacaccagcgcccuccuggcgggcaccaucacguccggguggaccuucggcgccggcgccgcccugcagauccccuucgcgaugcagauggccuaccgguucaacgggaucggcgucacccagaacgugcucuacgagaaccagaagcugaucgccaaccaguucaacagcgccaucgggaagauccaggacucccugagcuccaccgccagcgcgcucggcaagcugcaggacguggucaaccagaacgcccaggcccugaacacgcucgugaagcagcuguccagcaacuucggggccaucuccagcgugcugaacgacauccucucccgccuggacaaggucgaggccgaggugcagaucgaccggcugaucaccggccgccuccagagccugcagaccuacgugacccagcagcugauccgggcggccgagauccgcgccagcgccaaccucgccgcgaccaagauguccgagugcguccugggccagagcaagcggguggacuucugcgggaagggcuaccaccugauguccuucccccagagcgccccgcacgggguggucuuccuccacgugacguacguccccgcccaggagaagaacuucaccaccgcccccgcgaucugccacgacggcaaggcccacuucccccgcgaggggguguucguguccaacggcacccacugguucgucacgcagcggaacuucuacgagccgcagaucaucaccaccgacaacaccuucgugagcggcaacugcgacguggucaucgggaucgugaacaacacgguguacgacccccugcagcccgagcuggacuccuucaaggaggagcucgacaaguacuucaagaaccacaccagccccgacgucgaccugggcgacaucuccgggaucaacgccagcguggugaacauccagaaggagaucgaccgccugaacgaggucgccaagaaccucaacgagucccugaucgaccugcaggagcucggcaaguacgagcaguacaucaaguggccgugguacaucuggcugggcuucaucgccgggcugaucgcgaucgugaucgugaccaucaugcucugcugcaugaccagcugcugcuccugccugaagggcugcugcagcugcggguccugcugcaaguucgacgaggacgacagcgagcccguccugaagggcgugaagcuccacuacacgugaugacucgagcugguacugcaugcacgcaaugcuagcugccccuuucccguccuggguaccccgagucucccccgaccucgggucccagguaugcucccaccuccaccugccccacucaccaccucugcuaguuccagacaccucccaagcacgcagcaaugcagcucaaaacgcuuagccuagccacacccccacgggaaacagcagugauuaaccuuuagcaauaaacgaaaguuuaacuaagcuauacuaaccccaggguuggucaauuucgugccagccacacccuggagcuagcaaaaaaaaaaaaaaaaaaaaaaaaaaaaaaaaaaaaaaaaaaaaaaaaaaaaaaaaaaaaaaaaaaaaaaaaaaaaaaaaaaaaaaaaaaaaaaaaaaaa

SEQ ID NO: 26297 - RNA, 4267 nt, Artificial Sequence
  SARS-CoV-2/Wuhan/WIV05/2019__EPI_ISL_402128 spike protein mRNA gc (1-1273)(H69del_V70del_A222V_Y453F_S477N_D614G_I692V)
agaauaaacuaguauucuucugguccccacagacucagagagaacccgccaccauguucguguuccugguccuccugccccuggugagcucccagugcgugaaccucaccacccgcacgcagcugccgcccgccuacaccaacagcuucacccggggcgucuacuaccccgacaagguguuccgcuccagcgugcugcacuccacccaggaccucuuccugcccuucuucagcaacgucacgugguuccacgccaucuccgggaccaacggcaccaagcgguucgacaacccggugcugcccuucaacgacgggguguacuucgcgagcaccgagaaguccaacaucauccgcggcuggaucuucgggacgacccucgacagcaagacccagucccugcugaucgucaacaacgccaccaacguggugaucaaggucugcgaguuccaguucugcaacgaccccuuccucggcguguacuaccacaagaacaacaagagcuggauggaguccgaguuccggguguacagcuccgccaacaacugcacguucgaguacgucagccagcccuuccugauggaccuggagggcaagcaggggaacuucaagaaccuccgcgaguucguguucaagaacaucgacggcuacuucaagaucuacuccaagcacaccccgaucaaccuggugcgggaccugccccagggguucagcguccucgagccccugguggaccugcccaucggcaucaacaucacccgcuuccagacccuccuggcccugcaccgguccuaccucacgccgggggacagcagcuccggcuggaccgccggcgcggccgccuacuacgugggguaccugcagccccgcaccuuccugcucaaguacaacgagaacggcaccaucacggacgccgucgacugcgcgcuggacccccugagcgagaccaagugcacccucaaguccuucaccguggagaaggggaucuaccagacgagcaacuuccgggugcagcccaccgaguccaucguccgcuucccgaacaucaccaaccugugccccuucggcgagguguucaacgccacccgguucgccagcgucuacgccuggaaccgcaagcggaucuccaacugcguggccgacuacagcgugcuguacaacuccgcgagcuucuccacguucaagugcuacggcgucagccccaccaagcucaacgaccugugcuucaccaacguguacgccgacuccuucgugauccgcggggacgagguccggcagaucgcccccggccagaccgggaagaucgccgacuacaacuacaagcugccggacgacuucacgggcugcgugaucgccuggaacagcaacaaccucgacuccaaggucgggggcaacuacaacuaccuguuccgccuguuccgcaagagcaaccucaagcccuucgagcgggacaucuccaccgagaucuaccaggcgggcaacacccccugcaacgggguggagggcuucaacugcuacuucccccugcagagcuacggguuccagccgaccaacggcgugggguaccagcccuaccggguggucgugcuguccuucgagcuccugcacgcccccgccacggugugcggccccaagaaguccaccaaccuggucaagaacaagugcgugaacuucaacuucaacggccucaccgggaccggcgugcugaccgagagcaacaagaaguuccugccguuccagcaguucgggcgcgacaucgccgacacgaccgacgccguccgcgacccccagacccuggagauccucgacaucacccccugcagcuucggcggggugagcgugaucacgccgggcaccaacaccuccaaccaggucgcggugcuguaccagggcgugaacugcaccgagguccccguggccauccacgccgaccagcugacgcccaccuggcggguguacagcaccggguccaacgucuuccagacccgcgccggcugccucaucggggccgagcacgugaacaacagcuacgagugcgacauccccaucggcgcgggcaucugcgccuccuaccagacgcagaccaacagcccgcggcgcgcccgguccguggccagccaguccgucaucgcguacaccaugagccugggggccgagaacuccguggccuacagcaacaacuccaucgccauccccaccaacuucacgaucagcgugaccaccgagauccugcccgucuccaugaccaagacgagcguggacugcaccauguacaucugcggcgacagcaccgagugcuccaaccuccugcugcaguacgggagcuucugcacccagcucaaccgcgcccugacgggcaucgcgguggagcaggacaagaacacccaggaggucuucgcccaggugaagcagaucuacaagacgcccccgaucaaggacuucgggggcuucaacuucucccagauccugcccgaccccagcaagcccuccaagcggagcuucaucgaggaccuccuguucaacaaggugacccuggccgacgccggcuucaucaagcaguacggggacugccucggcgacaucgccgcgcgcgaccugaucugcgcccagaaguucaacgggcugaccguccucccgccccugcugaccgacgagaugaucgcccaguacaccuccgcccuccuggccggcaccaucacgagcggguggaccuucggcgcgggcgccgcccugcagauccccuucgccaugcagauggcguaccgguucaacgggaucggcgugacccagaacgugcucuacgagaaccagaagcugaucgccaaccaguucaacuccgccaucgggaagauccaggacagccuguccagcaccgccuccgcccucggcaagcugcaggacgucgugaaccagaacgcgcaggcccugaacacgcucgugaagcagcugagcuccaacuucggggccaucagcuccguccugaacgacauccucagccgccuggacaagguggaggccgaggugcagaucgaccggcugaucaccggccgccuccagucccugcagaccuacgucacccagcagcugauccgggccgcggagauccgcgccagcgccaaccucgccgccaccaagaugagcgagugcgugcugggccaguccaagcggguggacuucugcgggaagggcuaccaccugaugagcuucccccaguccgcgccgcacggggucguguuccuccacgucacguacgugcccgcccaggagaagaacuucaccaccgcccccgccaucugccacgacggcaaggcgcacuucccccgcgaggggguguucgucagcaacggcacccacugguucgugacgcagcggaacuucuacgagccgcagaucaucaccaccgacaacaccuucguguccggcaacugcgacgucgugaucgggaucgugaacaacacggucuacgacccccugcagcccgagcuggacagcuucaaggaggagcucgacaaguacuucaagaaccacaccucccccgacguggaccugggcgacaucagcgggaucaacgccuccguggucaacauccagaaggagaucgaccgccugaacgagguggccaagaaccucaacgagagccugaucgaccugcaggagcucggcaaguacgagcaguacaucaaguggccgugguacaucuggcugggcuucaucgccgggcugaucgccaucgugauggucaccaucaugcucugcugcaugaccuccugcugcagcugccugaagggcugcugcuccugcgggagcugcugcaaguucgacgaggacgacuccgagcccgugcugaagggcgugaagcuccacuacacgugaugacucgagcugguacugcaugcacgcaaugcuagcugccccuuucccguccuggguaccccgagucucccccgaccucgggucccagguaugcucccaccuccaccugccccacucaccaccucugcuaguuccagacaccucccaagcacgcagcaaugcagcucaaaacgcuuagccuagccacacccccacgggaaacagcagugauuaaccuuuagcaauaaacgaaaguuuaacuaagcuauacuaaccccaggguuggucaauuucgugccagccacacccuggagcuagcaaaaaaaaaaaaaaaaaaaaaaaaaaaaaaaaaaaaaaaaaaaaaaaaaaaaaaaaaaaaaaaaaaaaaaaaaaaaaaaaaaaaaaaaaaaaaaaaaaaa

SEQ ID NO: 26298 - RNA, 4267 nt, Artificial Sequence
  SARS-CoV-2/Wuhan/WIV05/2019__EPI_ISL_402128 spike protein mRNA gc (1-1273)(H69del_V70del_Y453F_D614G_I692V_M1229I)
agaauaaacuaguauucuucugguccccacagacucagagagaacccgccaccauguucguguuccugguccuccugccccuggugagcucccagugcgugaaccucaccacccgcacgcagcugccgcccgccuacaccaacagcuucacccggggcgucuacuaccccgacaagguguuccgcuccagcgugcugcacuccacccaggaccucuuccugcccuucuucagcaacgucacgugguuccacgccaucuccgggaccaacggcaccaagcgguucgacaacccggugcugcccuucaacgacgggguguacuucgcgagcaccgagaaguccaacaucauccgcggcuggaucuucgggacgacccucgacagcaagacccagucccugcugaucgucaacaacgccaccaacguggugaucaaggucugcgaguuccaguucugcaacgaccccuuccucggcguguacuaccacaagaacaacaagagcuggauggaguccgaguuccggguguacagcuccgccaacaacugcacguucgaguacgucagccagcccuuccugauggaccuggagggcaagcaggggaacuucaagaaccuccgcgaguucguguucaagaacaucgacggcuacuucaagaucuacuccaagcacaccccgaucaaccuggugcgggaccugccccagggguucagcgcccucgagccccuggucgaccugcccaucggcaucaacaucacccgcuuccagacccuccuggcccugcaccgguccuaccucacgccgggggacagcagcuccggcuggaccgcgggcgccgccgccuacuacgugggguaccugcagccccgcaccuuccugcucaaguacaacgagaacggcaccaucacggacgcgguggacugcgcccuggacccccugagcgagaccaagugcacccucaaguccuucaccgucgagaaggggaucuaccagacgagcaacuuccgggugcagcccaccgaguccaucgugcgcuucccgaacaucaccaaccugugccccuucggcgaggucuucaacgccacccgguucgccagcguguacgccuggaaccgcaagcggaucuccaacugcgucgcggacuacagcgugcuguacaacuccgccagcuucuccacguucaagugcuacggcgugagccccaccaagcucaacgaccugugcuucaccaacgucuacgccgacuccuucgugauccgcggggacgaggugcggcagaucgcccccggccagaccgggaagaucgccgacuacaacuacaagcugccggacgacuucacgggcugcgucaucgcguggaacagcaacaaccucgacuccaaggucgggggcaacuacaacuaccuguuccgccuguuccgcaagagcaaccucaagcccuucgagcgggacaucuccaccgagaucuaccaggccggcagcacccccugcaacgggguggagggcuucaacugcuacuucccccugcaguccuacggguuccagccgaccaacggcgugggguaccagcccuaccggguggugguccugagcuucgagcuccugcacgcccccgccacggugugcggccccaagaaguccaccaaccuggugaagaacaagugcgucaacuucaacuucaacggccucaccgggaccggcgugcugaccgagagcaacaagaaguuccugccguuccagcaguucgggcgcgacaucgccgacacgaccgacgcggugcgcgacccccagacccuggagauccucgacaucacccccugcagcuucggcggggucuccgugaucacgccgggcaccaacaccagcaaccagguggccguccuguaccagggcgugaacugcaccgaggugcccgucgccauccacgccgaccagcugacgcccaccuggcggguguacuccaccgggagcaacguguuccagacccgcgccggcugccucaucggggcggagcacgucaacaacuccuacgagugcgacauccccaucggcgccggcaucugcgccagcuaccagacgcagaccaacuccccgcggcgcgcccggagcguggcgucccagagcgugaucgccuacaccaugucccugggggccgagaacagcgucgccuacuccaacaacagcaucgccauccccaccaacuucacgaucuccgugaccaccgagauccugcccgugagcaugaccaagacgagcgucgacugcaccauguacaucugcggcgacuccaccgagugcagcaaccuccugcugcaguacggguccuucugcacccagcucaaccgcgcgcugacgggcaucgccguggagcaggacaagaacacccaggagguguucgcccaggucaagcagaucuacaagacgcccccgaucaaggacuucgggggcuucaacuucagccagauccugcccgaccccuccaagcccagcaagcgguccuucaucgaggaccuccuguucaacaaggugacccuggccgacgccggcuucaucaagcaguacggggacugccucggcgacaucgcggcccgcgaccugaucugcgcccagaaguucaacgggcugaccgugcucccgccccugcugaccgacgagaugaucgcccaguacaccagcgcccuccuggcgggcaccaucacguccggguggaccuucggcgccggcgccgcccugcagauccccuucgcgaugcagauggccuaccgguucaacgggaucggcgucacccagaacgugcucuacgagaaccagaagcugaucgccaaccaguucaacagcgccaucgggaagauccaggacucccugagcuccaccgccagcgcgcucggcaagcugcaggacguggucaaccagaacgcccaggcccugaacacgcucgugaagcagcuguccagcaacuucggggccaucuccagcgugcugaacgacauccucucccgccuggacaaggucgaggccgaggugcagaucgaccggcugaucaccggccgccuccagagccugcagaccuacgugacccagcagcugauccgggcggccgagauccgcgccagcgccaaccucgccgcgaccaagauguccgagugcguccugggccagagcaagcggguggacuucugcgggaagggcuaccaccugauguccuucccccagagcgccccgcacgggguggucuuccuccacgugacguacguccccgcccaggagaagaacuucaccaccgcccccgcgaucugccacgacggcaaggcccacuucccccgcgaggggguguucguguccaacggcacccacugguucgucacgcagcggaacuucuacgagccgcagaucaucaccaccgacaacaccuucgugagcggcaacugcgacguggucaucgggaucgugaacaacacgguguacgacccccugcagcccgagcuggacuccuucaaggaggagcucgacaaguacuucaagaaccacaccagccccgacgucgaccugggcgacaucuccgggaucaacgccagcguggugaacauccagaaggagaucgaccgccugaacgaggucgccaagaaccucaacgagucccugaucgaccugcaggagcucggcaaguacgagcaguacaucaaguggccgugguacaucuggcugggcuucaucgccgggcugaucgcgaucgugaucgugaccaucaugcucugcugcaugaccagcugcugcuccugccugaagggcugcugcagcugcggguccugcugcaaguucgacgaggacgacagcgagcccguccugaagggcgugaagcuccacuacacgugaugacucgagcugguacugcaugcacgcaaugcuagcugccccuuucccguccuggguaccccgagucucccccgaccucgggucccagguaugcucccaccuccaccugccccacucaccaccucugcuaguuccagacaccucccaagcacgcagcaaugcagcucaaaacgcuuagccuagccacacccccacgggaaacagcagugauuaaccuuuagcaauaaacgaaaguuuaacuaagcuauacuaaccccaggguuggucaauuucgugccagccacacccuggagcuagcaaaaaaaaaaaaaaaaaaaaaaaaaaaaaaaaaaaaaaaaaaaaaaaaaaaaaaaaaaaaaaaaaaaaaaaaaaaaaaaaaaaaaaaaaaaaaaaaaaaa

SEQ ID NO: 26299 - RNA, 4264 nt, Artificial Sequence
  SARS-CoV-2/Wuhan/WIV05/2019__EPI_ISL_402128 spike protein mRNA gc (1-1273)(H69del_V70del_Y144del_N501Y_A570D_D614G_P681H_T716I_S982 A_D1118H)
agaauaaacuaguauucuucugguccccacagacucagagagaacccgccaccauguucguguuccugguccuccugccccuggugagcucccagugcgugaaccucaccacccgcacgcagcugccgcccgccuacaccaacagcuucacccggggcgucuacuaccccgacaagguguuccgcuccagcgugcugcacuccacccaggaccucuuccugcccuucuucagcaacgucacgugguuccacgccaucuccgggaccaacggcaccaagcgguucgacaacccggugcugcccuucaacgacgggguguacuucgcgagcaccgagaaguccaacaucauccgcggcuggaucuucgggacgacccucgacagcaagacccagucccugcugaucgucaacaacgccaccaacguggugaucaaggucugcgaguuccaguucugcaacgaccccuuccucggcguguaccacaagaacaacaagagcuggauggaguccgaguuccggguguacagcuccgccaacaacugcacguucgaguacgucagccagcccuuccugauggaccuggagggcaagcaggggaacuucaagaaccuccgcgaguucguguucaagaacaucgacggcuacuucaagaucuacuccaagcacaccccgaucaaccuggugcgggaccugccccagggguucagcgcccucgagccccuggucgaccugcccaucggcaucaacaucacccgcuuccagacccuccuggcccugcaccgguccuaccucacgccgggggacagcagcuccggcuggaccgcgggcgccgccgccuacuacgugggguaccugcagccccgcaccuuccugcucaaguacaacgagaacggcaccaucacggacgcgguggacugcgcccuggacccccugagcgagaccaagugcacccucaaguccuucaccgucgagaaggggaucuaccagacgagcaacuuccgggugcagcccaccgaguccaucgugcgcuucccgaacaucaccaaccugugccccuucggcgaggucuucaacgccacccgguucgccagcguguacgccuggaaccgcaagcggaucuccaacugcgucgcggacuacagcgugcuguacaacuccgccagcuucuccacguucaagugcuacggcgugagccccaccaagcucaacgaccugugcuucaccaacgucuacgccgacuccuucgugauccgcggggacgaggugcggcagaucgcccccggccagaccgggaagaucgccgacuacaacuacaagcugccggacgacuucacgggcugcgucaucgcguggaacagcaacaaccucgacuccaaggucgggggcaacuacaacuaccuguaccgccuguuccgcaagagcaaccucaagcccuucgagcgggacaucuccaccgagaucuaccaggccggcagcacccccugcaacgggguggagggcuucaacugcuacuucccccugcaguccuacggguuccagccgaccuacggcgugggguaccagcccuaccggguggugguccugagcuucgagcuccugcacgcccccgccacggugugcggccccaagaaguccaccaaccuggugaagaacaagugcgucaacuucaacuucaacggccucaccgggaccggcgugcugaccgagagcaacaagaaguuccugccguuccagcaguucgggcgcgacaucgacgacacgaccgacgccgugcgcgacccccagacccuggagauccucgacaucacccccugcagcuucggcggggucuccgugaucacgccgggcaccaacaccagcaaccagguggcgguccuguaccagggcgugaacugcaccgaggugcccgucgccauccacgccgaccagcugacgcccaccuggcggguguacuccaccgggagcaacguguuccagacccgcgccggcugccucaucggggccgagcacgucaacaacuccuacgagugcgacauccccaucggcgcgggcaucugcgccagcuaccagacgcagaccaacucccaccggcgcgcccggagcguggccucccagagcaucaucgcguacaccaugucccugggggccgagaacagcguggccuacuccaacaacagcaucgccaucccgaucaacuucaccaucuccgucacgaccgagauccugcccgugagcaugaccaagaccagcguggacugcacgauguacaucugcggcgacuccaccgagugcagcaaccuccugcugcaguacggguccuucugcacccagcucaaccgcgcccugaccggcaucgcggucgagcaggacaagaacacgcaggagguguucgcccaggugaagcagaucuacaagaccccgcccaucaaggacuucgggggcuucaacuucagccagauccugcccgaccccuccaagcccagcaagcgguccuucaucgaggaccuccuguucaacaaggucacccuggccgacgccggcuucaucaagcaguacggggacugccucggcgacaucgccgcgcgcgaccugaucugcgcccagaaguucaacgggcugaccgugcugcccccgcuccugacggacgagaugaucgcccaguacaccagcgcccuccuggccggcaccaucaccuccggguggacguucggcgcgggcgccgcccugcagauccccuucgccaugcagauggcguaccgguucaacgggaucggcgugacccagaacguccucuacgagaaccagaagcugaucgccaaccaguucaacagcgccaucgggaagauccaggacucccugagcuccaccgccagcgcccucggcaagcugcaggacguggugaaccagaacgcgcaggcccugaacacccucgucaagcagcuguccagcaacuucggggccaucuccagcgugcugaacgacauccucgcccgccuggacaagguggaggccgagguccagaucgaccggcugaucacgggccgccuccagucccugcagaccuacgugacccagcagcugauccgggcggccgagauccgcgccagcgccaaccucgccgcgaccaagaugagcgagugcgugcugggccaguccaagcgggucgacuucugcgggaagggcuaccaccugaugagcuucccccaguccgcgccccacggggugguguuccuccacgucaccuacgugccggcccaggagaagaacuucacgaccgcccccgccaucugccacgacggcaaggcccacuucccccgcgagggggucuucgugagcaacggcacccacugguucgugacccagcggaacuucuacgagccccagaucaucacgacccacaacaccuucgucuccggcaacugcgacguggugaucgggaucgucaacaacaccguguacgacccgcugcagcccgagcuggacagcuucaaggaggagcucgacaaguacuucaagaaccacacgucccccgacguggaccugggcgacaucagcgggaucaacgccuccgucgugaacauccagaaggagaucgaccgccugaacgagguggccaagaaccucaacgagagccugaucgaccugcaggagcucggcaaguacgagcaguacaucaaguggcccugguacaucuggcugggcuucaucgccgggcugaucgcgaucgucauggugaccaucaugcucugcugcaugaccuccugcugcagcugccugaagggcugcugcuccugcgggagcugcugcaaguucgacgaggacgacuccgagccggugcugaagggcgucaagcuccacuacaccugaugacucgagcugguacugcaugcacgcaaugcuagcugccccuuucccguccuggguaccccgagucucccccgaccucgggucccagguaugcucccaccuccaccugccccacucaccaccucugcuaguuccagacaccucccaagcacgcagcaaugcagcucaaaacgcuuagccuagccacacccccacgggaaacagcagugauuaaccuuuagcaauaaacgaaaguuuaacuaagcuauacuaaccccaggguuggucaauuucgugccagccacacccuggagcuagcaaaaaaaaaaaaaaaaaaaaaaaaaaaaaaaaaaaaaaaaaaaaaaaaaaaaaaaaaaaaaaaaaaaaaaaaaaaaaaaaaaaaaaaaaaaaaaaaaaaa

SEQ ID NO: 26300 - RNA, 4273 nt, Artificial Sequence
  SARS-CoV-2/Wuhan/WIV05/2019__EPI_ISL_402128 spike protein mRNA gc (1-1273)(K417N_E484K_N501Y_D614G)
agaauaaacuaguauucuucugguccccacagacucagagagaacccgccaccauguucguguuccugguccuccugccccuggugagcucccagugcgugaaccucaccacccgcacgcagcugccgcccgccuacaccaacagcuucacccggggcgucuacuaccccgacaagguguuccgcuccagcgugcugcacuccacccaggaccucuuccugcccuucuucagcaacgucacgugguuccacgccauccacguguccgggaccaacggcaccaagcgguucgacaacccggugcugcccuucaacgacggggucuacuucgcgagcaccgagaaguccaacaucauccgcggcuggaucuucgggacgacccucgacagcaagacccagucccugcugaucgugaacaacgccaccaacguggucaucaaggugugcgaguuccaguucugcaacgaccccuuccucggcguguacuaccacaagaacaacaagagcuggauggaguccgaguuccgggucuacagcuccgccaacaacugcacguucgaguacgugagccagcccuuccugauggaccuggagggcaagcaggggaacuucaagaaccuccgcgaguucguguucaagaacaucgacggcuacuucaagaucuacuccaagcacaccccgaucaaccugguccgggaccugccccagggguucagcgcccucgagccccugguggaccugcccaucggcaucaacaucacccgcuuccagacccuccuggcccugcaccgguccuaccucacgccgggggacagcagcuccggcuggaccgcgggcgccgccgccuacuacgugggguaccugcagccccgcaccuuccugcucaaguacaacgagaacggcaccaucacggacgcggucgacugcgcccuggacccccugagcgagaccaagugcacccucaaguccuucaccguggagaaggggaucuaccagacgagcaacuuccgggugcagcccaccgaguccaucguccgcuucccgaacaucaccaaccugugccccuucggcgagguguucaacgccacccgguucgccagcgucuacgccuggaaccgcaagcggaucuccaacugcguggcggacuacagcgugcuguacaacuccgccagcuucuccacguucaagugcuacggcgucagccccaccaagcucaacgaccugugcuucaccaacguguacgccgacuccuucgugauccgcggggacgagguccggcagaucgcccccggccagaccgggaacaucgccgacuacaacuacaagcugccggacgacuucacgggcugcgugaucgcguggaacagcaacaaccucgacuccaaggucgggggcaacuacaacuaccuguaccgccuguuccgcaagagcaaccucaagcccuucgagcgggacaucuccaccgagaucuaccaggccggcagcacccccugcaacggggugaagggcuucaacugcuacuucccccugcaguccuacggguuccagccgaccuacggcgugggguaccagcccuaccggguggucgugcugagcuucgagcuccugcacgcccccgccacggugugcggccccaagaaguccaccaaccuggucaagaacaagugcgugaacuucaacuucaacggccucaccgggaccggcgugcugaccgagagcaacaagaaguuccugccguuccagcaguucgggcgcgacaucgccgacacgaccgacgcgguccgcgacccccagacccuggagauccucgacaucacccccugcagcuucggcgggguguccgugaucacgccgggcaccaacaccagcaaccaggucgccgugcuguaccagggcgugaacugcaccgagguccccguggccauccacgccgaccagcugacgcccaccuggcggguguacuccaccgggagcaacgucuuccagacccgcgccggcugccucaucggggcggagcacgugaacaacuccuacgagugcgacauccccaucggcgccggcaucugcgccagcuaccagacgcagaccaacuccccgcggcgcgcccggagcguggcgucccagagcaucaucgccuacaccaugucccugggggccgagaacagcgucgccuacuccaacaacagcaucgccauccccaccaacuucacgaucuccgugaccaccgagauccugcccgugagcaugaccaagacgagcgucgacugcaccauguacaucugcggcgacuccaccgagugcagcaaccuccugcugcaguacggguccuucugcacccagcucaaccgcgcgcugacgggcaucgccguggagcaggacaagaacacccaggagguguucgcccaggucaagcagaucuacaagacgcccccgaucaaggacuucgggggcuucaacuucagccagauccugcccgaccccuccaagcccagcaagcgguccuucaucgaggaccuccuguucaacaaggugacccuggccgacgccggcuucaucaagcaguacggggacugccucggcgacaucgcggcccgcgaccugaucugcgcccagaaguucaacgggcugaccgugcucccgccccugcugaccgacgagaugaucgcccaguacaccagcgcccuccuggcgggcaccaucacguccggguggaccuucggcgccggcgccgcccugcagauccccuucgcgaugcagauggccuaccgguucaacgggaucggcgucacccagaacgugcucuacgagaaccagaagcugaucgccaaccaguucaacagcgccaucgggaagauccaggacucccugagcuccaccgccagcgcgcucggcaagcugcaggacguggucaaccagaacgcccaggcccugaacacgcucgugaagcagcuguccagcaacuucggggccaucuccagcgugcugaacgacauccucucccgccuggacaaggucgaggccgaggugcagaucgaccggcugaucaccggccgccuccagagccugcagaccuacgugacccagcagcugauccgggcggccgagauccgcgccagcgccaaccucgccgcgaccaagauguccgagugcguccugggccagagcaagcggguggacuucugcgggaagggcuaccaccugauguccuucccccagagcgccccgcacgggguggucuuccuccacgugacguacguccccgcccaggagaagaacuucaccaccgcccccgcgaucugccacgacggcaaggcccacuucccccgcgaggggguguucguguccaacggcacccacugguucgucacgcagcggaacuucuacgagccgcagaucaucaccaccgacaacaccuucgugagcggcaacugcgacguggucaucgggaucgugaacaacacgguguacgacccccugcagcccgagcuggacuccuucaaggaggagcucgacaaguacuucaagaaccacaccagccccgacgucgaccugggcgacaucuccgggaucaacgccagcguggugaacauccagaaggagaucgaccgccugaacgaggucgccaagaaccucaacgagucccugaucgaccugcaggagcucggcaaguacgagcaguacaucaaguggccgugguacaucuggcugggcuucaucgccgggcugaucgcgaucgugauggugaccaucaugcucugcugcaugaccagcugcugcuccugccugaagggcugcugcagcugcggguccugcugcaaguucgacgaggacgacagcgagcccguccugaagggcgugaagcuccacuacacgugaugacucgagcugguacugcaugcacgcaaugcuagcugccccuuucccguccuggguaccccgagucucccccgaccucgggucccagguaugcucccaccuccaccugccccacucaccaccucugcuaguuccagacaccucccaagcacgcagcaaugcagcucaaaacgcuuagccuagccacacccccacgggaaacagcagugauuaaccuuuagcaauaaacgaaaguuuaacuaagcuauacuaaccccaggguuggucaauuucgugccagccacacccuggagcuagcaaaaaaaaaaaaaaaaaaaaaaaaaaaaaaaaaaaaaaaaaaaaaaaaaaaaaaaaaaaaaaaaaaaaaaaaaaaaaaaaaaaaaaaaaaaaaaaaaaaa

SEQ ID NO: 26301 - RNA, 4264 nt, Artificial Sequence
  SARS-CoV-2/Wuhan/WIV05/2019__EPI_ISL_402128 spike protein mRNA gc (1-1273)(L18F_D80A_D215G_L242del_A243del_L244del_R246I_K417N_E484 K_N501Y_D614G_A701V)
agaauaaacuaguauucuucugguccccacagacucagagagaacccgccaccauguucguguuccugguccuccugccccuggugagcucccagugcgugaacuucaccacccgcacgcagcucccgcccgccuacaccaacagcuucacccggggcgucuacuaccccgacaagguguuccgcuccagcgugcugcacuccacccaggaccuguuccuccccuucuucagcaacgucacgugguuccacgccauccacguguccgggaccaacggcaccaagcgguucgcgaacccggugcugcccuucaacgacggggucuacuucgccagcaccgagaaguccaacaucauccgcggcuggaucuucgggacgacccuggacagcaagacccagucccuccugaucgugaacaacgccaccaacguggucaucaaggugugcgaguuccaguucugcaacgaccccuuccugggcguguacuaccacaagaacaacaagagcuggauggaguccgaguuccgggucuacagcuccgccaacaacugcacguucgaguacgugagccagcccuuccucauggaccuggagggcaagcaggggaacuucaagaaccugcgcgaguucguguucaagaacaucgacggcuacuucaagaucuacuccaagcacaccccgaucaaccucguccgggggcugccccagggcuucagcgcccuggagccccucguggaccugcccaucgggaucaacaucacccgcuuccagacccugcacaucuccuaccucacgccgggcgacagcagcuccggcuggaccgcgggggccgccgccuacuacgugggcuaccugcagccccggaccuuccugcucaaguacaacgagaacgggaccaucacggacgcggucgacugcgcccuggacccccugagcgagaccaagugcacccucaaguccuucaccguggagaagggcaucuaccagacgagcaacuuccgcgugcagcccaccgaguccaucguccgguucccgaacaucaccaaccugugccccuucggcgagguguucaacgccacccgcuucgccagcgucuacgccuggaaccggaagcgcaucuccaacugcguggcggacuacagcgugcuguacaacuccgccagcuucuccacguucaagugcuacggggucagccccaccaagcucaacgaccugugcuucaccaacguguacgccgacuccuucgugauccggggcgacgagguccgccagaucgcccccgggcagaccggcaacaucgccgacuacaacuacaagcugccggacgacuucacggggugcgugaucgcguggaacagcaacaaccucgacuccaaggugggcggcaacuacaacuaccuguaccggcuguuccgcaagagcaaccucaagcccuucgagcgggacaucuccaccgagaucuaccaggccgggagcacccccugcaacggcgucaagggguucaacugcuacuucccccugcaguccuacggcuuccagccgaccuacggggugggcuaccagcccuaccgcguggucgugcugagcuucgagcuccugcacgcccccgccacggugugcggccccaagaaguccaccaaccuggucaagaacaagugcgugaacuucaacuucaacgggcucaccggcaccggggugcugaccgagagcaacaagaaguuccugccguuccagcaguucggccgggacaucgccgacacgaccgacgcgguccgcgacccccagacccucgagauccuggacaucacccccugcagcuucgggggcguguccgugaucacgccgggcaccaacaccagcaaccaggucgccgugcuguaccagggggugaacugcaccgagguccccguggccauccacgccgaccagcugacgcccaccuggcgcguguacuccaccggcagcaacgucuuccagacccgggccgggugccucaucggcgcggagcacgugaacaacuccuacgagugcgacauccccaucggcgccgggaucugcgccagcuaccagacgcagaccaacuccccgcgccgggcccgcagcguggcgucccagagcaucaucgccuacaccaugucccugggcgucgagaacagcguggccuacuccaacaacagcaucgccauccccaccaacuucacgaucuccgugaccaccgagauccugcccgucagcaugaccaagacgagcguggacugcaccauguacaucugcggggacuccaccgagugcagcaaccuccugcugcaguacggcuccuucugcacccagcucaaccgggcccugacggggaucgcgguggagcaggacaagaacacccaggaggucuucgcccaggugaagcagaucuacaagacgcccccgaucaaggacuucggcggcuucaacuucagccagauccugcccgaccccuccaagcccagcaagcgcuccuucaucgaggaccuccuguucaacaaggugacccuggccgacgccggguucaucaagcaguacggcgacugccucggggacaucgccgcgcgggaccugaucugcgcccagaaguucaacggccugaccguccucccgccccugcugaccgacgagaugaucgcccaguacaccagcgcccuccuggccgggaccaucacguccggcuggaccuucggcgcgggggccgcccugcagauccccuucgccaugcagauggcguaccgcuucaacggcaucggggugacccagaacgugcucuacgagaaccagaagcugaucgccaaccaguucaacagcgccaucggcaagauccaggacucccugagcuccaccgccagcgcccucgggaagcugcaggacgucgugaaccagaacgcgcaggcccugaacacgcucgugaagcagcuguccagcaacuucggcgccaucuccagcguccugaacgacauccucucccggcuggacaagguggaggccgaggugcagaucgaccgccugaucaccggccggcuccagagccugcagaccuacgucacccagcagcugauccgcgccgcggagauccgggccagcgccaaccucgccgccaccaagauguccgagugcgugcuggggcagagcaagcgcguggacuucugcggcaagggguaccaccugauguccuucccccagagcgcgccgcacggcgucguguuccuccacgucacguacgugcccgcccaggagaagaacuucaccaccgcccccgccaucugccacgacgggaaggcgcacuucccccgggagggcguguucgucuccaacggcacccacugguucgugacgcagcgcaacuucuacgagccgcagaucaucaccaccgacaacaccuucgugagcgggaacugcgacgucgugaucggcaucgugaacaacacggucuacgacccccugcagcccgagcuggacuccuucaaggaggagcucgacaaguacuucaagaaccacaccagccccgacguggaccugggggacaucuccggcaucaacgccagcguggucaacauccagaaggagaucgaccggcugaacgagguggccaagaaccucaacgagucccugaucgaccugcaggagcucggcaaguacgagcaguacaucaaguggccgugguacaucuggcugggguucaucgccggccugaucgccaucgugauggucaccaucaugcucugcugcaugaccagcugcugcuccugccugaaggggugcugcagcugcggcuccugcugcaaguucgacgaggacgacagcgagcccgugcugaagggggugaagcuccacuacacgugaugacucgagcugguacugcaugcacgcaaugcuagcugccccuuucccguccuggguaccccgagucucccccgaccucgggucccagguaugcucccaccuccaccugccccacucaccaccucugcuaguuccagacaccucccaagcacgcagcaaugcagcucaaaacgcuuagccuagccacacccccacgggaaacagcagugauuaaccuuuagcaauaaacgaaaguuuaacuaagcuauacuaaccccaggguuggucaauuucgugccagccacacccuggagcuagcaaaaaaaaaaaaaaaaaaaaaaaaaaaaaaaaaaaaaaaaaaaaaaaaaaaaaaaaaaaaaaaaaaaaaaaaaaaaaaaaaaaaaaaaaaaaaaaaaaaa

SEQ ID NO: 26302 - RNA, 4273 nt, Artificial Sequence
  SARS-CoV-2/Wuhan/WIV05/2019__EPI_ISL_402128 spike protein mRNA gc (1-1273)(E484K_D614G)
agaauaaacuaguauucuucugguccccacagacucagagagaacccgccaccauguucguguuccugguccuccugccccuggugagcucccagugcgugaaccucaccacccgcacgcagcugccgcccgccuacaccaacagcuucacccggggcgucuacuaccccgacaagguguuccgcuccagcgugcugcacuccacccaggaccucuuccugcccuucuucagcaacgucacgugguuccacgccauccacguguccgggaccaacggcaccaagcgguucgacaacccggugcugcccuucaacgacggggucuacuucgcgagcaccgagaaguccaacaucauccgcggcuggaucuucgggacgacccucgacagcaagacccagucccugcugaucgugaacaacgccaccaacguggucaucaaggugugcgaguuccaguucugcaacgaccccuuccucggcguguacuaccacaagaacaacaagagcuggauggaguccgaguuccgggucuacagcuccgccaacaacugcacguucgaguacgugagccagcccuuccugauggaccuggagggcaagcaggggaacuucaagaaccuccgcgaguucguguucaagaacaucgacggcuacuucaagaucuacuccaagcacaccccgaucaaccugguccgggaccugccccagggguucagcgcccucgagccccugguggaccugcccaucggcaucaacaucacccgcuuccagacccuccuggcccugcaccgguccuaccucacgccgggggacagcagcuccggcuggaccgcgggcgccgccgccuacuacgugggguaccugcagccccgcaccuuccugcucaaguacaacgagaacggcaccaucacggacgcggucgacugcgcccuggacccccugagcgagaccaagugcacccucaaguccuucaccguggagaaggggaucuaccagacgagcaacuuccgggugcagcccaccgaguccaucguccgcuucccgaacaucaccaaccugugccccuucggcgagguguucaacgccacccgguucgccagcgucuacgccuggaaccgcaagcggaucuccaacugcguggcggacuacagcgugcuguacaacuccgccagcuucuccacguucaagugcuacggcgucagccccaccaagcucaacgaccugugcuucaccaacguguacgccgacuccuucgugauccgcggggacgagguccggcagaucgcccccggccagaccgggaagaucgccgacuacaacuacaagcugccggacgacuucacgggcugcgugaucgcguggaacagcaacaaccucgacuccaaggucgggggcaacuacaacuaccuguaccgccuguuccgcaagagcaaccucaagcccuucgagcgggacaucuccaccgagaucuaccaggccggcagcacccccugcaacggggugaagggcuucaacugcuacuucccccugcaguccuacggguuccagccgaccaacggcgugggguaccagcccuaccggguggucgugcugagcuucgagcuccugcacgcccccgccacggugugcggccccaagaaguccaccaaccuggucaagaacaagugcgugaacuucaacuucaacggccucaccgggaccggcgugcugaccgagagcaacaagaaguuccugccguuccagcaguucgggcgcgacaucgccgacacgaccgacgcgguccgcgacccccagacccuggagauccucgacaucacccccugcagcuucggcgggguguccgugaucacgccgggcaccaacaccagcaaccaggucgccgugcuguaccagggcgugaacugcaccgagguccccguggccauccacgccgaccagcugacgcccaccuggcggguguacuccaccgggagcaacgucuuccagacccgcgccggcugccucaucggggcggagcacgugaacaacuccuacgagugcgacauccccaucggcgccggcaucugcgccagcuaccagacgcagaccaacuccccgcggcgcgcccggagcguggcgucccagagcaucaucgccuacaccaugucccugggggccgagaacagcgucgccuacuccaacaacagcaucgccauccccaccaacuucacgaucuccgugaccaccgagauccugcccgugagcaugaccaagacgagcgucgacugcaccauguacaucugcggcgacuccaccgagugcagcaaccuccugcugcaguacggguccuucugcacccagcucaaccgcgcgcugacgggcaucgccguggagcaggacaagaacacccaggagguguucgcccaggucaagcagaucuacaagacgcccccgaucaaggacuucgggggcuucaacuucagccagauccugcccgaccccuccaagcccagcaagcgguccuucaucgaggaccuccuguucaacaaggugacccuggccgacgccggcuucaucaagcaguacggggacugccucggcgacaucgcggcccgcgaccugaucugcgcccagaaguucaacgggcugaccgugcucccgccccugcugaccgacgagaugaucgcccaguacaccagcgcccuccuggcgggcaccaucacguccggguggaccuucggcgccggcgccgcccugcagauccccuucgcgaugcagauggccuaccgguucaacgggaucggcgucacccagaacgugcucuacgagaaccagaagcugaucgccaaccaguucaacagcgccaucgggaagauccaggacucccugagcuccaccgccagcgcgcucggcaagcugcaggacguggucaaccagaacgcccaggcccugaacacgcucgugaagcagcuguccagcaacuucggggccaucuccagcgugcugaacgacauccucucccgccuggacaaggucgaggccgaggugcagaucgaccggcugaucaccggccgccuccagagccugcagaccuacgugacccagcagcugauccgggcggccgagauccgcgccagcgccaaccucgccgcgaccaagauguccgagugcguccugggccagagcaagcggguggacuucugcgggaagggcuaccaccugauguccuucccccagagcgccccgcacgggguggucuuccuccacgugacguacguccccgcccaggagaagaacuucaccaccgcccccgcgaucugccacgacggcaaggcccacuucccccgcgaggggguguucguguccaacggcacccacugguucgucacgcagcggaacuucuacgagccgcagaucaucaccaccgacaacaccuucgugagcggcaacugcgacguggucaucgggaucgugaacaacacgguguacgacccccugcagcccgagcuggacuccuucaaggaggagcucgacaaguacuucaagaaccacaccagccccgacgucgaccugggcgacaucuccgggaucaacgccagcguggugaacauccagaaggagaucgaccgccugaacgaggucgccaagaaccucaacgagucccugaucgaccugcaggagcucggcaaguacgagcaguacaucaaguggccgugguacaucuggcugggcuucaucgccgggcugaucgcgaucgugauggugaccaucaugcucugcugcaugaccagcugcugcuccugccugaagggcugcugcagcugcggguccugcugcaaguucgacgaggacgacagcgagcccguccugaagggcgugaagcuccacuacacgugaugacucgagcugguacugcaugcacgcaaugcuagcugccccuuucccguccuggguaccccgagucucccccgaccucgggucccagguaugcucccaccuccaccugccccacucaccaccucugcuaguuccagacaccucccaagcacgcagcaaugcagcucaaaacgcuuagccuagccacacccccacgggaaacagcagugauuaaccuuuagcaauaaacgaaaguuuaacuaagcuauacuaaccccaggguuggucaauuucgugccagccacacccuggagcuagcaaaaaaaaaaaaaaaaaaaaaaaaaaaaaaaaaaaaaaaaaaaaaaaaaaaaaaaaaaaaaaaaaaaaaaaaaaaaaaaaaaaaaaaaaaaaaaaaaaaa

SEQ ID NO: 26303 - RNA, 4273 nt, Artificial Sequence
  SARS-CoV-2/Wuhan/WIV05/2019__EPI_ISL_402128 spike protein mRNA gc (1-1273)(L18F_T20N_P26S_D138Y_R190S_K417T_E484K_N501Y_D614G_H655Y _T1027I)
agaauaaacuaguauucuucugguccccacagacucagagagaacccgccaccauguucguguuccugguccuccugccccuggugagcucccagugcgugaacuucaccaaccgcacccagcucccgagcgccuacacgaacuccuucacccggggcgucuacuaccccgacaagguguuccgcagcuccgugcugcacagcacccaggaccuguuccuccccuucuucuccaacgucaccugguuccacgccauccacgugagcgggacgaacggcaccaagcgguucgacaaccccgugcugccguucaacgacggggucuacuucgcguccaccgagaaguccaacaucauccgcggcuggaucuucgggaccacgcuggacuccaagacccagagccuccugaucgugaacaacgccaccaacguggucaucaaggugugcgaguuccaguucugcaacuaccccuuccugggcguguacuaccacaagaacaacaaguccuggauggagagcgaguuccgggucuacuccagcgccaacaacugcaccuucgaguacgugucccagcccuuccucauggaccuggagggcaagcaggggaacuucaagaaccugagcgaguucguguucaagaacaucgacggcuacuucaagaucuacuccaagcacacgcccaucaaccucguccgcgaccugccgcagggguucagcgcccuggagccccucguggaccugcccaucggcaucaacaucacccgguuccagacccugcucgcccugcaccgcagcuaccugacccccggggacuccagcuccggcuggacggcgggcgccgccgccuacuacgugggguaccuccagccgcggaccuuccugcugaaguacaacgagaacggcaccaucaccgacgcggucgacugcgcccucgacccccugagcgagacgaagugcacccugaaguccuucaccguggagaaggggaucuaccagaccagcaacuuccgcgugcagcccacggaguccaucguccgguuccccaacaucaccaaccucugcccguucggcgagguguucaacgccacccgcuucgccagcgucuacgccuggaaccggaagcgcaucuccaacugcguggcggacuacagcgugcuguacaacuccgccagcuucuccaccuucaagugcuacggcgucagccccacgaagcugaacgaccucugcuucaccaacguguacgccgacuccuucgugauccgcggggacgagguccggcagaucgcccccggccagaccgggaccaucgccgacuacaacuacaagcugcccgacgacuucacgggcugcgugaucgcguggaacagcaacaaccuggacuccaaggucgggggcaacuacaacuaccucuaccggcuguuccgcaagagcaaccugaagccguucgagcgggacaucuccaccgagaucuaccaggccggcagcacccccugcaacggggugaagggcuucaacugcuacuucccccuccagagcuacggguuccagcccaccuacggcgugggguaccagccguaccgcguggucgugcuguccuucgagcugcuccacgcccccgccacggugugcggccccaagaaguccaccaaccuggucaagaacaagugcgugaacuucaacuucaacggccugaccgggaccggcgugcucaccgagagcaacaagaaguuccugcccuuccagcaguucgggcgggacaucgccgacacgaccgacgcgguccgcgacccgcagacccuggagauccuggacaucacccccugcagcuucggcgggguguccgugaucacgcccggcaccaacaccagcaaccaggucgccgugcucuaccagggcgugaacugcaccgaggucccgguggccauccacgccgaccagcugacgcccaccuggcgcguguacuccaccgggagcaacgucuuccagacccgggccggcugccugaucggggcggaguacgugaacaacuccuacgagugcgacauccccaucggcgccggcaucugcgccagcuaccagacgcagaccaacagcccccgccgggcccgcagcguggcgucccagagcaucaucgccuacaccaugucccucggggccgagaacagcgucgccuacuccaacaacagcaucgccaucccgaccaacuucacgaucagcgugaccaccgagauccugcccguguccaugaccaagacgagcgucgacugcaccauguacaucugcggcgacuccaccgagugcagcaaccugcuccugcaguacggguccuucugcacccagcugaaccgggcgcucacgggcaucgccguggagcaggacaagaacacccaggagguguucgcccaggucaagcagaucuacaagaccccgcccaucaaggacuucgggggcuucaacuucagccagauccugcccgaccccuccaagcccagcaagcgcuccuucaucgaggaccuccuguucaacaaggugacccuggccgacgccggcuucaucaagcaguacggggacugccugggcgacaucgcggcccgggaccucaucugcgcccagaaguucaacgggcugacggugcugcccccgcuccugaccgacgagaugaucgcccaguacaccagcgcccugcucgcgggcaccaucacguccggguggaccuucggcgccggcgccgcccugcagauccccuucgcgaugcagauggccuaccgcuucaacgggaucggcgucacccagaacgugcuguacgagaaccagaagcucaucgccaaccaguucaacagcgccaucgggaagauccaggacucccugagcuccaccgccagcgcgcugggcaagcuccaggacguggucaaccagaacgcccaggcccugaacacgcuggugaagcagcucuccagcaacuucggggccaucuccagcgugcugaacgacauccugagccggcucgacaaggucgaggccgaggugcagaucgaccgccugaucaccggccggcugcagucccuccagaccuacgugacccagcagcugauccgcgcggccgagauccgggccagcgccaaccuggccgcgaucaagauguccgagugcguccucggccagagcaagcgcguggacuucugcgggaagggcuaccaccugauguccuucccccagagcgcgccccacgggguggucuuccugcacgugaccuacgucccggcccaggagaagaacuucacgaccgcccccgccaucugccacgacggcaaggcccacuucccccgggaggggguguucguguccaacggcacccacugguucgucacccagcgcaacuucuacgagccccagaucaucacgaccgacaacaccuucgugagcggcaacugcgacguggucaucgggaucgugaacaacaccguguacgacccgcuccagcccgagcuggacuccuucaaggaggagcuggacaaguacuucaagaaccacacgagccccgacgucgaccucggcgacaucuccgggaucaacgccagcguggugaacauccagaaggagaucgaccggcugaacgaggucgccaagaaccugaacgagucccucaucgaccugcaggagcugggcaaguacgagcaguacaucaaguggcccugguacaucuggcucggcuucaucgccgggcugaucgcgaucgugauggugaccaucaugcugugcugcaugaccagcugcugcuccugccucaagggcugcugcagcugcggguccugcugcaaguucgacgaggacgacagcgagccgguccugaagggcgugaagcugcacuacaccugaugacucgagcugguacugcaugcacgcaaugcuagcugccccuuucccguccuggguaccccgagucucccccgaccucgggucccagguaugcucccaccuccaccugccccacucaccaccucugcuaguuccagacaccucccaagcacgcagcaaugcagcucaaaacgcuuagccuagccacacccccacgggaaacagcagugauuaaccuuuagcaauaaacgaaaguuuaacuaagcuauacuaaccccaggguuggucaauuucgugccagccacacccuggagcuagcaaaaaaaaaaaaaaaaaaaaaaaaaaaaaaaaaaaaaaaaaaaaaaaaaaaaaaaaaaaaaaaaaaaaaaaaaaaaaaaaaaaaaaaaaaaaaaaaaaaa

SEQ ID NO: 26304 - RNA, 4273 nt, Artificial Sequence
  SARS-CoV-2/Wuhan/WIV05/2019__EPI_ISL_402128 spike protein mRNA gc (1-1273)(S13I_W152C_L452R_D614G)
agaauaaacuaguauucuucugguccccacagacucagagagaacccgccaccauguucguguuccugguccuccugccccuggugagcauccagugcgugaaccucaccacccgcacgcagcugccgcccgccuacaccaacuccuucacccggggcgucuacuaccccgacaagguguuccgcagcuccgugcugcacagcacccaggaccucuuccugcccuucuucuccaacgucacgugguuccacgccauccacgugagcgggaccaacggcaccaagcgguucgacaacccggugcugcccuucaacgacggggucuacuucgcguccaccgagaaguccaacaucauccgcggcuggaucuucgggacgacccucgacagcaagacccagagccugcugaucgugaacaacgccaccaacguggucaucaaggugugcgaguuccaguucugcaacgaccccuuccucggcguguacuaccacaagaacaacaaguccugcauggagagcgaguuccgggucuacuccagcgccaacaacugcacguucgaguacgugucccagcccuuccugauggaccuggagggcaagcaggggaacuucaagaaccuccgcgaguucguguucaagaacaucgacggcuacuucaagaucuacagcaagcacaccccgaucaaccugguccgggaccugccccagggguucuccgcccucgagccccugguggaccugcccaucggcaucaacaucacccgcuuccagacccuccuggcccugcaccggagcuaccucacgccgggggacuccagcagcggcuggaccgcgggcgccgccgccuacuacgugggguaccugcagccccgcaccuuccugcucaaguacaacgagaacggcaccaucacggacgcggucgacugcgcccuggacccccuguccgagaccaagugcacccucaagagcuucaccguggagaaggggaucuaccagacguccaacuuccgggugcagcccaccgagagcaucguccgcuucccgaacaucaccaaccugugccccuucggcgagguguucaacgccacccgguucgccuccgucuacgccuggaaccgcaagcggaucagcaacugcguggcggacuacuccgugcuguacaacagcgccuccuucagcacguucaagugcuacggcgucucccccaccaagcucaacgaccugugcuucaccaacguguacgccgacagcuucgugauccgcggggacgagguccggcagaucgcccccggccagaccgggaagaucgccgacuacaacuacaagcugccggacgacuucacgggcugcgugaucgcguggaacuccaacaaccucgacagcaaggucgggggcaacuacaacuaccgcuaccggcuguuccgcaaguccaaccugaagcccuucgagcgggacaucagcaccgagaucuaccaggccggcuccacccccugcaacgggguggagggcuucaacugcuacuucccccuccagagcuacggguuccagccgaccaacggcgugggguaccagcccuaccgcguggucgugcuguccuucgagcugcuccacgcccccgccacggugugcggccccaagaaguccaccaaccuggucaagaacaagugcgugaacuucaacuucaacggccugaccgggaccggcgugcucaccgagagcaacaagaaguuccugccguuccagcaguucgggcgcgacaucgccgacacgaccgacgcgguccgggacccccagacccuggagauccuggacaucacccccugcagcuucggcggggugagcgugaucacgccgggcaccaacaccuccaaccaggucgccgugcucuaccagggcgugaacugcaccgagguccccguggccauccacgccgaccagcugacgcccaccuggcgcguguacagcaccggguccaacgucuuccagacccgggccggcugccugaucggggcggagcacgugaacaacagcuacgagugcgacauccccaucggcgccggcaucugcgccuccuaccagacgcagaccaacagcccgcgccgggcccgcuccguggcgagccaguccaucaucgccuacaccaugagccucggggccgagaacuccgucgccuacagcaacaacuccaucgccauccccaccaacuucacgaucagcgugaccaccgagauccugcccguguccaugaccaagacgagcgucgacugcaccauguacaucugcggcgacagcaccgagugcuccaaccugcuccugcaguacgggagcuucugcacccagcugaaccgggcgcucacgggcaucgccguggagcaggacaagaacacccaggagguguucgcccaggucaagcagaucuacaagacgcccccgaucaaggacuucgggggcuucaacuucucccagauccugcccgaccccagcaagcccuccaagcgcagcuucaucgaggaccuccuguucaacaaggugacccuggccgacgccggcuucaucaagcaguacggggacugccugggcgacaucgcggcccgggaccucaucugcgcccagaaguucaacgggcugaccgugcugccgccccuccugaccgacgagaugaucgcccaguacaccuccgcccugcucgcgggcaccaucacgagcggguggaccuucggcgccggcgccgcccugcagauccccuucgcgaugcagauggccuaccgcuucaacgggaucggcgucacccagaacgugcuguacgagaaccagaagcucaucgccaaccaguucaacuccgccaucgggaagauccaggacagccuguccagcaccgccuccgcgcugggcaagcuccaggacguggucaaccagaacgcccaggcccugaacacgcuggugaagcagcucagcuccaacuucggggccaucagcuccgugcugaacgacauccugagccggcucgacaaggucgaggccgaggugcagaucgaccgccugaucaccggccggcugcagucccuccagaccuacgugacccagcagcugauccgcgcggccgagauccgggccagcgccaaccuggccgcgaccaagaugagcgagugcguccucggccaguccaagcgcguggacuucugcgggaagggcuaccaccugaugagcuucccccaguccgccccgcacgggguggucuuccugcacgugacguacguccccgcccaggagaagaacuucaccaccgcccccgcgaucugccacgacggcaaggcccacuucccccgggaggggguguucgugagcaacggcacccacugguucgucacgcagcgcaacuucuacgagccgcagaucaucaccaccgacaacaccuucguguccggcaacugcgacguggucaucgggaucgugaacaacacgguguacgacccccuccagcccgagcuggacagcuucaaggaggagcuggacaaguacuucaagaaccacaccucccccgacgucgaccucggcgacaucagcgggaucaacgccuccguggugaacauccagaaggagaucgaccggcugaacgaggucgccaagaaccugaacgagagccucaucgaccugcaggagcugggcaaguacgagcaguacaucaaguggccgugguacaucuggcucggcuucaucgccgggcugaucgcgaucgugauggugaccaucaugcugugcugcaugaccuccugcugcagcugccucaagggcugcugcuccugcgggagcugcugcaaguucgacgaggacgacuccgagcccguccugaagggcgugaagcugcacuacacgugaugacucgagcugguacugcaugcacgcaaugcuagcugccccuuucccguccuggguaccccgagucucccccgaccucgggucccagguaugcucccaccuccaccugccccacucaccaccucugcuaguuccagacaccucccaagcacgcagcaaugcagcucaaaacgcuuagccuagccacacccccacgggaaacagcagugauuaaccuuuagcaauaaacgaaaguuuaacuaagcuauacuaaccccaggguuggucaauuucgugccagccacacccuggagcuagcaaaaaaaaaaaaaaaaaaaaaaaaaaaaaaaaaaaaaaaaaaaaaaaaaaaaaaaaaaaaaaaaaaaaaaaaaaaaaaaaaaaaaaaaaaaaaaaaaaaa

SEQ ID NO: 26305 - RNA, 4273 nt, Artificial Sequence
  SARS-CoV-2/Wuhan/WIV05/2019__EPI_ISL_402128 spike protein mRNA gc (1-1273)
agaauaaacuaguauucuucugguccccacagacucagagagaacccgccaccauguucguguuccuggugcugcugccccuggugagcagccagugcgugaaccugaccacccggacccagcugccaccagccuacaccaacagcuucacccggggcgucuacuaccccgacaagguguuccggagcagcguccugcacagcacccaggaccuguuccugcccuucuucagcaacgugaccugguuccacgccauccacgugagcggcaccaacggcaccaagcgguucgacaaccccgugcugcccuucaacgacggcguguacuucgccagcaccgagaagagcaacaucauccggggcuggaucuucggcaccacccuggacagcaagacccagagccugcugaucgugaauaacgccaccaacguggugaucaaggugugcgaguuccaguucugcaacgaccccuuccugggcguguacuaccacaagaacaacaagagcuggauggagagcgaguuccggguguacagcagcgccaacaacugcaccuucgaguacgugagccagcccuuccugauggaccuggagggcaagcagggcaacuucaagaaccugcgggaguucguguucaagaacaucgacggcuacuucaagaucuacagcaagcacaccccaaucaaccuggugcgggaucugccccagggcuucucagcccuggagccccugguggaccugcccaucggcaucaacaucacccgguuccagacccugcuggcccugcaccggagcuaccugaccccaggcgacagcagcagcggguggacagcaggcgcggcugcuuacuacgugggcuaccugcagccccggaccuuccugcugaaguacaacgagaacggcaccaucaccgacgccguggacugcgcccuggacccucugagcgagaccaagugcacccugaagagcuucaccguggagaagggcaucuaccagaccagcaacuuccgggugcagcccaccgagagcaucgugcgguuccccaacaucaccaaccugugccccuucggcgagguguucaacgccacccgguucgccagcguguacgccuggaaccggaagcggaucagcaacugcguggccgacuacagcgugcuguacaacagcgccagcuucagcaccuucaagugcuacggcgugagccccaccaagcugaacgaccugugcuucaccaacguguacgccgacagcuucgugauccguggcgacgaggugcggcagaucgcacccggccagacaggcaagaucgccgacuacaacuacaagcugcccgacgacuucaccggcugcgugaucgccuggaacagcaacaaccucgacagcaaggugggcggcaacuacaacuaccuguaccggcuguuccggaagagcaaccugaagcccuucgagcgggacaucagcaccgagaucuaccaagccggcuccaccccuugcaacggcguggagggcuucaacugcuacuucccucugcagagcuacggcuuccagcccaccaacggcgugggcuaccagcccuaccgggugguggugcugagcuucgagcugcugcacgccccagccaccguguguggccccaagaagagcaccaaccuggugaagaacaagugcgugaacuucaacuucaacggccuuaccggcaccggcgugcugaccgagagcaacaagaaauuccugcccuuucagcaguucggccgggacaucgccgacaccaccgacgcugugcgggauccccagacccuggagauccuggacaucaccccuugcagcuucggcggcgugagcgugaucaccccaggcaccaacaccagcaaccagguggccgugcuguaccaggacgugaacugcaccgaggugcccguggccauccacgccgaccagcugacacccaccuggcgggucuacagcaccggcagcaacguguuccagacccgggccgguugccugaucggcgccgagcacgugaacaacagcuacgagugcgacauccccaucggcgccggcaucugugccagcuaccagacccagaccaauucaccccggagggcaaggagcguggccagccagagcaucaucgccuacaccaugagccugggcgccgagaacagcguggccuacagcaacaacagcaucgccauccccaccaacuucaccaucagcgugaccaccgagauucugcccgugagcaugaccaagaccagcguggacugcaccauguacaucugcggcgacagcaccgagugcagcaaccugcugcugcaguacggcagcuucugcacccagcugaaccgggcccugaccggcaucgccguggagcaggacaagaacacccaggagguguucgcccaggugaagcagaucuacaagaccccucccaucaaggacuucggcggcuucaacuucagccagauccugcccgaccccagcaagcccagcaagcggagcuucaucgaggaccugcuguucaacaaggugacccuagccgacgccggcuucaucaagcaguacggcgacugccucggcgacauagccgcccgggaccugaucugcgcccagaaguucaacggccugaccgugcugccuccccugcugaccgacgagaugaucgcccaguacaccagcgcccuguuagccggaaccaucaccagcggcuggacuuucggcgcuggagccgcucugcagauccccuucgccaugcagauggccuaccgguucaacggcaucggcgugacccagaacgugcuguacgagaaccagaagcugaucgccaaccaguucaacagcgccaucggcaagauccaggacagccugagcagcaccgcuagcgcccugggcaagcugcaggacguggugaaccagaacgcccaggcccugaacacccuggugaagcagcugagcagcaacuucggcgccaucagcagcgugcugaacgacauccugagccggcuggacaaggucgaggccgaggugcagaucgaccggcugaucacuggccggcugcagagccugcagaccuacgugacccagcagcugauccgggccgccgagauucgggccagcgccaaccuggccgccaccaagaugagcgagugcgugcugggccagagcaagcggguggacuucugcggcaagggcuaccaccugaugagcuuuccccagagcgcaccccacggagugguguuccugcacgugaccuacgugcccgcccaggagaagaacuucaccaccgccccagccaucugccacgacggcaaggcccacuuuccccgggagggcguguucgugagcaacggcacccacugguucgugacccagcggaacuucuacgagccccagaucaucaccaccgacaacaccuucgugagcggcaacugcgacguggugaucggcaucgugaacaacaccguguacgauccccugcagcccgagcuggacagcuucaaggaggagcuggacaaguacuucaagaaucacaccagccccgacguggaccugggcgacaucagcggcaucaacgccagcguggugaacauccagaaggagaucgaucggcugaacgagguggccaagaaccugaacgagagccugaucgaccugcaggagcugggcaaguacgagcaguacaucaaguggcccugguacaucuggcugggcuucaucgccggccugaucgccaucgugauggugaccaucaugcugugcugcaugaccagcugcugcagcugccugaagggcuguugcagcugcggcagcugcugcaaguucgacgaggacgacagcgagcccgugcugaagggcgugaagcugcacuacaccugaugacucgagcugguacugcaugcacgcaaugcuagcugccccuuucccguccuggguaccccgagucucccccgaccucgggucccagguaugcucccaccuccaccugccccacucaccaccucugcuaguuccagacaccucccaagcacgcagcaaugcagcucaaaacgcuuagccuagccacacccccacgggaaacagcagugauuaaccuuuagcaauaaacgaaaguuuaacuaagcuauacuaaccccaggguuggucaauuucgugccagccacacccuggagcuagcaaaaaaaaaaaaaaaaaaaaaaaaaaaaaaaaaaaaaaaaaaaaaaaaaaaaaaaaaaaaaaaaaaaaaaaaaaaaaaaaaaaaaaaaaaaaaaaaaaaa

SEQ ID NO: 26306 - RNA, 4273 nt, Artificial Sequence
  SARS-CoV-2/Wuhan/WIV05/2019__EPI_ISL_402128 spike protein mRNA gc (1-1273)(D614G)
agaauaaacuaguauucuucugguccccacagacucagagagaacccgccaccauguucguguuccuggugcugcugccccuggugagcagccagugcgugaaccugaccacccggacccagcugccaccagccuacaccaacagcuucacccggggcgucuacuaccccgacaagguguuccggagcagcguccugcacagcacccaggaccuguuccugcccuucuucagcaacgugaccugguuccacgccauccacgugagcggcaccaacggcaccaagcgguucgacaaccccgugcugcccuucaacgacggcguguacuucgccagcaccgagaagagcaacaucauccggggcuggaucuucggcaccacccuggacagcaagacccagagccugcugaucgugaauaacgccaccaacguggugaucaaggugugcgaguuccaguucugcaacgaccccuuccugggcguguacuaccacaagaacaacaagagcuggauggagagcgaguuccggguguacagcagcgccaacaacugcaccuucgaguacgugagccagcccuuccugauggaccuggagggcaagcagggcaacuucaagaaccugcgggaguucguguucaagaacaucgacggcuacuucaagaucuacagcaagcacaccccaaucaaccuggugcgggaucugccccagggcuucucagcccuggagccccugguggaccugcccaucggcaucaacaucacccgguuccagacccugcuggcccugcaccggagcuaccugaccccaggcgacagcagcagcggguggacagcaggcgcggcugcuuacuacgugggcuaccugcagccccggaccuuccugcugaaguacaacgagaacggcaccaucaccgacgccguggacugcgcccuggacccucugagcgagaccaagugcacccugaagagcuucaccguggagaagggcaucuaccagaccagcaacuuccgggugcagcccaccgagagcaucgugcgguuccccaacaucaccaaccugugccccuucggcgagguguucaacgccacccgguucgccagcguguacgccuggaaccggaagcggaucagcaacugcguggccgacuacagcgugcuguacaacagcgccagcuucagcaccuucaagugcuacggcgugagccccaccaagcugaacgaccugugcuucaccaacguguacgccgacagcuucgugauccguggcgacgaggugcggcagaucgcacccggccagacaggcaagaucgccgacuacaacuacaagcugcccgacgacuucaccggcugcgugaucgccuggaacagcaacaaccucgacagcaaggugggcggcaacuacaacuaccuguaccggcuguuccggaagagcaaccugaagcccuucgagcgggacaucagcaccgagaucuaccaagccggcuccaccccuugcaacggcguggagggcuucaacugcuacuucccucugcagagcuacggcuuccagcccaccaacggcgugggcuaccagcccuaccgggugguggugcugagcuucgagcugcugcacgccccagccaccguguguggccccaagaagagcaccaaccuggugaagaacaagugcgugaacuucaacuucaacggccuuaccggcaccggcgugcugaccgagagcaacaagaaauuccugcccuuucagcaguucggccgggacaucgccgacaccaccgacgcugugcgggauccccagacccuggagauccuggacaucaccccuugcagcuucggcggcgugagcgugaucaccccaggcaccaacaccagcaaccagguggccgugcuguaccagggcgugaacugcaccgaggugcccguggccauccacgccgaccagcugacacccaccuggcgggucuacagcaccggcagcaacguguuccagacccgggccgguugccugaucggcgccgagcacgugaacaacagcuacgagugcgacauccccaucggcgccggcaucugugccagcuaccagacccagaccaauucaccccggagggcaaggagcguggccagccagagcaucaucgccuacaccaugagccugggcgccgagaacagcguggccuacagcaacaacagcaucgccauccccaccaacuucaccaucagcgugaccaccgagauucugcccgugagcaugaccaagaccagcguggacugcaccauguacaucugcggcgacagcaccgagugcagcaaccugcugcugcaguacggcagcuucugcacccagcugaaccgggcccugaccggcaucgccguggagcaggacaagaacacccaggagguguucgcccaggugaagcagaucuacaagaccccucccaucaaggacuucggcggcuucaacuucagccagauccugcccgaccccagcaagcccagcaagcggagcuucaucgaggaccugcuguucaacaaggugacccuagccgacgccggcuucaucaagcaguacggcgacugccucggcgacauagccgcccgggaccugaucugcgcccagaaguucaacggccugaccgugcugccuccccugcugaccgacgagaugaucgcccaguacaccagcgcccuguuagccggaaccaucaccagcggcuggacuuucggcgcuggagccgcucugcagauccccuucgccaugcagauggccuaccgguucaacggcaucggcgugacccagaacgugcuguacgagaaccagaagcugaucgccaaccaguucaacagcgccaucggcaagauccaggacagccugagcagcaccgcuagcgcccugggcaagcugcaggacguggugaaccagaacgcccaggcccugaacacccuggugaagcagcugagcagcaacuucggcgccaucagcagcgugcugaacgacauccugagccggcuggacaaggucgaggccgaggugcagaucgaccggcugaucacuggccggcugcagagccugcagaccuacgugacccagcagcugauccgggccgccgagauucgggccagcgccaaccuggccgccaccaagaugagcgagugcgugcugggccagagcaagcggguggacuucugcggcaagggcuaccaccugaugagcuuuccccagagcgcaccccacggagugguguuccugcacgugaccuacgugcccgcccaggagaagaacuucaccaccgccccagccaucugccacgacggcaaggcccacuuuccccgggagggcguguucgugagcaacggcacccacugguucgugacccagcggaacuucuacgagccccagaucaucaccaccgacaacaccuucgugagcggcaacugcgacguggugaucggcaucgugaacaacaccguguacgauccccugcagcccgagcuggacagcuucaaggaggagcuggacaaguacuucaagaaucacaccagccccgacguggaccugggcgacaucagcggcaucaacgccagcguggugaacauccagaaggagaucgaucggcugaacgagguggccaagaaccugaacgagagccugaucgaccugcaggagcugggcaaguacgagcaguacaucaaguggcccugguacaucuggcugggcuucaucgccggccugaucgccaucgugauggugaccaucaugcugugcugcaugaccagcugcugcagcugccugaagggcuguugcagcugcggcagcugcugcaaguucgacgaggacgacagcgagcccgugcugaagggcgugaagcugcacuacaccugaugacucgagcugguacugcaugcacgcaaugcuagcugccccuuucccguccuggguaccccgagucucccccgaccucgggucccagguaugcucccaccuccaccugccccacucaccaccucugcuaguuccagacaccucccaagcacgcagcaaugcagcucaaaacgcuuagccuagccacacccccacgggaaacagcagugauuaaccuuuagcaauaaacgaaaguuuaacuaagcuauacuaaccccaggguuggucaauuucgugccagccacacccuggagcuagcaaaaaaaaaaaaaaaaaaaaaaaaaaaaaaaaaaaaaaaaaaaaaaaaaaaaaaaaaaaaaaaaaaaaaaaaaaaaaaaaaaaaaaaaaaaaaaaaaaaa

SEQ ID NO: 26307 - RNA, 4273 nt, Artificial Sequence
  SARS-CoV-2/Wuhan/WIV05/2019__EPI_ISL_402128 spike protein mRNA gc (1-1273)(A222V_D614G)
agaauaaacuaguauucuucugguccccacagacucagagagaacccgccaccauguucguguuccuggugcugcugccccuggugagcagccagugcgugaaccugaccacccggacccagcugccaccagccuacaccaacagcuucacccggggcgucuacuaccccgacaagguguuccggagcagcguccugcacagcacccaggaccuguuccugcccuucuucagcaacgugaccugguuccacgccauccacgugagcggcaccaacggcaccaagcgguucgacaaccccgugcugcccuucaacgacggcguguacuucgccagcaccgagaagagcaacaucauccggggcuggaucuucggcaccacccuggacagcaagacccagagccugcugaucgugaauaacgccaccaacguggugaucaaggugugcgaguuccaguucugcaacgaccccuuccugggcguguacuaccacaagaacaacaagagcuggauggagagcgaguuccggguguacagcagcgccaacaacugcaccuucgaguacgugagccagcccuuccugauggaccuggagggcaagcagggcaacuucaagaaccugcgggaguucguguucaagaacaucgacggcuacuucaagaucuacagcaagcacaccccaaucaaccuggugcgggaucugccccagggcuucucagugcuggagccccugguggaccugcccaucggcaucaacaucacccgguuccagacccugcuggcccugcaccggagcuaccugaccccaggcgacagcagcagcggguggacagcaggcgcggcugcuuacuacgugggcuaccugcagccccggaccuuccugcugaaguacaacgagaacggcaccaucaccgacgccguggacugcgcccuggacccucugagcgagaccaagugcacccugaagagcuucaccguggagaagggcaucuaccagaccagcaacuuccgggugcagcccaccgagagcaucgugcgguuccccaacaucaccaaccugugccccuucggcgagguguucaacgccacccgguucgccagcguguacgccuggaaccggaagcggaucagcaacugcguggccgacuacagcgugcuguacaacagcgccagcuucagcaccuucaagugcuacggcgugagccccaccaagcugaacgaccugugcuucaccaacguguacgccgacagcuucgugauccguggcgacgaggugcggcagaucgcacccggccagacaggcaagaucgccgacuacaacuacaagcugcccgacgacuucaccggcugcgugaucgccuggaacagcaacaaccucgacagcaaggugggcggcaacuacaacuaccuguaccggcuguuccggaagagcaaccugaagcccuucgagcgggacaucagcaccgagaucuaccaagccggcuccaccccuugcaacggcguggagggcuucaacugcuacuucccucugcagagcuacggcuuccagcccaccaacggcgugggcuaccagcccuaccgggugguggugcugagcuucgagcugcugcacgccccagccaccguguguggccccaagaagagcaccaaccuggugaagaacaagugcgugaacuucaacuucaacggccuuaccggcaccggcgugcugaccgagagcaacaagaaauuccugcccuuucagcaguucggccgggacaucgccgacaccaccgacgcugugcgggauccccagacccuggagauccuggacaucaccccuugcagcuucggcggcgugagcgugaucaccccaggcaccaacaccagcaaccagguggccgugcuguaccagggcgugaacugcaccgaggugcccguggccauccacgccgaccagcugacacccaccuggcgggucuacagcaccggcagcaacguguuccagacccgggccgguugccugaucggcgccgagcacgugaacaacagcuacgagugcgacauccccaucggcgccggcaucugugccagcuaccagacccagaccaauucaccccggagggcaaggagcguggccagccagagcaucaucgccuacaccaugagccugggcgccgagaacagcguggccuacagcaacaacagcaucgccauccccaccaacuucaccaucagcgugaccaccgagauucugcccgugagcaugaccaagaccagcguggacugcaccauguacaucugcggcgacagcaccgagugcagcaaccugcugcugcaguacggcagcuucugcacccagcugaaccgggcccugaccggcaucgccguggagcaggacaagaacacccaggagguguucgcccaggugaagcagaucuacaagaccccucccaucaaggacuucggcggcuucaacuucagccagauccugcccgaccccagcaagcccagcaagcggagcuucaucgaggaccugcuguucaacaaggugacccuagccgacgccggcuucaucaagcaguacggcgacugccucggcgacauagccgcccgggaccugaucugcgcccagaaguucaacggccugaccgugcugccuccccugcugaccgacgagaugaucgcccaguacaccagcgcccuguuagccggaaccaucaccagcggcuggacuuucggcgcuggagccgcucugcagauccccuucgccaugcagauggccuaccgguucaacggcaucggcgugacccagaacgugcuguacgagaaccagaagcugaucgccaaccaguucaacagcgccaucggcaagauccaggacagccugagcagcaccgcuagcgcccugggcaagcugcaggacguggugaaccagaacgcccaggcccugaacacccuggugaagcagcugagcagcaacuucggcgccaucagcagcgugcugaacgacauccugagccggcuggacaaggucgaggccgaggugcagaucgaccggcugaucacuggccggcugcagagccugcagaccuacgugacccagcagcugauccgggccgccgagauucgggccagcgccaaccuggccgccaccaagaugagcgagugcgugcugggccagagcaagcggguggacuucugcggcaagggcuaccaccugaugagcuuuccccagagcgcaccccacggagugguguuccugcacgugaccuacgugcccgcccaggagaagaacuucaccaccgccccagccaucugccacgacggcaaggcccacuuuccccgggagggcguguucgugagcaacggcacccacugguucgugacccagcggaacuucuacgagccccagaucaucaccaccgacaacaccuucgugagcggcaacugcgacguggugaucggcaucgugaacaacaccguguacgauccccugcagcccgagcuggacagcuucaaggaggagcuggacaaguacuucaagaaucacaccagccccgacguggaccugggcgacaucagcggcaucaacgccagcguggugaacauccagaaggagaucgaucggcugaacgagguggccaagaaccugaacgagagccugaucgaccugcaggagcugggcaaguacgagcaguacaucaaguggcccugguacaucuggcugggcuucaucgccggccugaucgccaucgugauggugaccaucaugcugugcugcaugaccagcugcugcagcugccugaagggcuguugcagcugcggcagcugcugcaaguucgacgaggacgacagcgagcccgugcugaagggcgugaagcugcacuacaccugaugacucgagcugguacugcaugcacgcaaugcuagcugccccuuucccguccuggguaccccgagucucccccgaccucgggucccagguaugcucccaccuccaccugccccacucaccaccucugcuaguuccagacaccucccaagcacgcagcaaugcagcucaaaacgcuuagccuagccacacccccacgggaaacagcagugauuaaccuuuagcaauaaacgaaaguuuaacuaagcuauacuaaccccaggguuggucaauuucgugccagccacacccuggagcuagcaaaaaaaaaaaaaaaaaaaaaaaaaaaaaaaaaaaaaaaaaaaaaaaaaaaaaaaaaaaaaaaaaaaaaaaaaaaaaaaaaaaaaaaaaaaaaaaaaaaa

SEQ ID NO: 26308 - RNA, 4273 nt, Artificial Sequence
  SARS-CoV-2/Wuhan/WIV05/2019__EPI_ISL_402128 spike protein mRNA gc (1-1273)(N439K_D614G)
agaauaaacuaguauucuucugguccccacagacucagagagaacccgccaccauguucguguuccuggugcugcugccccuggugagcagccagugcgugaaccugaccacccggacccagcugccaccagccuacaccaacagcuucacccggggcgucuacuaccccgacaagguguuccggagcagcguccugcacagcacccaggaccuguuccugcccuucuucagcaacgugaccugguuccacgccauccacgugagcggcaccaacggcaccaagcgguucgacaaccccgugcugcccuucaacgacggcguguacuucgccagcaccgagaagagcaacaucauccggggcuggaucuucggcaccacccuggacagcaagacccagagccugcugaucgugaauaacgccaccaacguggugaucaaggugugcgaguuccaguucugcaacgaccccuuccugggcguguacuaccacaagaacaacaagagcuggauggagagcgaguuccggguguacagcagcgccaacaacugcaccuucgaguacgugagccagcccuuccugauggaccuggagggcaagcagggcaacuucaagaaccugcgggaguucguguucaagaacaucgacggcuacuucaagaucuacagcaagcacaccccaaucaaccuggugcgggaucugccccagggcuucucagcccuggagccccugguggaccugcccaucggcaucaacaucacccgguuccagacccugcuggcccugcaccggagcuaccugaccccaggcgacagcagcagcggguggacagcaggcgcggcugcuuacuacgugggcuaccugcagccccggaccuuccugcugaaguacaacgagaacggcaccaucaccgacgccguggacugcgcccuggacccucugagcgagaccaagugcacccugaagagcuucaccguggagaagggcaucuaccagaccagcaacuuccgggugcagcccaccgagagcaucgugcgguuccccaacaucaccaaccugugccccuucggcgagguguucaacgccacccgguucgccagcguguacgccuggaaccggaagcggaucagcaacugcguggccgacuacagcgugcuguacaacagcgccagcuucagcaccuucaagugcuacggcgugagccccaccaagcugaacgaccugugcuucaccaacguguacgccgacagcuucgugauccguggcgacgaggugcggcagaucgcacccggccagacaggcaagaucgccgacuacaacuacaagcugcccgacgacuucaccggcugcgugaucgccuggaacagcaagaaccucgacagcaaggugggcggcaacuacaacuaccuguaccggcuguuccggaagagcaaccugaagcccuucgagcgggacaucagcaccgagaucuaccaagccggcuccaccccuugcaacggcguggagggcuucaacugcuacuucccucugcagagcuacggcuuccagcccaccaacggcgugggcuaccagcccuaccgggugguggugcugagcuucgagcugcugcacgccccagccaccguguguggccccaagaagagcaccaaccuggugaagaacaagugcgugaacuucaacuucaacggccuuaccggcaccggcgugcugaccgagagcaacaagaaauuccugcccuuucagcaguucggccgggacaucgccgacaccaccgacgcugugcgggauccccagacccuggagauccuggacaucaccccuugcagcuucggcggcgugagcgugaucaccccaggcaccaacaccagcaaccagguggccgugcuguaccagggcgugaacugcaccgaggugcccguggccauccacgccgaccagcugacacccaccuggcgggucuacagcaccggcagcaacguguuccagacccgggccgguugccugaucggcgccgagcacgugaacaacagcuacgagugcgacauccccaucggcgccggcaucugugccagcuaccagacccagaccaauucaccccggagggcaaggagcguggccagccagagcaucaucgccuacaccaugagccugggcgccgagaacagcguggccuacagcaacaacagcaucgccauccccaccaacuucaccaucagcgugaccaccgagauucugcccgugagcaugaccaagaccagcguggacugcaccauguacaucugcggcgacagcaccgagugcagcaaccugcugcugcaguacggcagcuucugcacccagcugaaccgggcccugaccggcaucgccguggagcaggacaagaacacccaggagguguucgcccaggugaagcagaucuacaagaccccucccaucaaggacuucggcggcuucaacuucagccagauccugcccgaccccagcaagcccagcaagcggagcuucaucgaggaccugcuguucaacaaggugacccuagccgacgccggcuucaucaagcaguacggcgacugccucggcgacauagccgcccgggaccugaucugcgcccagaaguucaacggccugaccgugcugccuccccugcugaccgacgagaugaucgcccaguacaccagcgcccuguuagccggaaccaucaccagcggcuggacuuucggcgcuggagccgcucugcagauccccuucgccaugcagauggccuaccgguucaacggcaucggcgugacccagaacgugcuguacgagaaccagaagcugaucgccaaccaguucaacagcgccaucggcaagauccaggacagccugagcagcaccgcuagcgcccugggcaagcugcaggacguggugaaccagaacgcccaggcccugaacacccuggugaagcagcugagcagcaacuucggcgccaucagcagcgugcugaacgacauccugagccggcuggacaaggucgaggccgaggugcagaucgaccggcugaucacuggccggcugcagagccugcagaccuacgugacccagcagcugauccgggccgccgagauucgggccagcgccaaccuggccgccaccaagaugagcgagugcgugcugggccagagcaagcggguggacuucugcggcaagggcuaccaccugaugagcuuuccccagagcgcaccccacggagugguguuccugcacgugaccuacgugcccgcccaggagaagaacuucaccaccgccccagccaucugccacgacggcaaggcccacuuuccccgggagggcguguucgugagcaacggcacccacugguucgugacccagcggaacuucuacgagccccagaucaucaccaccgacaacaccuucgugagcggcaacugcgacguggugaucggcaucgugaacaacaccguguacgauccccugcagcccgagcuggacagcuucaaggaggagcuggacaaguacuucaagaaucacaccagccccgacguggaccugggcgacaucagcggcaucaacgccagcguggugaacauccagaaggagaucgaucggcugaacgagguggccaagaaccugaacgagagccugaucgaccugcaggagcugggcaaguacgagcaguacaucaaguggcccugguacaucuggcugggcuucaucgccggccugaucgccaucgugauggugaccaucaugcugugcugcaugaccagcugcugcagcugccugaagggcuguugcagcugcggcagcugcugcaaguucgacgaggacgacagcgagcccgugcugaagggcgugaagcugcacuacaccugaugacucgagcugguacugcaugcacgcaaugcuagcugccccuuucccguccuggguaccccgagucucccccgaccucgggucccagguaugcucccaccuccaccugccccacucaccaccucugcuaguuccagacaccucccaagcacgcagcaaugcagcucaaaacgcuuagccuagccacacccccacgggaaacagcagugauuaaccuuuagcaauaaacgaaaguuuaacuaagcuauacuaaccccaggguuggucaauuucgugccagccacacccuggagcuagcaaaaaaaaaaaaaaaaaaaaaaaaaaaaaaaaaaaaaaaaaaaaaaaaaaaaaaaaaaaaaaaaaaaaaaaaaaaaaaaaaaaaaaaaaaaaaaaaaaaa

SEQ ID NO: 26309 - RNA, 4273 nt, Artificial Sequence
  SARS-CoV-2/Wuhan/WIV05/2019__EPI_ISL_402128 spike protein mRNA gc (1-1273)(S477N_D614G)
agaauaaacuaguauucuucugguccccacagacucagagagaacccgccaccauguucguguuccuggugcugcugccccuggugagcagccagugcgugaaccugaccacccggacccagcugccaccagccuacaccaacagcuucacccggggcgucuacuaccccgacaagguguuccggagcagcguccugcacagcacccaggaccuguuccugcccuucuucagcaacgugaccugguuccacgccauccacgugagcggcaccaacggcaccaagcgguucgacaaccccgugcugcccuucaacgacggcguguacuucgccagcaccgagaagagcaacaucauccggggcuggaucuucggcaccacccuggacagcaagacccagagccugcugaucgugaauaacgccaccaacguggugaucaaggugugcgaguuccaguucugcaacgaccccuuccugggcguguacuaccacaagaacaacaagagcuggauggagagcgaguuccggguguacagcagcgccaacaacugcaccuucgaguacgugagccagcccuuccugauggaccuggagggcaagcagggcaacuucaagaaccugcgggaguucguguucaagaacaucgacggcuacuucaagaucuacagcaagcacaccccaaucaaccuggugcgggaucugccccagggcuucucagcccuggagccccugguggaccugcccaucggcaucaacaucacccgguuccagacccugcuggcccugcaccggagcuaccugaccccaggcgacagcagcagcggguggacagcaggcgcggcugcuuacuacgugggcuaccugcagccccggaccuuccugcugaaguacaacgagaacggcaccaucaccgacgccguggacugcgcccuggacccucugagcgagaccaagugcacccugaagagcuucaccguggagaagggcaucuaccagaccagcaacuuccgggugcagcccaccgagagcaucgugcgguuccccaacaucaccaaccugugccccuucggcgagguguucaacgccacccgguucgccagcguguacgccuggaaccggaagcggaucagcaacugcguggccgacuacagcgugcuguacaacagcgccagcuucagcaccuucaagugcuacggcgugagccccaccaagcugaacgaccugugcuucaccaacguguacgccgacagcuucgugauccguggcgacgaggugcggcagaucgcacccggccagacaggcaagaucgccgacuacaacuacaagcugcccgacgacuucaccggcugcgugaucgccuggaacagcaacaaccucgacagcaaggugggcggcaacuacaacuaccuguaccggcuguuccggaagagcaaccugaagcccuucgagcgggacaucagcaccgagaucuaccaagccggcaacaccccuugcaacggcguggagggcuucaacugcuacuucccucugcagagcuacggcuuccagcccaccaacggcgugggcuaccagcccuaccgggugguggugcugagcuucgagcugcugcacgccccagccaccguguguggccccaagaagagcaccaaccuggugaagaacaagugcgugaacuucaacuucaacggccuuaccggcaccggcgugcugaccgagagcaacaagaaauuccugcccuuucagcaguucggccgggacaucgccgacaccaccgacgcugugcgggauccccagacccuggagauccuggacaucaccccuugcagcuucggcggcgugagcgugaucaccccaggcaccaacaccagcaaccagguggccgugcuguaccagggcgugaacugcaccgaggugcccguggccauccacgccgaccagcugacacccaccuggcgggucuacagcaccggcagcaacguguuccagacccgggccgguugccugaucggcgccgagcacgugaacaacagcuacgagugcgacauccccaucggcgccggcaucugugccagcuaccagacccagaccaauucaccccggagggcaaggagcguggccagccagagcaucaucgccuacaccaugagccugggcgccgagaacagcguggccuacagcaacaacagcaucgccauccccaccaacuucaccaucagcgugaccaccgagauucugcccgugagcaugaccaagaccagcguggacugcaccauguacaucugcggcgacagcaccgagugcagcaaccugcugcugcaguacggcagcuucugcacccagcugaaccgggcccugaccggcaucgccguggagcaggacaagaacacccaggagguguucgcccaggugaagcagaucuacaagaccccucccaucaaggacuucggcggcuucaacuucagccagauccugcccgaccccagcaagcccagcaagcggagcuucaucgaggaccugcuguucaacaaggugacccuagccgacgccggcuucaucaagcaguacggcgacugccucggcgacauagccgcccgggaccugaucugcgcccagaaguucaacggccugaccgugcugccuccccugcugaccgacgagaugaucgcccaguacaccagcgcccuguuagccggaaccaucaccagcggcuggacuuucggcgcuggagccgcucugcagauccccuucgccaugcagauggccuaccgguucaacggcaucggcgugacccagaacgugcuguacgagaaccagaagcugaucgccaaccaguucaacagcgccaucggcaagauccaggacagccugagcagcaccgcuagcgcccugggcaagcugcaggacguggugaaccagaacgcccaggcccugaacacccuggugaagcagcugagcagcaacuucggcgccaucagcagcgugcugaacgacauccugagccggcuggacaaggucgaggccgaggugcagaucgaccggcugaucacuggccggcugcagagccugcagaccuacgugacccagcagcugauccgggccgccgagauucgggccagcgccaaccuggccgccaccaagaugagcgagugcgugcugggccagagcaagcggguggacuucugcggcaagggcuaccaccugaugagcuuuccccagagcgcaccccacggagugguguuccugcacgugaccuacgugcccgcccaggagaagaacuucaccaccgccccagccaucugccacgacggcaaggcccacuuuccccgggagggcguguucgugagcaacggcacccacugguucgugacccagcggaacuucuacgagccccagaucaucaccaccgacaacaccuucgugagcggcaacugcgacguggugaucggcaucgugaacaacaccguguacgauccccugcagcccgagcuggacagcuucaaggaggagcuggacaaguacuucaagaaucacaccagccccgacguggaccugggcgacaucagcggcaucaacgccagcguggugaacauccagaaggagaucgaucggcugaacgagguggccaagaaccugaacgagagccugaucgaccugcaggagcugggcaaguacgagcaguacaucaaguggcccugguacaucuggcugggcuucaucgccggccugaucgccaucgugauggugaccaucaugcugugcugcaugaccagcugcugcagcugccugaagggcuguugcagcugcggcagcugcugcaaguucgacgaggacgacagcgagcccgugcugaagggcgugaagcugcacuacaccugaugacucgagcugguacugcaugcacgcaaugcuagcugccccuuucccguccuggguaccccgagucucccccgaccucgggucccagguaugcucccaccuccaccugccccacucaccaccucugcuaguuccagacaccucccaagcacgcagcaaugcagcucaaaacgcuuagccuagccacacccccacgggaaacagcagugauuaaccuuuagcaauaaacgaaaguuuaacuaagcuauacuaaccccaggguuggucaauuucgugccagccacacccuggagcuagcaaaaaaaaaaaaaaaaaaaaaaaaaaaaaaaaaaaaaaaaaaaaaaaaaaaaaaaaaaaaaaaaaaaaaaaaaaaaaaaaaaaaaaaaaaaaaaaaaaaa

SEQ ID NO: 26310 - RNA, 4273 nt, Artificial Sequence
  SARS-CoV-2/Wuhan/WIV05/2019__EPI_ISL_402128 spike protein mRNA gc (1-1273)(N501Y_D614G)
agaauaaacuaguauucuucugguccccacagacucagagagaacccgccaccauguucguguuccuggugcugcugccccuggugagcagccagugcgugaaccugaccacccggacccagcugccaccagccuacaccaacagcuucacccggggcgucuacuaccccgacaagguguuccggagcagcguccugcacagcacccaggaccuguuccugcccuucuucagcaacgugaccugguuccacgccauccacgugagcggcaccaacggcaccaagcgguucgacaaccccgugcugcccuucaacgacggcguguacuucgccagcaccgagaagagcaacaucauccggggcuggaucuucggcaccacccuggacagcaagacccagagccugcugaucgugaauaacgccaccaacguggugaucaaggugugcgaguuccaguucugcaacgaccccuuccugggcguguacuaccacaagaacaacaagagcuggauggagagcgaguuccggguguacagcagcgccaacaacugcaccuucgaguacgugagccagcccuuccugauggaccuggagggcaagcagggcaacuucaagaaccugcgggaguucguguucaagaacaucgacggcuacuucaagaucuacagcaagcacaccccaaucaaccuggugcgggaucugccccagggcuucucagcccuggagccccugguggaccugcccaucggcaucaacaucacccgguuccagacccugcuggcccugcaccggagcuaccugaccccaggcgacagcagcagcggguggacagcaggcgcggcugcuuacuacgugggcuaccugcagccccggaccuuccugcugaaguacaacgagaacggcaccaucaccgacgccguggacugcgcccuggacccucugagcgagaccaagugcacccugaagagcuucaccguggagaagggcaucuaccagaccagcaacuuccgggugcagcccaccgagagcaucgugcgguuccccaacaucaccaaccugugccccuucggcgagguguucaacgccacccgguucgccagcguguacgccuggaaccggaagcggaucagcaacugcguggccgacuacagcgugcuguacaacagcgccagcuucagcaccuucaagugcuacggcgugagccccaccaagcugaacgaccugugcuucaccaacguguacgccgacagcuucgugauccguggcgacgaggugcggcagaucgcacccggccagacaggcaagaucgccgacuacaacuacaagcugcccgacgacuucaccggcugcgugaucgccuggaacagcaacaaccucgacagcaaggugggcggcaacuacaacuaccuguaccggcuguuccggaagagcaaccugaagcccuucgagcgggacaucagcaccgagaucuaccaagccggcuccaccccuugcaacggcguggagggcuucaacugcuacuucccucugcagagcuacggcuuccagcccaccuacggcgugggcuaccagcccuaccgggugguggugcugagcuucgagcugcugcacgccccagccaccguguguggccccaagaagagcaccaaccuggugaagaacaagugcgugaacuucaacuucaacggccuuaccggcaccggcgugcugaccgagagcaacaagaaauuccugcccuuucagcaguucggccgggacaucgccgacaccaccgacgcugugcgggauccccagacccuggagauccuggacaucaccccuugcagcuucggcggcgugagcgugaucaccccaggcaccaacaccagcaaccagguggccgugcuguaccagggcgugaacugcaccgaggugcccguggccauccacgccgaccagcugacacccaccuggcgggucuacagcaccggcagcaacguguuccagacccgggccgguugccugaucggcgccgagcacgugaacaacagcuacgagugcgacauccccaucggcgccggcaucugugccagcuaccagacccagaccaauucaccccggagggcaaggagcguggccagccagagcaucaucgccuacaccaugagccugggcgccgagaacagcguggccuacagcaacaacagcaucgccauccccaccaacuucaccaucagcgugaccaccgagauucugcccgugagcaugaccaagaccagcguggacugcaccauguacaucugcggcgacagcaccgagugcagcaaccugcugcugcaguacggcagcuucugcacccagcugaaccgggcccugaccggcaucgccguggagcaggacaagaacacccaggagguguucgcccaggugaagcagaucuacaagaccccucccaucaaggacuucggcggcuucaacuucagccagauccugcccgaccccagcaagcccagcaagcggagcuucaucgaggaccugcuguucaacaaggugacccuagccgacgccggcuucaucaagcaguacggcgacugccucggcgacauagccgcccgggaccugaucugcgcccagaaguucaacggccugaccgugcugccuccccugcugaccgacgagaugaucgcccaguacaccagcgcccuguuagccggaaccaucaccagcggcuggacuuucggcgcuggagccgcucugcagauccccuucgccaugcagauggccuaccgguucaacggcaucggcgugacccagaacgugcuguacgagaaccagaagcugaucgccaaccaguucaacagcgccaucggcaagauccaggacagccugagcagcaccgcuagcgcccugggcaagcugcaggacguggugaaccagaacgcccaggcccugaacacccuggugaagcagcugagcagcaacuucggcgccaucagcagcgugcugaacgacauccugagccggcuggacaaggucgaggccgaggugcagaucgaccggcugaucacuggccggcugcagagccugcagaccuacgugacccagcagcugauccgggccgccgagauucgggccagcgccaaccuggccgccaccaagaugagcgagugcgugcugggccagagcaagcggguggacuucugcggcaagggcuaccaccugaugagcuuuccccagagcgcaccccacggagugguguuccugcacgugaccuacgugcccgcccaggagaagaacuucaccaccgccccagccaucugccacgacggcaaggcccacuuuccccgggagggcguguucgugagcaacggcacccacugguucgugacccagcggaacuucuacgagccccagaucaucaccaccgacaacaccuucgugagcggcaacugcgacguggugaucggcaucgugaacaacaccguguacgauccccugcagcccgagcuggacagcuucaaggaggagcuggacaaguacuucaagaaucacaccagccccgacguggaccugggcgacaucagcggcaucaacgccagcguggugaacauccagaaggagaucgaucggcugaacgagguggccaagaaccugaacgagagccugaucgaccugcaggagcugggcaaguacgagcaguacaucaaguggcccugguacaucuggcugggcuucaucgccggccugaucgccaucgugauggugaccaucaugcugugcugcaugaccagcugcugcagcugccugaagggcuguugcagcugcggcagcugcugcaaguucgacgaggacgacagcgagcccgugcugaagggcgugaagcugcacuacaccugaugacucgagcugguacugcaugcacgcaaugcuagcugccccuuucccguccuggguaccccgagucucccccgaccucgggucccagguaugcucccaccuccaccugccccacucaccaccucugcuaguuccagacaccucccaagcacgcagcaaugcagcucaaaacgcuuagccuagccacacccccacgggaaacagcagugauuaaccuuuagcaauaaacgaaaguuuaacuaagcuauacuaaccccaggguuggucaauuucgugccagccacacccuggagcuagcaaaaaaaaaaaaaaaaaaaaaaaaaaaaaaaaaaaaaaaaaaaaaaaaaaaaaaaaaaaaaaaaaaaaaaaaaaaaaaaaaaaaaaaaaaaaaaaaaaaa

SEQ ID NO: 26311 - RNA, 4267 nt, Artificial Sequence
  SARS-CoV-2/Wuhan/WIV05/2019__EPI_ISL_402128 spike protein mRNA gc (1-1273)(H69del_V70del_D614G)
agaauaaacuaguauucuucugguccccacagacucagagagaacccgccaccauguucguguuccuggugcugcugccccuggugagcagccagugcgugaaccugaccacccggacccagcugccaccagccuacaccaacagcuucacccggggcgucuacuaccccgacaagguguuccggagcagcguccugcacagcacccaggaccuguuccugcccuucuucagcaacgugaccugguuccacgccaucagcggcaccaacggcaccaagcgguucgacaaccccgugcugcccuucaacgacggcguguacuucgccagcaccgagaagagcaacaucauccggggcuggaucuucggcaccacccuggacagcaagacccagagccugcugaucgugaauaacgccaccaacguggugaucaaggugugcgaguuccaguucugcaacgaccccuuccugggcguguacuaccacaagaacaacaagagcuggauggagagcgaguuccggguguacagcagcgccaacaacugcaccuucgaguacgugagccagcccuuccugauggaccuggagggcaagcagggcaacuucaagaaccugcgggaguucguguucaagaacaucgacggcuacuucaagaucuacagcaagcacaccccaaucaaccuggugcgggaucugccccagggcuucucagcccuggagccccugguggaccugcccaucggcaucaacaucacccgguuccagacccugcuggcccugcaccggagcuaccugaccccaggcgacagcagcagcggguggacagcaggcgcggcugcuuacuacgugggcuaccugcagccccggaccuuccugcugaaguacaacgagaacggcaccaucaccgacgccguggacugcgcccuggacccucugagcgagaccaagugcacccugaagagcuucaccguggagaagggcaucuaccagaccagcaacuuccgggugcagcccaccgagagcaucgugcgguuccccaacaucaccaaccugugccccuucggcgagguguucaacgccacccgguucgccagcguguacgccuggaaccggaagcggaucagcaacugcguggccgacuacagcgugcuguacaacagcgccagcuucagcaccuucaagugcuacggcgugagccccaccaagcugaacgaccugugcuucaccaacguguacgccgacagcuucgugauccguggcgacgaggugcggcagaucgcacccggccagacaggcaagaucgccgacuacaacuacaagcugcccgacgacuucaccggcugcgugaucgccuggaacagcaacaaccucgacagcaaggugggcggcaacuacaacuaccuguaccggcuguuccggaagagcaaccugaagcccuucgagcgggacaucagcaccgagaucuaccaagccggcuccaccccuugcaacggcguggagggcuucaacugcuacuucccucugcagagcuacggcuuccagcccaccaacggcgugggcuaccagcccuaccgggugguggugcugagcuucgagcugcugcacgccccagccaccguguguggccccaagaagagcaccaaccuggugaagaacaagugcgugaacuucaacuucaacggccuuaccggcaccggcgugcugaccgagagcaacaagaaauuccugcccuuucagcaguucggccgggacaucgccgacaccaccgacgcugugcgggauccccagacccuggagauccuggacaucaccccuugcagcuucggcggcgugagcgugaucaccccaggcaccaacaccagcaaccagguggccgugcuguaccagggcgugaacugcaccgaggugcccguggccauccacgccgaccagcugacacccaccuggcgggucuacagcaccggcagcaacguguuccagacccgggccgguugccugaucggcgccgagcacgugaacaacagcuacgagugcgacauccccaucggcgccggcaucugugccagcuaccagacccagaccaauucaccccggagggcaaggagcguggccagccagagcaucaucgccuacaccaugagccugggcgccgagaacagcguggccuacagcaacaacagcaucgccauccccaccaacuucaccaucagcgugaccaccgagauucugcccgugagcaugaccaagaccagcguggacugcaccauguacaucugcggcgacagcaccgagugcagcaaccugcugcugcaguacggcagcuucugcacccagcugaaccgggcccugaccggcaucgccguggagcaggacaagaacacccaggagguguucgcccaggugaagcagaucuacaagaccccucccaucaaggacuucggcggcuucaacuucagccagauccugcccgaccccagcaagcccagcaagcggagcuucaucgaggaccugcuguucaacaaggugacccuagccgacgccggcuucaucaagcaguacggcgacugccucggcgacauagccgcccgggaccugaucugcgcccagaaguucaacggccugaccgugcugccuccccugcugaccgacgagaugaucgcccaguacaccagcgcccuguuagccggaaccaucaccagcggcuggacuuucggcgcuggagccgcucugcagauccccuucgccaugcagauggccuaccgguucaacggcaucggcgugacccagaacgugcuguacgagaaccagaagcugaucgccaaccaguucaacagcgccaucggcaagauccaggacagccugagcagcaccgcuagcgcccugggcaagcugcaggacguggugaaccagaacgcccaggcccugaacacccuggugaagcagcugagcagcaacuucggcgccaucagcagcgugcugaacgacauccugagccggcuggacaaggucgaggccgaggugcagaucgaccggcugaucacuggccggcugcagagccugcagaccuacgugacccagcagcugauccgggccgccgagauucgggccagcgccaaccuggccgccaccaagaugagcgagugcgugcugggccagagcaagcggguggacuucugcggcaagggcuaccaccugaugagcuuuccccagagcgcaccccacggagugguguuccugcacgugaccuacgugcccgcccaggagaagaacuucaccaccgccccagccaucugccacgacggcaaggcccacuuuccccgggagggcguguucgugagcaacggcacccacugguucgugacccagcggaacuucuacgagccccagaucaucaccaccgacaacaccuucgugagcggcaacugcgacguggugaucggcaucgugaacaacaccguguacgauccccugcagcccgagcuggacagcuucaaggaggagcuggacaaguacuucaagaaucacaccagccccgacguggaccugggcgacaucagcggcaucaacgccagcguggugaacauccagaaggagaucgaucggcugaacgagguggccaagaaccugaacgagagccugaucgaccugcaggagcugggcaaguacgagcaguacaucaaguggcccugguacaucuggcugggcuucaucgccggccugaucgccaucgugauggugaccaucaugcugugcugcaugaccagcugcugcagcugccugaagggcuguugcagcugcggcagcugcugcaaguucgacgaggacgacagcgagcccgugcugaagggcgugaagcugcacuacaccugaugacucgagcugguacugcaugcacgcaaugcuagcugccccuuucccguccuggguaccccgagucucccccgaccucgggucccagguaugcucccaccuccaccugccccacucaccaccucugcuaguuccagacaccucccaagcacgcagcaaugcagcucaaaacgcuuagccuagccacacccccacgggaaacagcagugauuaaccuuuagcaauaaacgaaaguuuaacuaagcuauacuaaccccaggguuggucaauuucgugccagccacacccuggagcuagcaaaaaaaaaaaaaaaaaaaaaaaaaaaaaaaaaaaaaaaaaaaaaaaaaaaaaaaaaaaaaaaaaaaaaaaaaaaaaaaaaaaaaaaaaaaaaaaaaaaa

SEQ ID NO: 26312 - RNA, 4273 nt, Artificial Sequence
  SARS-CoV-2/Wuhan/WIV05/2019__EPI_ISL_402128 spike protein mRNA gc (1-1273)(Y453F_D614G)
agaauaaacuaguauucuucugguccccacagacucagagagaacccgccaccauguucguguuccuggugcugcugccccuggugagcagccagugcgugaaccugaccacccggacccagcugccaccagccuacaccaacagcuucacccggggcgucuacuaccccgacaagguguuccggagcagcguccugcacagcacccaggaccuguuccugcccuucuucagcaacgugaccugguuccacgccauccacgugagcggcaccaacggcaccaagcgguucgacaaccccgugcugcccuucaacgacggcguguacuucgccagcaccgagaagagcaacaucauccggggcuggaucuucggcaccacccuggacagcaagacccagagccugcugaucgugaauaacgccaccaacguggugaucaaggugugcgaguuccaguucugcaacgaccccuuccugggcguguacuaccacaagaacaacaagagcuggauggagagcgaguuccggguguacagcagcgccaacaacugcaccuucgaguacgugagccagcccuuccugauggaccuggagggcaagcagggcaacuucaagaaccugcgggaguucguguucaagaacaucgacggcuacuucaagaucuacagcaagcacaccccaaucaaccuggugcgggaucugccccagggcuucucagcccuggagccccugguggaccugcccaucggcaucaacaucacccgguuccagacccugcuggcccugcaccggagcuaccugaccccaggcgacagcagcagcggguggacagcaggcgcggcugcuuacuacgugggcuaccugcagccccggaccuuccugcugaaguacaacgagaacggcaccaucaccgacgccguggacugcgcccuggacccucugagcgagaccaagugcacccugaagagcuucaccguggagaagggcaucuaccagaccagcaacuuccgggugcagcccaccgagagcaucgugcgguuccccaacaucaccaaccugugccccuucggcgagguguucaacgccacccgguucgccagcguguacgccuggaaccggaagcggaucagcaacugcguggccgacuacagcgugcuguacaacagcgccagcuucagcaccuucaagugcuacggcgugagccccaccaagcugaacgaccugugcuucaccaacguguacgccgacagcuucgugauccguggcgacgaggugcggcagaucgcacccggccagacaggcaagaucgccgacuacaacuacaagcugcccgacgacuucaccggcugcgugaucgccuggaacagcaacaaccucgacagcaaggugggcggcaacuacaacuaccuguuccggcuguuccggaagagcaaccugaagcccuucgagcgggacaucagcaccgagaucuaccaagccggcuccaccccuugcaacggcguggagggcuucaacugcuacuucccucugcagagcuacggcuuccagcccaccaacggcgugggcuaccagcccuaccgggugguggugcugagcuucgagcugcugcacgccccagccaccguguguggccccaagaagagcaccaaccuggugaagaacaagugcgugaacuucaacuucaacggccuuaccggcaccggcgugcugaccgagagcaacaagaaauuccugcccuuucagcaguucggccgggacaucgccgacaccaccgacgcugugcgggauccccagacccuggagauccuggacaucaccccuugcagcuucggcggcgugagcgugaucaccccaggcaccaacaccagcaaccagguggccgugcuguaccagggcgugaacugcaccgaggugcccguggccauccacgccgaccagcugacacccaccuggcgggucuacagcaccggcagcaacguguuccagacccgggccgguugccugaucggcgccgagcacgugaacaacagcuacgagugcgacauccccaucggcgccggcaucugugccagcuaccagacccagaccaauucaccccggagggcaaggagcguggccagccagagcaucaucgccuacaccaugagccugggcgccgagaacagcguggccuacagcaacaacagcaucgccauccccaccaacuucaccaucagcgugaccaccgagauucugcccgugagcaugaccaagaccagcguggacugcaccauguacaucugcggcgacagcaccgagugcagcaaccugcugcugcaguacggcagcuucugcacccagcugaaccgggcccugaccggcaucgccguggagcaggacaagaacacccaggagguguucgcccaggugaagcagaucuacaagaccccucccaucaaggacuucggcggcuucaacuucagccagauccugcccgaccccagcaagcccagcaagcggagcuucaucgaggaccugcuguucaacaaggugacccuagccgacgccggcuucaucaagcaguacggcgacugccucggcgacauagccgcccgggaccugaucugcgcccagaaguucaacggccugaccgugcugccuccccugcugaccgacgagaugaucgcccaguacaccagcgcccuguuagccggaaccaucaccagcggcuggacuuucggcgcuggagccgcucugcagauccccuucgccaugcagauggccuaccgguucaacggcaucggcgugacccagaacgugcuguacgagaaccagaagcugaucgccaaccaguucaacagcgccaucggcaagauccaggacagccugagcagcaccgcuagcgcccugggcaagcugcaggacguggugaaccagaacgcccaggcccugaacacccuggugaagcagcugagcagcaacuucggcgccaucagcagcgugcugaacgacauccugagccggcuggacaaggucgaggccgaggugcagaucgaccggcugaucacuggccggcugcagagccugcagaccuacgugacccagcagcugauccgggccgccgagauucgggccagcgccaaccuggccgccaccaagaugagcgagugcgugcugggccagagcaagcggguggacuucugcggcaagggcuaccaccugaugagcuuuccccagagcgcaccccacggagugguguuccugcacgugaccuacgugcccgcccaggagaagaacuucaccaccgccccagccaucugccacgacggcaaggcccacuuuccccgggagggcguguucgugagcaacggcacccacugguucgugacccagcggaacuucuacgagccccagaucaucaccaccgacaacaccuucgugagcggcaacugcgacguggugaucggcaucgugaacaacaccguguacgauccccugcagcccgagcuggacagcuucaaggaggagcuggacaaguacuucaagaaucacaccagccccgacguggaccugggcgacaucagcggcaucaacgccagcguggugaacauccagaaggagaucgaucggcugaacgagguggccaagaaccugaacgagagccugaucgaccugcaggagcugggcaaguacgagcaguacaucaaguggcccugguacaucuggcugggcuucaucgccggccugaucgccaucgugauggugaccaucaugcugugcugcaugaccagcugcugcagcugccugaagggcuguugcagcugcggcagcugcugcaaguucgacgaggacgacagcgagcccgugcugaagggcgugaagcugcacuacaccugaugacucgagcugguacugcaugcacgcaaugcuagcugccccuuucccguccuggguaccccgagucucccccgaccucgggucccagguaugcucccaccuccaccugccccacucaccaccucugcuaguuccagacaccucccaagcacgcagcaaugcagcucaaaacgcuuagccuagccacacccccacgggaaacagcagugauuaaccuuuagcaauaaacgaaaguuuaacuaagcuauacuaaccccaggguuggucaauuucgugccagccacacccuggagcuagcaaaaaaaaaaaaaaaaaaaaaaaaaaaaaaaaaaaaaaaaaaaaaaaaaaaaaaaaaaaaaaaaaaaaaaaaaaaaaaaaaaaaaaaaaaaaaaaaaaaa

SEQ ID NO: 26313 - RNA, 4273 nt, Artificial Sequence
  SARS-CoV-2/Wuhan/WIV05/2019__EPI_ISL_402128 spike protein mRNA gc (1-1273)(D614G_I692V)
agaauaaacuaguauucuucugguccccacagacucagagagaacccgccaccauguucguguuccuggugcugcugccccuggugagcagccagugcgugaaccugaccacccggacccagcugccaccagccuacaccaacagcuucacccggggcgucuacuaccccgacaagguguuccggagcagcguccugcacagcacccaggaccuguuccugcccuucuucagcaacgugaccugguuccacgccauccacgugagcggcaccaacggcaccaagcgguucgacaaccccgugcugcccuucaacgacggcguguacuucgccagcaccgagaagagcaacaucauccggggcuggaucuucggcaccacccuggacagcaagacccagagccugcugaucgugaauaacgccaccaacguggugaucaaggugugcgaguuccaguucugcaacgaccccuuccugggcguguacuaccacaagaacaacaagagcuggauggagagcgaguuccggguguacagcagcgccaacaacugcaccuucgaguacgugagccagcccuuccugauggaccuggagggcaagcagggcaacuucaagaaccugcgggaguucguguucaagaacaucgacggcuacuucaagaucuacagcaagcacaccccaaucaaccuggugcgggaucugccccagggcuucucagcccuggagccccugguggaccugcccaucggcaucaacaucacccgguuccagacccugcuggcccugcaccggagcuaccugaccccaggcgacagcagcagcggguggacagcaggcgcggcugcuuacuacgugggcuaccugcagccccggaccuuccugcugaaguacaacgagaacggcaccaucaccgacgccguggacugcgcccuggacccucugagcgagaccaagugcacccugaagagcuucaccguggagaagggcaucuaccagaccagcaacuuccgggugcagcccaccgagagcaucgugcgguuccccaacaucaccaaccugugccccuucggcgagguguucaacgccacccgguucgccagcguguacgccuggaaccggaagcggaucagcaacugcguggccgacuacagcgugcuguacaacagcgccagcuucagcaccuucaagugcuacggcgugagccccaccaagcugaacgaccugugcuucaccaacguguacgccgacagcuucgugauccguggcgacgaggugcggcagaucgcacccggccagacaggcaagaucgccgacuacaacuacaagcugcccgacgacuucaccggcugcgugaucgccuggaacagcaacaaccucgacagcaaggugggcggcaacuacaacuaccuguaccggcuguuccggaagagcaaccugaagcccuucgagcgggacaucagcaccgagaucuaccaagccggcuccaccccuugcaacggcguggagggcuucaacugcuacuucccucugcagagcuacggcuuccagcccaccaacggcgugggcuaccagcccuaccgggugguggugcugagcuucgagcugcugcacgccccagccaccguguguggccccaagaagagcaccaaccuggugaagaacaagugcgugaacuucaacuucaacggccuuaccggcaccggcgugcugaccgagagcaacaagaaauuccugcccuuucagcaguucggccgggacaucgccgacaccaccgacgcugugcgggauccccagacccuggagauccuggacaucaccccuugcagcuucggcggcgugagcgugaucaccccaggcaccaacaccagcaaccagguggccgugcuguaccagggcgugaacugcaccgaggugcccguggccauccacgccgaccagcugacacccaccuggcgggucuacagcaccggcagcaacguguuccagacccgggccgguugccugaucggcgccgagcacgugaacaacagcuacgagugcgacauccccaucggcgccggcaucugugccagcuaccagacccagaccaauucaccccggagggcaaggagcguggccagccagagcgugaucgccuacaccaugagccugggcgccgagaacagcguggccuacagcaacaacagcaucgccauccccaccaacuucaccaucagcgugaccaccgagauucugcccgugagcaugaccaagaccagcguggacugcaccauguacaucugcggcgacagcaccgagugcagcaaccugcugcugcaguacggcagcuucugcacccagcugaaccgggcccugaccggcaucgccguggagcaggacaagaacacccaggagguguucgcccaggugaagcagaucuacaagaccccucccaucaaggacuucggcggcuucaacuucagccagauccugcccgaccccagcaagcccagcaagcggagcuucaucgaggaccugcuguucaacaaggugacccuagccgacgccggcuucaucaagcaguacggcgacugccucggcgacauagccgcccgggaccugaucugcgcccagaaguucaacggccugaccgugcugccuccccugcugaccgacgagaugaucgcccaguacaccagcgcccuguuagccggaaccaucaccagcggcuggacuuucggcgcuggagccgcucugcagauccccuucgccaugcagauggccuaccgguucaacggcaucggcgugacccagaacgugcuguacgagaaccagaagcugaucgccaaccaguucaacagcgccaucggcaagauccaggacagccugagcagcaccgcuagcgcccugggcaagcugcaggacguggugaaccagaacgcccaggcccugaacacccuggugaagcagcugagcagcaacuucggcgccaucagcagcgugcugaacgacauccugagccggcuggacaaggucgaggccgaggugcagaucgaccggcugaucacuggccggcugcagagccugcagaccuacgugacccagcagcugauccgggccgccgagauucgggccagcgccaaccuggccgccaccaagaugagcgagugcgugcugggccagagcaagcggguggacuucugcggcaagggcuaccaccugaugagcuuuccccagagcgcaccccacggagugguguuccugcacgugaccuacgugcccgcccaggagaagaacuucaccaccgccccagccaucugccacgacggcaaggcccacuuuccccgggagggcguguucgugagcaacggcacccacugguucgugacccagcggaacuucuacgagccccagaucaucaccaccgacaacaccuucgugagcggcaacugcgacguggugaucggcaucgugaacaacaccguguacgauccccugcagcccgagcuggacagcuucaaggaggagcuggacaaguacuucaagaaucacaccagccccgacguggaccugggcgacaucagcggcaucaacgccagcguggugaacauccagaaggagaucgaucggcugaacgagguggccaagaaccugaacgagagccugaucgaccugcaggagcugggcaaguacgagcaguacaucaaguggcccugguacaucuggcugggcuucaucgccggccugaucgccaucgugauggugaccaucaugcugugcugcaugaccagcugcugcagcugccugaagggcuguugcagcugcggcagcugcugcaaguucgacgaggacgacagcgagcccgugcugaagggcgugaagcugcacuacaccugaugacucgagcugguacugcaugcacgcaaugcuagcugccccuuucccguccuggguaccccgagucucccccgaccucgggucccagguaugcucccaccuccaccugccccacucaccaccucugcuaguuccagacaccucccaagcacgcagcaaugcagcucaaaacgcuuagccuagccacacccccacgggaaacagcagugauuaaccuuuagcaauaaacgaaaguuuaacuaagcuauacuaaccccaggguuggucaauuucgugccagccacacccuggagcuagcaaaaaaaaaaaaaaaaaaaaaaaaaaaaaaaaaaaaaaaaaaaaaaaaaaaaaaaaaaaaaaaaaaaaaaaaaaaaaaaaaaaaaaaaaaaaaaaaaaaa

SEQ ID NO: 26314 - RNA, 4273 nt, Artificial Sequence
  SARS-CoV-2/Wuhan/WIV05/2019__EPI_ISL_402128 spike protein mRNA gc (1-1273)(D614G_M1229I)
agaauaaacuaguauucuucugguccccacagacucagagagaacccgccaccauguucguguuccuggugcugcugccccuggugagcagccagugcgugaaccugaccacccggacccagcugccaccagccuacaccaacagcuucacccggggcgucuacuaccccgacaagguguuccggagcagcguccugcacagcacccaggaccuguuccugcccuucuucagcaacgugaccugguuccacgccauccacgugagcggcaccaacggcaccaagcgguucgacaaccccgugcugcccuucaacgacggcguguacuucgccagcaccgagaagagcaacaucauccggggcuggaucuucggcaccacccuggacagcaagacccagagccugcugaucgugaauaacgccaccaacguggugaucaaggugugcgaguuccaguucugcaacgaccccuuccugggcguguacuaccacaagaacaacaagagcuggauggagagcgaguuccggguguacagcagcgccaacaacugcaccuucgaguacgugagccagcccuuccugauggaccuggagggcaagcagggcaacuucaagaaccugcgggaguucguguucaagaacaucgacggcuacuucaagaucuacagcaagcacaccccaaucaaccuggugcgggaucugccccagggcuucucagcccuggagccccugguggaccugcccaucggcaucaacaucacccgguuccagacccugcuggcccugcaccggagcuaccugaccccaggcgacagcagcagcggguggacagcaggcgcggcugcuuacuacgugggcuaccugcagccccggaccuuccugcugaaguacaacgagaacggcaccaucaccgacgccguggacugcgcccuggacccucugagcgagaccaagugcacccugaagagcuucaccguggagaagggcaucuaccagaccagcaacuuccgggugcagcccaccgagagcaucgugcgguuccccaacaucaccaaccugugccccuucggcgagguguucaacgccacccgguucgccagcguguacgccuggaaccggaagcggaucagcaacugcguggccgacuacagcgugcuguacaacagcgccagcuucagcaccuucaagugcuacggcgugagccccaccaagcugaacgaccugugcuucaccaacguguacgccgacagcuucgugauccguggcgacgaggugcggcagaucgcacccggccagacaggcaagaucgccgacuacaacuacaagcugcccgacgacuucaccggcugcgugaucgccuggaacagcaacaaccucgacagcaaggugggcggcaacuacaacuaccuguaccggcuguuccggaagagcaaccugaagcccuucgagcgggacaucagcaccgagaucuaccaagccggcuccaccccuugcaacggcguggagggcuucaacugcuacuucccucugcagagcuacggcuuccagcccaccaacggcgugggcuaccagcccuaccgggugguggugcugagcuucgagcugcugcacgccccagccaccguguguggccccaagaagagcaccaaccuggugaagaacaagugcgugaacuucaacuucaacggccuuaccggcaccggcgugcugaccgagagcaacaagaaauuccugcccuuucagcaguucggccgggacaucgccgacaccaccgacgcugugcgggauccccagacccuggagauccuggacaucaccccuugcagcuucggcggcgugagcgugaucaccccaggcaccaacaccagcaaccagguggccgugcuguaccagggcgugaacugcaccgaggugcccguggccauccacgccgaccagcugacacccaccuggcgggucuacagcaccggcagcaacguguuccagacccgggccgguugccugaucggcgccgagcacgugaacaacagcuacgagugcgacauccccaucggcgccggcaucugugccagcuaccagacccagaccaauucaccccggagggcaaggagcguggccagccagagcaucaucgccuacaccaugagccugggcgccgagaacagcguggccuacagcaacaacagcaucgccauccccaccaacuucaccaucagcgugaccaccgagauucugcccgugagcaugaccaagaccagcguggacugcaccauguacaucugcggcgacagcaccgagugcagcaaccugcugcugcaguacggcagcuucugcacccagcugaaccgggcccugaccggcaucgccguggagcaggacaagaacacccaggagguguucgcccaggugaagcagaucuacaagaccccucccaucaaggacuucggcggcuucaacuucagccagauccugcccgaccccagcaagcccagcaagcggagcuucaucgaggaccugcuguucaacaaggugacccuagccgacgccggcuucaucaagcaguacggcgacugccucggcgacauagccgcccgggaccugaucugcgcccagaaguucaacggccugaccgugcugccuccccugcugaccgacgagaugaucgcccaguacaccagcgcccuguuagccggaaccaucaccagcggcuggacuuucggcgcuggagccgcucugcagauccccuucgccaugcagauggccuaccgguucaacggcaucggcgugacccagaacgugcuguacgagaaccagaagcugaucgccaaccaguucaacagcgccaucggcaagauccaggacagccugagcagcaccgcuagcgcccugggcaagcugcaggacguggugaaccagaacgcccaggcccugaacacccuggugaagcagcugagcagcaacuucggcgccaucagcagcgugcugaacgacauccugagccggcuggacaaggucgaggccgaggugcagaucgaccggcugaucacuggccggcugcagagccugcagaccuacgugacccagcagcugauccgggccgccgagauucgggccagcgccaaccuggccgccaccaagaugagcgagugcgugcugggccagagcaagcggguggacuucugcggcaagggcuaccaccugaugagcuuuccccagagcgcaccccacggagugguguuccugcacgugaccuacgugcccgcccaggagaagaacuucaccaccgccccagccaucugccacgacggcaaggcccacuuuccccgggagggcguguucgugagcaacggcacccacugguucgugacccagcggaacuucuacgagccccagaucaucaccaccgacaacaccuucgugagcggcaacugcgacguggugaucggcaucgugaacaacaccguguacgauccccugcagcccgagcuggacagcuucaaggaggagcuggacaaguacuucaagaaucacaccagccccgacguggaccugggcgacaucagcggcaucaacgccagcguggugaacauccagaaggagaucgaucggcugaacgagguggccaagaaccugaacgagagccugaucgaccugcaggagcugggcaaguacgagcaguacaucaaguggcccugguacaucuggcugggcuucaucgccggccugaucgccaucgugaucgugaccaucaugcugugcugcaugaccagcugcugcagcugccugaagggcuguugcagcugcggcagcugcugcaaguucgacgaggacgacagcgagcccgugcugaagggcgugaagcugcacuacaccugaugacucgagcugguacugcaugcacgcaaugcuagcugccccuuucccguccuggguaccccgagucucccccgaccucgggucccagguaugcucccaccuccaccugccccacucaccaccucugcuaguuccagacaccucccaagcacgcagcaaugcagcucaaaacgcuuagccuagccacacccccacgggaaacagcagugauuaaccuuuagcaauaaacgaaaguuuaacuaagcuauacuaaccccaggguuggucaauuucgugccagccacacccuggagcuagcaaaaaaaaaaaaaaaaaaaaaaaaaaaaaaaaaaaaaaaaaaaaaaaaaaaaaaaaaaaaaaaaaaaaaaaaaaaaaaaaaaaaaaaaaaaaaaaaaaaa

SEQ ID NO: 26315 - RNA, 4267 nt, Artificial Sequence
  SARS-CoV-2/Wuhan/WIV05/2019__EPI_ISL_402128 spike protein mRNA gc (1-1273)(H69del_V70del_A222V_Y453F_S477N_D614G_I692V)
agaauaaacuaguauucuucugguccccacagacucagagagaacccgccaccauguucguguuccuggugcugcugccccuggugagcagccagugcgugaaccugaccacccggacccagcugccaccagccuacaccaacagcuucacccggggcgucuacuaccccgacaagguguuccggagcagcguccugcacagcacccaggaccuguuccugcccuucuucagcaacgugaccugguuccacgccaucagcggcaccaacggcaccaagcgguucgacaaccccgugcugcccuucaacgacggcguguacuucgccagcaccgagaagagcaacaucauccggggcuggaucuucggcaccacccuggacagcaagacccagagccugcugaucgugaauaacgccaccaacguggugaucaaggugugcgaguuccaguucugcaacgaccccuuccugggcguguacuaccacaagaacaacaagagcuggauggagagcgaguuccggguguacagcagcgccaacaacugcaccuucgaguacgugagccagcccuuccugauggaccuggagggcaagcagggcaacuucaagaaccugcgggaguucguguucaagaacaucgacggcuacuucaagaucuacagcaagcacaccccaaucaaccuggugcgggaucugccccagggcuucucagugcuggagccccugguggaccugcccaucggcaucaacaucacccgguuccagacccugcuggcccugcaccggagcuaccugaccccaggcgacagcagcagcggguggacagcaggcgcggcugcuuacuacgugggcuaccugcagccccggaccuuccugcugaaguacaacgagaacggcaccaucaccgacgccguggacugcgcccuggacccucugagcgagaccaagugcacccugaagagcuucaccguggagaagggcaucuaccagaccagcaacuuccgggugcagcccaccgagagcaucgugcgguuccccaacaucaccaaccugugccccuucggcgagguguucaacgccacccgguucgccagcguguacgccuggaaccggaagcggaucagcaacugcguggccgacuacagcgugcuguacaacagcgccagcuucagcaccuucaagugcuacggcgugagccccaccaagcugaacgaccugugcuucaccaacguguacgccgacagcuucgugauccguggcgacgaggugcggcagaucgcacccggccagacaggcaagaucgccgacuacaacuacaagcugcccgacgacuucaccggcugcgugaucgccuggaacagcaacaaccucgacagcaaggugggcggcaacuacaacuaccuguuccggcuguuccggaagagcaaccugaagcccuucgagcgggacaucagcaccgagaucuaccaagccggcaacaccccuugcaacggcguggagggcuucaacugcuacuucccucugcagagcuacggcuuccagcccaccaacggcgugggcuaccagcccuaccgggugguggugcugagcuucgagcugcugcacgccccagccaccguguguggccccaagaagagcaccaaccuggugaagaacaagugcgugaacuucaacuucaacggccuuaccggcaccggcgugcugaccgagagcaacaagaaauuccugcccuuucagcaguucggccgggacaucgccgacaccaccgacgcugugcgggauccccagacccuggagauccuggacaucaccccuugcagcuucggcggcgugagcgugaucaccccaggcaccaacaccagcaaccagguggccgugcuguaccagggcgugaacugcaccgaggugcccguggccauccacgccgaccagcugacacccaccuggcgggucuacagcaccggcagcaacguguuccagacccgggccgguugccugaucggcgccgagcacgugaacaacagcuacgagugcgacauccccaucggcgccggcaucugugccagcuaccagacccagaccaauucaccccggagggcaaggagcguggccagccagagcgugaucgccuacaccaugagccugggcgccgagaacagcguggccuacagcaacaacagcaucgccauccccaccaacuucaccaucagcgugaccaccgagauucugcccgugagcaugaccaagaccagcguggacugcaccauguacaucugcggcgacagcaccgagugcagcaaccugcugcugcaguacggcagcuucugcacccagcugaaccgggcccugaccggcaucgccguggagcaggacaagaacacccaggagguguucgcccaggugaagcagaucuacaagaccccucccaucaaggacuucggcggcuucaacuucagccagauccugcccgaccccagcaagcccagcaagcggagcuucaucgaggaccugcuguucaacaaggugacccuagccgacgccggcuucaucaagcaguacggcgacugccucggcgacauagccgcccgggaccugaucugcgcccagaaguucaacggccugaccgugcugccuccccugcugaccgacgagaugaucgcccaguacaccagcgcccuguuagccggaaccaucaccagcggcuggacuuucggcgcuggagccgcucugcagauccccuucgccaugcagauggccuaccgguucaacggcaucggcgugacccagaacgugcuguacgagaaccagaagcugaucgccaaccaguucaacagcgccaucggcaagauccaggacagccugagcagcaccgcuagcgcccugggcaagcugcaggacguggugaaccagaacgcccaggcccugaacacccuggugaagcagcugagcagcaacuucggcgccaucagcagcgugcugaacgacauccugagccggcuggacaaggucgaggccgaggugcagaucgaccggcugaucacuggccggcugcagagccugcagaccuacgugacccagcagcugauccgggccgccgagauucgggccagcgccaaccuggccgccaccaagaugagcgagugcgugcugggccagagcaagcggguggacuucugcggcaagggcuaccaccugaugagcuuuccccagagcgcaccccacggagugguguuccugcacgugaccuacgugcccgcccaggagaagaacuucaccaccgccccagccaucugccacgacggcaaggcccacuuuccccgggagggcguguucgugagcaacggcacccacugguucgugacccagcggaacuucuacgagccccagaucaucaccaccgacaacaccuucgugagcggcaacugcgacguggugaucggcaucgugaacaacaccguguacgauccccugcagcccgagcuggacagcuucaaggaggagcuggacaaguacuucaagaaucacaccagccccgacguggaccugggcgacaucagcggcaucaacgccagcguggugaacauccagaaggagaucgaucggcugaacgagguggccaagaaccugaacgagagccugaucgaccugcaggagcugggcaaguacgagcaguacaucaaguggcccugguacaucuggcugggcuucaucgccggccugaucgccaucgugauggugaccaucaugcugugcugcaugaccagcugcugcagcugccugaagggcuguugcagcugcggcagcugcugcaaguucgacgaggacgacagcgagcccgugcugaagggcgugaagcugcacuacaccugaugacucgagcugguacugcaugcacgcaaugcuagcugccccuuucccguccuggguaccccgagucucccccgaccucgggucccagguaugcucccaccuccaccugccccacucaccaccucugcuaguuccagacaccucccaagcacgcagcaaugcagcucaaaacgcuuagccuagccacacccccacgggaaacagcagugauuaaccuuuagcaauaaacgaaaguuuaacuaagcuauacuaaccccaggguuggucaauuucgugccagccacacccuggagcuagcaaaaaaaaaaaaaaaaaaaaaaaaaaaaaaaaaaaaaaaaaaaaaaaaaaaaaaaaaaaaaaaaaaaaaaaaaaaaaaaaaaaaaaaaaaaaaaaaaaaa

SEQ ID NO: 26316 - RNA, 4267 nt, Artificial Sequence
  SARS-CoV-2/Wuhan/WIV05/2019__EPI_ISL_402128 spike protein mRNA gc (1-1273)(H69del_V70del_Y453F_D614G_I692V_M1229I)
agaauaaacuaguauucuucugguccccacagacucagagagaacccgccaccauguucguguuccuggugcugcugccccuggugagcagccagugcgugaaccugaccacccggacccagcugccaccagccuacaccaacagcuucacccggggcgucuacuaccccgacaagguguuccggagcagcguccugcacagcacccaggaccuguuccugcccuucuucagcaacgugaccugguuccacgccaucagcggcaccaacggcaccaagcgguucgacaaccccgugcugcccuucaacgacggcguguacuucgccagcaccgagaagagcaacaucauccggggcuggaucuucggcaccacccuggacagcaagacccagagccugcugaucgugaauaacgccaccaacguggugaucaaggugugcgaguuccaguucugcaacgaccccuuccugggcguguacuaccacaagaacaacaagagcuggauggagagcgaguuccggguguacagcagcgccaacaacugcaccuucgaguacgugagccagcccuuccugauggaccuggagggcaagcagggcaacuucaagaaccugcgggaguucguguucaagaacaucgacggcuacuucaagaucuacagcaagcacaccccaaucaaccuggugcgggaucugccccagggcuucucagcccuggagccccugguggaccugcccaucggcaucaacaucacccgguuccagacccugcuggcccugcaccggagcuaccugaccccaggcgacagcagcagcggguggacagcaggcgcggcugcuuacuacgugggcuaccugcagccccggaccuuccugcugaaguacaacgagaacggcaccaucaccgacgccguggacugcgcccuggacccucugagcgagaccaagugcacccugaagagcuucaccguggagaagggcaucuaccagaccagcaacuuccgggugcagcccaccgagagcaucgugcgguuccccaacaucaccaaccugugccccuucggcgagguguucaacgccacccgguucgccagcguguacgccuggaaccggaagcggaucagcaacugcguggccgacuacagcgugcuguacaacagcgccagcuucagcaccuucaagugcuacggcgugagccccaccaagcugaacgaccugugcuucaccaacguguacgccgacagcuucgugauccguggcgacgaggugcggcagaucgcacccggccagacaggcaagaucgccgacuacaacuacaagcugcccgacgacuucaccggcugcgugaucgccuggaacagcaacaaccucgacagcaaggugggcggcaacuacaacuaccuguuccggcuguuccggaagagcaaccugaagcccuucgagcgggacaucagcaccgagaucuaccaagccggcuccaccccuugcaacggcguggagggcuucaacugcuacuucccucugcagagcuacggcuuccagcccaccaacggcgugggcuaccagcccuaccgggugguggugcugagcuucgagcugcugcacgccccagccaccguguguggccccaagaagagcaccaaccuggugaagaacaagugcgugaacuucaacuucaacggccuuaccggcaccggcgugcugaccgagagcaacaagaaauuccugcccuuucagcaguucggccgggacaucgccgacaccaccgacgcugugcgggauccccagacccuggagauccuggacaucaccccuugcagcuucggcggcgugagcgugaucaccccaggcaccaacaccagcaaccagguggccgugcuguaccagggcgugaacugcaccgaggugcccguggccauccacgccgaccagcugacacccaccuggcgggucuacagcaccggcagcaacguguuccagacccgggccgguugccugaucggcgccgagcacgugaacaacagcuacgagugcgacauccccaucggcgccggcaucugugccagcuaccagacccagaccaauucaccccggagggcaaggagcguggccagccagagcgugaucgccuacaccaugagccugggcgccgagaacagcguggccuacagcaacaacagcaucgccauccccaccaacuucaccaucagcgugaccaccgagauucugcccgugagcaugaccaagaccagcguggacugcaccauguacaucugcggcgacagcaccgagugcagcaaccugcugcugcaguacggcagcuucugcacccagcugaaccgggcccugaccggcaucgccguggagcaggacaagaacacccaggagguguucgcccaggugaagcagaucuacaagaccccucccaucaaggacuucggcggcuucaacuucagccagauccugcccgaccccagcaagcccagcaagcggagcuucaucgaggaccugcuguucaacaaggugacccuagccgacgccggcuucaucaagcaguacggcgacugccucggcgacauagccgcccgggaccugaucugcgcccagaaguucaacggccugaccgugcugccuccccugcugaccgacgagaugaucgcccaguacaccagcgcccuguuagccggaaccaucaccagcggcuggacuuucggcgcuggagccgcucugcagauccccuucgccaugcagauggccuaccgguucaacggcaucggcgugacccagaacgugcuguacgagaaccagaagcugaucgccaaccaguucaacagcgccaucggcaagauccaggacagccugagcagcaccgcuagcgcccugggcaagcugcaggacguggugaaccagaacgcccaggcccugaacacccuggugaagcagcugagcagcaacuucggcgccaucagcagcgugcugaacgacauccugagccggcuggacaaggucgaggccgaggugcagaucgaccggcugaucacuggccggcugcagagccugcagaccuacgugacccagcagcugauccgggccgccgagauucgggccagcgccaaccuggccgccaccaagaugagcgagugcgugcugggccagagcaagcggguggacuucugcggcaagggcuaccaccugaugagcuuuccccagagcgcaccccacggagugguguuccugcacgugaccuacgugcccgcccaggagaagaacuucaccaccgccccagccaucugccacgacggcaaggcccacuuuccccgggagggcguguucgugagcaacggcacccacugguucgugacccagcggaacuucuacgagccccagaucaucaccaccgacaacaccuucgugagcggcaacugcgacguggugaucggcaucgugaacaacaccguguacgauccccugcagcccgagcuggacagcuucaaggaggagcuggacaaguacuucaagaaucacaccagccccgacguggaccugggcgacaucagcggcaucaacgccagcguggugaacauccagaaggagaucgaucggcugaacgagguggccaagaaccugaacgagagccugaucgaccugcaggagcugggcaaguacgagcaguacaucaaguggcccugguacaucuggcugggcuucaucgccggccugaucgccaucgugaucgugaccaucaugcugugcugcaugaccagcugcugcagcugccugaagggcuguugcagcugcggcagcugcugcaaguucgacgaggacgacagcgagcccgugcugaagggcgugaagcugcacuacaccugaugacucgagcugguacugcaugcacgcaaugcuagcugccccuuucccguccuggguaccccgagucucccccgaccucgggucccagguaugcucccaccuccaccugccccacucaccaccucugcuaguuccagacaccucccaagcacgcagcaaugcagcucaaaacgcuuagccuagccacacccccacgggaaacagcagugauuaaccuuuagcaauaaacgaaaguuuaacuaagcuauacuaaccccaggguuggucaauuucgugccagccacacccuggagcuagcaaaaaaaaaaaaaaaaaaaaaaaaaaaaaaaaaaaaaaaaaaaaaaaaaaaaaaaaaaaaaaaaaaaaaaaaaaaaaaaaaaaaaaaaaaaaaaaaaaaa

SEQ ID NO: 26317 - RNA, 4264 nt, Artificial Sequence
  SARS-CoV-2/Wuhan/WIV05/2019__EPI_ISL_402128 spike protein mRNA gc (1-1273)(H69del_V70del_Y144del_N501Y_A570D_D614G_P681H_T716I_S982 A_D1118H)
agaauaaacuaguauucuucugguccccacagacucagagagaacccgccaccauguucguguuccuggugcugcugccccuggugagcagccagugcgugaaccugaccacccggacccagcugccaccagccuacaccaacagcuucacccggggcgucuacuaccccgacaagguguuccggagcagcguccugcacagcacccaggaccuguuccugcccuucuucagcaacgugaccugguuccacgccaucagcggcaccaacggcaccaagcgguucgacaaccccgugcugcccuucaacgacggcguguacuucgccagcaccgagaagagcaacaucauccggggcuggaucuucggcaccacccuggacagcaagacccagagccugcugaucgugaauaacgccaccaacguggugaucaaggugugcgaguuccaguucugcaacgaccccuuccugggcguguaccacaagaacaacaagagcuggauggagagcgaguuccggguguacagcagcgccaacaacugcaccuucgaguacgugagccagcccuuccugauggaccuggagggcaagcagggcaacuucaagaaccugcgggaguucguguucaagaacaucgacggcuacuucaagaucuacagcaagcacaccccaaucaaccuggugcgggaucugccccagggcuucucagcccuggagccccugguggaccugcccaucggcaucaacaucacccgguuccagacccugcuggcccugcaccggagcuaccugaccccaggcgacagcagcagcggguggacagcaggcgcggcugcuuacuacgugggcuaccugcagccccggaccuuccugcugaaguacaacgagaacggcaccaucaccgacgccguggacugcgcccuggacccucugagcgagaccaagugcacccugaagagcuucaccguggagaagggcaucuaccagaccagcaacuuccgggugcagcccaccgagagcaucgugcgguuccccaacaucaccaaccugugccccuucggcgagguguucaacgccacccgguucgccagcguguacgccuggaaccggaagcggaucagcaacugcguggccgacuacagcgugcuguacaacagcgccagcuucagcaccuucaagugcuacggcgugagccccaccaagcugaacgaccugugcuucaccaacguguacgccgacagcuucgugauccguggcgacgaggugcggcagaucgcacccggccagacaggcaagaucgccgacuacaacuacaagcugcccgacgacuucaccggcugcgugaucgccuggaacagcaacaaccucgacagcaaggugggcggcaacuacaacuaccuguaccggcuguuccggaagagcaaccugaagcccuucgagcgggacaucagcaccgagaucuaccaagccggcuccaccccuugcaacggcguggagggcuucaacugcuacuucccucugcagagcuacggcuuccagcccaccuacggcgugggcuaccagcccuaccgggugguggugcugagcuucgagcugcugcacgccccagccaccguguguggccccaagaagagcaccaaccuggugaagaacaagugcgugaacuucaacuucaacggccuuaccggcaccggcgugcugaccgagagcaacaagaaauuccugcccuuucagcaguucggccgggacaucgacgacaccaccgacgcugugcgggauccccagacccuggagauccuggacaucaccccuugcagcuucggcggcgugagcgugaucaccccaggcaccaacaccagcaaccagguggccgugcuguaccagggcgugaacugcaccgaggugcccguggccauccacgccgaccagcugacacccaccuggcgggucuacagcaccggcagcaacguguuccagacccgggccgguugccugaucggcgccgagcacgugaacaacagcuacgagugcgacauccccaucggcgccggcaucugugccagcuaccagacccagaccaauucacaccggagggcaaggagcguggccagccagagcaucaucgccuacaccaugagccugggcgccgagaacagcguggccuacagcaacaacagcaucgccauccccaucaacuucaccaucagcgugaccaccgagauucugcccgugagcaugaccaagaccagcguggacugcaccauguacaucugcggcgacagcaccgagugcagcaaccugcugcugcaguacggcagcuucugcacccagcugaaccgggcccugaccggcaucgccguggagcaggacaagaacacccaggagguguucgcccaggugaagcagaucuacaagaccccucccaucaaggacuucggcggcuucaacuucagccagauccugcccgaccccagcaagcccagcaagcggagcuucaucgaggaccugcuguucaacaaggugacccuagccgacgccggcuucaucaagcaguacggcgacugccucggcgacauagccgcccgggaccugaucugcgcccagaaguucaacggccugaccgugcugccuccccugcugaccgacgagaugaucgcccaguacaccagcgcccuguuagccggaaccaucaccagcggcuggacuuucggcgcuggagccgcucugcagauccccuucgccaugcagauggccuaccgguucaacggcaucggcgugacccagaacgugcuguacgagaaccagaagcugaucgccaaccaguucaacagcgccaucggcaagauccaggacagccugagcagcaccgcuagcgcccugggcaagcugcaggacguggugaaccagaacgcccaggcccugaacacccuggugaagcagcugagcagcaacuucggcgccaucagcagcgugcugaacgacauccuggcccggcuggacaaggucgaggccgaggugcagaucgaccggcugaucacuggccggcugcagagccugcagaccuacgugacccagcagcugauccgggccgccgagauucgggccagcgccaaccuggccgccaccaagaugagcgagugcgugcugggccagagcaagcggguggacuucugcggcaagggcuaccaccugaugagcuuuccccagagcgcaccccacggagugguguuccugcacgugaccuacgugcccgcccaggagaagaacuucaccaccgccccagccaucugccacgacggcaaggcccacuuuccccgggagggcguguucgugagcaacggcacccacugguucgugacccagcggaacuucuacgagccccagaucaucaccacccacaacaccuucgugagcggcaacugcgacguggugaucggcaucgugaacaacaccguguacgauccccugcagcccgagcuggacagcuucaaggaggagcuggacaaguacuucaagaaucacaccagccccgacguggaccugggcgacaucagcggcaucaacgccagcguggugaacauccagaaggagaucgaucggcugaacgagguggccaagaaccugaacgagagccugaucgaccugcaggagcugggcaaguacgagcaguacaucaaguggcccugguacaucuggcugggcuucaucgccggccugaucgccaucgugauggugaccaucaugcugugcugcaugaccagcugcugcagcugccugaagggcuguugcagcugcggcagcugcugcaaguucgacgaggacgacagcgagcccgugcugaagggcgugaagcugcacuacaccugaugacucgagcugguacugcaugcacgcaaugcuagcugccccuuucccguccuggguaccccgagucucccccgaccucgggucccagguaugcucccaccuccaccugccccacucaccaccucugcuaguuccagacaccucccaagcacgcagcaaugcagcucaaaacgcuuagccuagccacacccccacgggaaacagcagugauuaaccuuuagcaauaaacgaaaguuuaacuaagcuauacuaaccccaggguuggucaauuucgugccagccacacccuggagcuagcaaaaaaaaaaaaaaaaaaaaaaaaaaaaaaaaaaaaaaaaaaaaaaaaaaaaaaaaaaaaaaaaaaaaaaaaaaaaaaaaaaaaaaaaaaaaaaaaaaaa

SEQ ID NO: 26318 - RNA, 4273 nt, Artificial Sequence
  SARS-CoV-2/Wuhan/WIV05/2019__EPI_ISL_402128 spike protein mRNA gc (1-1273)(K417N_E484K_N501Y_D614G)
agaauaaacuaguauucuucugguccccacagacucagagagaacccgccaccauguucguguuccuggugcugcugccccuggugagcagccagugcgugaaccugaccacccggacccagcugccaccagccuacaccaacagcuucacccggggcgucuacuaccccgacaagguguuccggagcagcguccugcacagcacccaggaccuguuccugcccuucuucagcaacgugaccugguuccacgccauccacgugagcggcaccaacggcaccaagcgguucgacaaccccgugcugcccuucaacgacggcguguacuucgccagcaccgagaagagcaacaucauccggggcuggaucuucggcaccacccuggacagcaagacccagagccugcugaucgugaauaacgccaccaacguggugaucaaggugugcgaguuccaguucugcaacgaccccuuccugggcguguacuaccacaagaacaacaagagcuggauggagagcgaguuccggguguacagcagcgccaacaacugcaccuucgaguacgugagccagcccuuccugauggaccuggagggcaagcagggcaacuucaagaaccugcgggaguucguguucaagaacaucgacggcuacuucaagaucuacagcaagcacaccccaaucaaccuggugcgggaucugccccagggcuucucagcccuggagccccugguggaccugcccaucggcaucaacaucacccgguuccagacccugcuggcccugcaccggagcuaccugaccccaggcgacagcagcagcggguggacagcaggcgcggcugcuuacuacgugggcuaccugcagccccggaccuuccugcugaaguacaacgagaacggcaccaucaccgacgccguggacugcgcccuggacccucugagcgagaccaagugcacccugaagagcuucaccguggagaagggcaucuaccagaccagcaacuuccgggugcagcccaccgagagcaucgugcgguuccccaacaucaccaaccugugccccuucggcgagguguucaacgccacccgguucgccagcguguacgccuggaaccggaagcggaucagcaacugcguggccgacuacagcgugcuguacaacagcgccagcuucagcaccuucaagugcuacggcgugagccccaccaagcugaacgaccugugcuucaccaacguguacgccgacagcuucgugauccguggcgacgaggugcggcagaucgcacccggccagacaggcaacaucgccgacuacaacuacaagcugcccgacgacuucaccggcugcgugaucgccuggaacagcaacaaccucgacagcaaggugggcggcaacuacaacuaccuguaccggcuguuccggaagagcaaccugaagcccuucgagcgggacaucagcaccgagaucuaccaagccggcuccaccccuugcaacggcgugaagggcuucaacugcuacuucccucugcagagcuacggcuuccagcccaccuacggcgugggcuaccagcccuaccgggugguggugcugagcuucgagcugcugcacgccccagccaccguguguggccccaagaagagcaccaaccuggugaagaacaagugcgugaacuucaacuucaacggccuuaccggcaccggcgugcugaccgagagcaacaagaaauuccugcccuuucagcaguucggccgggacaucgccgacaccaccgacgcugugcgggauccccagacccuggagauccuggacaucaccccuugcagcuucggcggcgugagcgugaucaccccaggcaccaacaccagcaaccagguggccgugcuguaccagggcgugaacugcaccgaggugcccguggccauccacgccgaccagcugacacccaccuggcgggucuacagcaccggcagcaacguguuccagacccgggccgguugccugaucggcgccgagcacgugaacaacagcuacgagugcgacauccccaucggcgccggcaucugugccagcuaccagacccagaccaauucaccccggagggcaaggagcguggccagccagagcaucaucgccuacaccaugagccugggcgccgagaacagcguggccuacagcaacaacagcaucgccauccccaccaacuucaccaucagcgugaccaccgagauucugcccgugagcaugaccaagaccagcguggacugcaccauguacaucugcggcgacagcaccgagugcagcaaccugcugcugcaguacggcagcuucugcacccagcugaaccgggcccugaccggcaucgccguggagcaggacaagaacacccaggagguguucgcccaggugaagcagaucuacaagaccccucccaucaaggacuucggcggcuucaacuucagccagauccugcccgaccccagcaagcccagcaagcggagcuucaucgaggaccugcuguucaacaaggugacccuagccgacgccggcuucaucaagcaguacggcgacugccucggcgacauagccgcccgggaccugaucugcgcccagaaguucaacggccugaccgugcugccuccccugcugaccgacgagaugaucgcccaguacaccagcgcccuguuagccggaaccaucaccagcggcuggacuuucggcgcuggagccgcucugcagauccccuucgccaugcagauggccuaccgguucaacggcaucggcgugacccagaacgugcuguacgagaaccagaagcugaucgccaaccaguucaacagcgccaucggcaagauccaggacagccugagcagcaccgcuagcgcccugggcaagcugcaggacguggugaaccagaacgcccaggcccugaacacccuggugaagcagcugagcagcaacuucggcgccaucagcagcgugcugaacgacauccugagccggcuggacaaggucgaggccgaggugcagaucgaccggcugaucacuggccggcugcagagccugcagaccuacgugacccagcagcugauccgggccgccgagauucgggccagcgccaaccuggccgccaccaagaugagcgagugcgugcugggccagagcaagcggguggacuucugcggcaagggcuaccaccugaugagcuuuccccagagcgcaccccacggagugguguuccugcacgugaccuacgugcccgcccaggagaagaacuucaccaccgccccagccaucugccacgacggcaaggcccacuuuccccgggagggcguguucgugagcaacggcacccacugguucgugacccagcggaacuucuacgagccccagaucaucaccaccgacaacaccuucgugagcggcaacugcgacguggugaucggcaucgugaacaacaccguguacgauccccugcagcccgagcuggacagcuucaaggaggagcuggacaaguacuucaagaaucacaccagccccgacguggaccugggcgacaucagcggcaucaacgccagcguggugaacauccagaaggagaucgaucggcugaacgagguggccaagaaccugaacgagagccugaucgaccugcaggagcugggcaaguacgagcaguacaucaaguggcccugguacaucuggcugggcuucaucgccggccugaucgccaucgugauggugaccaucaugcugugcugcaugaccagcugcugcagcugccugaagggcuguugcagcugcggcagcugcugcaaguucgacgaggacgacagcgagcccgugcugaagggcgugaagcugcacuacaccugaugacucgagcugguacugcaugcacgcaaugcuagcugccccuuucccguccuggguaccccgagucucccccgaccucgggucccagguaugcucccaccuccaccugccccacucaccaccucugcuaguuccagacaccucccaagcacgcagcaaugcagcucaaaacgcuuagccuagccacacccccacgggaaacagcagugauuaaccuuuagcaauaaacgaaaguuuaacuaagcuauacuaaccccaggguuggucaauuucgugccagccacacccuggagcuagcaaaaaaaaaaaaaaaaaaaaaaaaaaaaaaaaaaaaaaaaaaaaaaaaaaaaaaaaaaaaaaaaaaaaaaaaaaaaaaaaaaaaaaaaaaaaaaaaaaaa

SEQ ID NO: 26319 - RNA, 4264 nt, Artificial Sequence
  SARS-CoV-2/Wuhan/WIV05/2019__EPI_ISL_402128 spike protein mRNA gc (1-1273)(L18F_D80A_D215G_L242del_A243del_L244del_R246I_K417N_E484 K_N501Y_D614G_A701V)
agaauaaacuaguauucuucugguccccacagacucagagagaacccgccaccauguucguguuccuggugcugcugccccuggugagcagccagugcgugaacuucaccacccggacccagcugccaccagccuacaccaacagcuucacccggggcgucuacuaccccgacaagguguuccggagcagcguccugcacagcacccaggaccuguuccugcccuucuucagcaacgugaccugguuccacgccauccacgugagcggcaccaacggcaccaagcgguucgccaaccccgugcugcccuucaacgacggcguguacuucgccagcaccgagaagagcaacaucauccggggcuggaucuucggcaccacccuggacagcaagacccagagccugcugaucgugaauaacgccaccaacguggugaucaaggugugcgaguuccaguucugcaacgaccccuuccugggcguguacuaccacaagaacaacaagagcuggauggagagcgaguuccggguguacagcagcgccaacaacugcaccuucgaguacgugagccagcccuuccugauggaccuggagggcaagcagggcaacuucaagaaccugcgggaguucguguucaagaacaucgacggcuacuucaagaucuacagcaagcacaccccaaucaaccuggugcggggccugccccagggcuucucagcccuggagccccugguggaccugcccaucggcaucaacaucacccgguuccagacccugcacaucagcuaccugaccccaggcgacagcagcagcggguggacagcaggcgcggcugcuuacuacgugggcuaccugcagccccggaccuuccugcugaaguacaacgagaacggcaccaucaccgacgccguggacugcgcccuggacccucugagcgagaccaagugcacccugaagagcuucaccguggagaagggcaucuaccagaccagcaacuuccgggugcagcccaccgagagcaucgugcgguuccccaacaucaccaaccugugccccuucggcgagguguucaacgccacccgguucgccagcguguacgccuggaaccggaagcggaucagcaacugcguggccgacuacagcgugcuguacaacagcgccagcuucagcaccuucaagugcuacggcgugagccccaccaagcugaacgaccugugcuucaccaacguguacgccgacagcuucgugauccguggcgacgaggugcggcagaucgcacccggccagacaggcaacaucgccgacuacaacuacaagcugcccgacgacuucaccggcugcgugaucgccuggaacagcaacaaccucgacagcaaggugggcggcaacuacaacuaccuguaccggcuguuccggaagagcaaccugaagcccuucgagcgggacaucagcaccgagaucuaccaagccggcuccaccccuugcaacggcgugaagggcuucaacugcuacuucccucugcagagcuacggcuuccagcccaccuacggcgugggcuaccagcccuaccgggugguggugcugagcuucgagcugcugcacgccccagccaccguguguggccccaagaagagcaccaaccuggugaagaacaagugcgugaacuucaacuucaacggccuuaccggcaccggcgugcugaccgagagcaacaagaaauuccugcccuuucagcaguucggccgggacaucgccgacaccaccgacgcugugcgggauccccagacccuggagauccuggacaucaccccuugcagcuucggcggcgugagcgugaucaccccaggcaccaacaccagcaaccagguggccgugcuguaccagggcgugaacugcaccgaggugcccguggccauccacgccgaccagcugacacccaccuggcgggucuacagcaccggcagcaacguguuccagacccgggccgguugccugaucggcgccgagcacgugaacaacagcuacgagugcgacauccccaucggcgccggcaucugugccagcuaccagacccagaccaauucaccccggagggcaaggagcguggccagccagagcaucaucgccuacaccaugagccugggcguggagaacagcguggccuacagcaacaacagcaucgccauccccaccaacuucaccaucagcgugaccaccgagauucugcccgugagcaugaccaagaccagcguggacugcaccauguacaucugcggcgacagcaccgagugcagcaaccugcugcugcaguacggcagcuucugcacccagcugaaccgggcccugaccggcaucgccguggagcaggacaagaacacccaggagguguucgcccaggugaagcagaucuacaagaccccucccaucaaggacuucggcggcuucaacuucagccagauccugcccgaccccagcaagcccagcaagcggagcuucaucgaggaccugcuguucaacaaggugacccuagccgacgccggcuucaucaagcaguacggcgacugccucggcgacauagccgcccgggaccugaucugcgcccagaaguucaacggccugaccgugcugccuccccugcugaccgacgagaugaucgcccaguacaccagcgcccuguuagccggaaccaucaccagcggcuggacuuucggcgcuggagccgcucugcagauccccuucgccaugcagauggccuaccgguucaacggcaucggcgugacccagaacgugcuguacgagaaccagaagcugaucgccaaccaguucaacagcgccaucggcaagauccaggacagccugagcagcaccgcuagcgcccugggcaagcugcaggacguggugaaccagaacgcccaggcccugaacacccuggugaagcagcugagcagcaacuucggcgccaucagcagcgugcugaacgacauccugagccggcuggacaaggucgaggccgaggugcagaucgaccggcugaucacuggccggcugcagagccugcagaccuacgugacccagcagcugauccgggccgccgagauucgggccagcgccaaccuggccgccaccaagaugagcgagugcgugcugggccagagcaagcggguggacuucugcggcaagggcuaccaccugaugagcuuuccccagagcgcaccccacggagugguguuccugcacgugaccuacgugcccgcccaggagaagaacuucaccaccgccccagccaucugccacgacggcaaggcccacuuuccccgggagggcguguucgugagcaacggcacccacugguucgugacccagcggaacuucuacgagccccagaucaucaccaccgacaacaccuucgugagcggcaacugcgacguggugaucggcaucgugaacaacaccguguacgauccccugcagcccgagcuggacagcuucaaggaggagcuggacaaguacuucaagaaucacaccagccccgacguggaccugggcgacaucagcggcaucaacgccagcguggugaacauccagaaggagaucgaucggcugaacgagguggccaagaaccugaacgagagccugaucgaccugcaggagcugggcaaguacgagcaguacaucaaguggcccugguacaucuggcugggcuucaucgccggccugaucgccaucgugauggugaccaucaugcugugcugcaugaccagcugcugcagcugccugaagggcuguugcagcugcggcagcugcugcaaguucgacgaggacgacagcgagcccgugcugaagggcgugaagcugcacuacaccugaugacucgagcugguacugcaugcacgcaaugcuagcugccccuuucccguccuggguaccccgagucucccccgaccucgggucccagguaugcucccaccuccaccugccccacucaccaccucugcuaguuccagacaccucccaagcacgcagcaaugcagcucaaaacgcuuagccuagccacacccccacgggaaacagcagugauuaaccuuuagcaauaaacgaaaguuuaacuaagcuauacuaaccccaggguuggucaauuucgugccagccacacccuggagcuagcaaaaaaaaaaaaaaaaaaaaaaaaaaaaaaaaaaaaaaaaaaaaaaaaaaaaaaaaaaaaaaaaaaaaaaaaaaaaaaaaaaaaaaaaaaaaaaaaaaaa

SEQ ID NO: 26320 - RNA, 4273 nt, Artificial Sequence
  SARS-CoV-2/Wuhan/WIV05/2019__EPI_ISL_402128 spike protein mRNA gc (1-1273)(E484K_D614G)
agaauaaacuaguauucuucugguccccacagacucagagagaacccgccaccauguucguguuccuggugcugcugccccuggugagcagccagugcgugaaccugaccacccggacccagcugccaccagccuacaccaacagcuucacccggggcgucuacuaccccgacaagguguuccggagcagcguccugcacagcacccaggaccuguuccugcccuucuucagcaacgugaccugguuccacgccauccacgugagcggcaccaacggcaccaagcgguucgacaaccccgugcugcccuucaacgacggcguguacuucgccagcaccgagaagagcaacaucauccggggcuggaucuucggcaccacccuggacagcaagacccagagccugcugaucgugaauaacgccaccaacguggugaucaaggugugcgaguuccaguucugcaacgaccccuuccugggcguguacuaccacaagaacaacaagagcuggauggagagcgaguuccggguguacagcagcgccaacaacugcaccuucgaguacgugagccagcccuuccugauggaccuggagggcaagcagggcaacuucaagaaccugcgggaguucguguucaagaacaucgacggcuacuucaagaucuacagcaagcacaccccaaucaaccuggugcgggaucugccccagggcuucucagcccuggagccccugguggaccugcccaucggcaucaacaucacccgguuccagacccugcuggcccugcaccggagcuaccugaccccaggcgacagcagcagcggguggacagcaggcgcggcugcuuacuacgugggcuaccugcagccccggaccuuccugcugaaguacaacgagaacggcaccaucaccgacgccguggacugcgcccuggacccucugagcgagaccaagugcacccugaagagcuucaccguggagaagggcaucuaccagaccagcaacuuccgggugcagcccaccgagagcaucgugcgguuccccaacaucaccaaccugugccccuucggcgagguguucaacgccacccgguucgccagcguguacgccuggaaccggaagcggaucagcaacugcguggccgacuacagcgugcuguacaacagcgccagcuucagcaccuucaagugcuacggcgugagccccaccaagcugaacgaccugugcuucaccaacguguacgccgacagcuucgugauccguggcgacgaggugcggcagaucgcacccggccagacaggcaagaucgccgacuacaacuacaagcugcccgacgacuucaccggcugcgugaucgccuggaacagcaacaaccucgacagcaaggugggcggcaacuacaacuaccuguaccggcuguuccggaagagcaaccugaagcccuucgagcgggacaucagcaccgagaucuaccaagccggcuccaccccuugcaacggcgugaagggcuucaacugcuacuucccucugcagagcuacggcuuccagcccaccaacggcgugggcuaccagcccuaccgggugguggugcugagcuucgagcugcugcacgccccagccaccguguguggccccaagaagagcaccaaccuggugaagaacaagugcgugaacuucaacuucaacggccuuaccggcaccggcgugcugaccgagagcaacaagaaauuccugcccuuucagcaguucggccgggacaucgccgacaccaccgacgcugugcgggauccccagacccuggagauccuggacaucaccccuugcagcuucggcggcgugagcgugaucaccccaggcaccaacaccagcaaccagguggccgugcuguaccagggcgugaacugcaccgaggugcccguggccauccacgccgaccagcugacacccaccuggcgggucuacagcaccggcagcaacguguuccagacccgggccgguugccugaucggcgccgagcacgugaacaacagcuacgagugcgacauccccaucggcgccggcaucugugccagcuaccagacccagaccaauucaccccggagggcaaggagcguggccagccagagcaucaucgccuacaccaugagccugggcgccgagaacagcguggccuacagcaacaacagcaucgccauccccaccaacuucaccaucagcgugaccaccgagauucugcccgugagcaugaccaagaccagcguggacugcaccauguacaucugcggcgacagcaccgagugcagcaaccugcugcugcaguacggcagcuucugcacccagcugaaccgggcccugaccggcaucgccguggagcaggacaagaacacccaggagguguucgcccaggugaagcagaucuacaagaccccucccaucaaggacuucggcggcuucaacuucagccagauccugcccgaccccagcaagcccagcaagcggagcuucaucgaggaccugcuguucaacaaggugacccuagccgacgccggcuucaucaagcaguacggcgacugccucggcgacauagccgcccgggaccugaucugcgcccagaaguucaacggccugaccgugcugccuccccugcugaccgacgagaugaucgcccaguacaccagcgcccuguuagccggaaccaucaccagcggcuggacuuucggcgcuggagccgcucugcagauccccuucgccaugcagauggccuaccgguucaacggcaucggcgugacccagaacgugcuguacgagaaccagaagcugaucgccaaccaguucaacagcgccaucggcaagauccaggacagccugagcagcaccgcuagcgcccugggcaagcugcaggacguggugaaccagaacgcccaggcccugaacacccuggugaagcagcugagcagcaacuucggcgccaucagcagcgugcugaacgacauccugagccggcuggacaaggucgaggccgaggugcagaucgaccggcugaucacuggccggcugcagagccugcagaccuacgugacccagcagcugauccgggccgccgagauucgggccagcgccaaccuggccgccaccaagaugagcgagugcgugcugggccagagcaagcggguggacuucugcggcaagggcuaccaccugaugagcuuuccccagagcgcaccccacggagugguguuccugcacgugaccuacgugcccgcccaggagaagaacuucaccaccgccccagccaucugccacgacggcaaggcccacuuuccccgggagggcguguucgugagcaacggcacccacugguucgugacccagcggaacuucuacgagccccagaucaucaccaccgacaacaccuucgugagcggcaacugcgacguggugaucggcaucgugaacaacaccguguacgauccccugcagcccgagcuggacagcuucaaggaggagcuggacaaguacuucaagaaucacaccagccccgacguggaccugggcgacaucagcggcaucaacgccagcguggugaacauccagaaggagaucgaucggcugaacgagguggccaagaaccugaacgagagccugaucgaccugcaggagcugggcaaguacgagcaguacaucaaguggcccugguacaucuggcugggcuucaucgccggccugaucgccaucgugauggugaccaucaugcugugcugcaugaccagcugcugcagcugccugaagggcuguugcagcugcggcagcugcugcaaguucgacgaggacgacagcgagcccgugcugaagggcgugaagcugcacuacaccugaugacucgagcugguacugcaugcacgcaaugcuagcugccccuuucccguccuggguaccccgagucucccccgaccucgggucccagguaugcucccaccuccaccugccccacucaccaccucugcuaguuccagacaccucccaagcacgcagcaaugcagcucaaaacgcuuagccuagccacacccccacgggaaacagcagugauuaaccuuuagcaauaaacgaaaguuuaacuaagcuauacuaaccccaggguuggucaauuucgugccagccacacccuggagcuagcaaaaaaaaaaaaaaaaaaaaaaaaaaaaaaaaaaaaaaaaaaaaaaaaaaaaaaaaaaaaaaaaaaaaaaaaaaaaaaaaaaaaaaaaaaaaaaaaaaaa

SEQ ID NO: 26321 - RNA, 4273 nt, Artificial Sequence
  SARS-CoV-2/Wuhan/WIV05/2019__EPI_ISL_402128 spike protein mRNA gc (1-1273)(L18F_T20N_P26S_D138Y_R190S_K417T_E484K_N501Y_D614G_H655Y _T1027I)
agaauaaacuaguauucuucugguccccacagacucagagagaacccgccaccauguucguguuccuggugcugcugccccuggugagcagccagugcgugaacuucaccaaccggacccagcugccaagcgccuacaccaacagcuucacccggggcgucuacuaccccgacaagguguuccggagcagcguccugcacagcacccaggaccuguuccugcccuucuucagcaacgugaccugguuccacgccauccacgugagcggcaccaacggcaccaagcgguucgacaaccccgugcugcccuucaacgacggcguguacuucgccagcaccgagaagagcaacaucauccggggcuggaucuucggcaccacccuggacagcaagacccagagccugcugaucgugaauaacgccaccaacguggugaucaaggugugcgaguuccaguucugcaacuaccccuuccugggcguguacuaccacaagaacaacaagagcuggauggagagcgaguuccggguguacagcagcgccaacaacugcaccuucgaguacgugagccagcccuuccugauggaccuggagggcaagcagggcaacuucaagaaccugagcgaguucguguucaagaacaucgacggcuacuucaagaucuacagcaagcacaccccaaucaaccuggugcgggaucugccccagggcuucucagcccuggagccccugguggaccugcccaucggcaucaacaucacccgguuccagacccugcuggcccugcaccggagcuaccugaccccaggcgacagcagcagcggguggacagcaggcgcggcugcuuacuacgugggcuaccugcagccccggaccuuccugcugaaguacaacgagaacggcaccaucaccgacgccguggacugcgcccuggacccucugagcgagaccaagugcacccugaagagcuucaccguggagaagggcaucuaccagaccagcaacuuccgggugcagcccaccgagagcaucgugcgguuccccaacaucaccaaccugugccccuucggcgagguguucaacgccacccgguucgccagcguguacgccuggaaccggaagcggaucagcaacugcguggccgacuacagcgugcuguacaacagcgccagcuucagcaccuucaagugcuacggcgugagccccaccaagcugaacgaccugugcuucaccaacguguacgccgacagcuucgugauccguggcgacgaggugcggcagaucgcacccggccagacaggcaccaucgccgacuacaacuacaagcugcccgacgacuucaccggcugcgugaucgccuggaacagcaacaaccucgacagcaaggugggcggcaacuacaacuaccuguaccggcuguuccggaagagcaaccugaagcccuucgagcgggacaucagcaccgagaucuaccaagccggcuccaccccuugcaacggcgugaagggcuucaacugcuacuucccucugcagagcuacggcuuccagcccaccuacggcgugggcuaccagcccuaccgggugguggugcugagcuucgagcugcugcacgccccagccaccguguguggccccaagaagagcaccaaccuggugaagaacaagugcgugaacuucaacuucaacggccuuaccggcaccggcgugcugaccgagagcaacaagaaauuccugcccuuucagcaguucggccgggacaucgccgacaccaccgacgcugugcgggauccccagacccuggagauccuggacaucaccccuugcagcuucggcggcgugagcgugaucaccccaggcaccaacaccagcaaccagguggccgugcuguaccagggcgugaacugcaccgaggugcccguggccauccacgccgaccagcugacacccaccuggcgggucuacagcaccggcagcaacguguuccagacccgggccgguugccugaucggcgccgaguacgugaacaacagcuacgagugcgacauccccaucggcgccggcaucugugccagcuaccagacccagaccaauucaccccggagggcaaggagcguggccagccagagcaucaucgccuacaccaugagccugggcgccgagaacagcguggccuacagcaacaacagcaucgccauccccaccaacuucaccaucagcgugaccaccgagauucugcccgugagcaugaccaagaccagcguggacugcaccauguacaucugcggcgacagcaccgagugcagcaaccugcugcugcaguacggcagcuucugcacccagcugaaccgggcccugaccggcaucgccguggagcaggacaagaacacccaggagguguucgcccaggugaagcagaucuacaagaccccucccaucaaggacuucggcggcuucaacuucagccagauccugcccgaccccagcaagcccagcaagcggagcuucaucgaggaccugcuguucaacaaggugacccuagccgacgccggcuucaucaagcaguacggcgacugccucggcgacauagccgcccgggaccugaucugcgcccagaaguucaacggccugaccgugcugccuccccugcugaccgacgagaugaucgcccaguacaccagcgcccuguuagccggaaccaucaccagcggcuggacuuucggcgcuggagccgcucugcagauccccuucgccaugcagauggccuaccgguucaacggcaucggcgugacccagaacgugcuguacgagaaccagaagcugaucgccaaccaguucaacagcgccaucggcaagauccaggacagccugagcagcaccgcuagcgcccugggcaagcugcaggacguggugaaccagaacgcccaggcccugaacacccuggugaagcagcugagcagcaacuucggcgccaucagcagcgugcugaacgacauccugagccggcuggacaaggucgaggccgaggugcagaucgaccggcugaucacuggccggcugcagagccugcagaccuacgugacccagcagcugauccgggccgccgagauucgggccagcgccaaccuggccgccaucaagaugagcgagugcgugcugggccagagcaagcggguggacuucugcggcaagggcuaccaccugaugagcuuuccccagagcgcaccccacggagugguguuccugcacgugaccuacgugcccgcccaggagaagaacuucaccaccgccccagccaucugccacgacggcaaggcccacuuuccccgggagggcguguucgugagcaacggcacccacugguucgugacccagcggaacuucuacgagccccagaucaucaccaccgacaacaccuucgugagcggcaacugcgacguggugaucggcaucgugaacaacaccguguacgauccccugcagcccgagcuggacagcuucaaggaggagcuggacaaguacuucaagaaucacaccagccccgacguggaccugggcgacaucagcggcaucaacgccagcguggugaacauccagaaggagaucgaucggcugaacgagguggccaagaaccugaacgagagccugaucgaccugcaggagcugggcaaguacgagcaguacaucaaguggcccugguacaucuggcugggcuucaucgccggccugaucgccaucgugauggugaccaucaugcugugcugcaugaccagcugcugcagcugccugaagggcuguugcagcugcggcagcugcugcaaguucgacgaggacgacagcgagcccgugcugaagggcgugaagcugcacuacaccugaugacucgagcugguacugcaugcacgcaaugcuagcugccccuuucccguccuggguaccccgagucucccccgaccucgggucccagguaugcucccaccuccaccugccccacucaccaccucugcuaguuccagacaccucccaagcacgcagcaaugcagcucaaaacgcuuagccuagccacacccccacgggaaacagcagugauuaaccuuuagcaauaaacgaaaguuuaacuaagcuauacuaaccccaggguuggucaauuucgugccagccacacccuggagcuagcaaaaaaaaaaaaaaaaaaaaaaaaaaaaaaaaaaaaaaaaaaaaaaaaaaaaaaaaaaaaaaaaaaaaaaaaaaaaaaaaaaaaaaaaaaaaaaaaaaaa

SEQ ID NO: 26322 - RNA, 4273 nt, Artificial Sequence
  SARS-CoV-2/Wuhan/WIV05/2019__EPI_ISL_402128 spike protein mRNA gc (1-1273)(S13I_W152C_L452R_D614G)
agaauaaacuaguauucuucugguccccacagacucagagagaacccgccaccauguucguguuccuggugcugcugccccuggugagcauccagugcgugaaccugaccacccggacccagcugccaccagccuacaccaacagcuucacccggggcgucuacuaccccgacaagguguuccggagcagcguccugcacagcacccaggaccuguuccugcccuucuucagcaacgugaccugguuccacgccauccacgugagcggcaccaacggcaccaagcgguucgacaaccccgugcugcccuucaacgacggcguguacuucgccagcaccgagaagagcaacaucauccggggcuggaucuucggcaccacccuggacagcaagacccagagccugcugaucgugaauaacgccaccaacguggugaucaaggugugcgaguuccaguucugcaacgaccccuuccugggcguguacuaccacaagaacaacaagagcugcauggagagcgaguuccggguguacagcagcgccaacaacugcaccuucgaguacgugagccagcccuuccugauggaccuggagggcaagcagggcaacuucaagaaccugcgggaguucguguucaagaacaucgacggcuacuucaagaucuacagcaagcacaccccaaucaaccuggugcgggaucugccccagggcuucucagcccuggagccccugguggaccugcccaucggcaucaacaucacccgguuccagacccugcuggcccugcaccggagcuaccugaccccaggcgacagcagcagcggguggacagcaggcgcggcugcuuacuacgugggcuaccugcagccccggaccuuccugcugaaguacaacgagaacggcaccaucaccgacgccguggacugcgcccuggacccucugagcgagaccaagugcacccugaagagcuucaccguggagaagggcaucuaccagaccagcaacuuccgggugcagcccaccgagagcaucgugcgguuccccaacaucaccaaccugugccccuucggcgagguguucaacgccacccgguucgccagcguguacgccuggaaccggaagcggaucagcaacugcguggccgacuacagcgugcuguacaacagcgccagcuucagcaccuucaagugcuacggcgugagccccaccaagcugaacgaccugugcuucaccaacguguacgccgacagcuucgugauccguggcgacgaggugcggcagaucgcacccggccagacaggcaagaucgccgacuacaacuacaagcugcccgacgacuucaccggcugcgugaucgccuggaacagcaacaaccucgacagcaaggugggcggcaacuacaacuaccgcuaccggcuguuccggaagagcaaccugaagcccuucgagcgggacaucagcaccgagaucuaccaagccggcuccaccccuugcaacggcguggagggcuucaacugcuacuucccucugcagagcuacggcuuccagcccaccaacggcgugggcuaccagcccuaccgggugguggugcugagcuucgagcugcugcacgccccagccaccguguguggccccaagaagagcaccaaccuggugaagaacaagugcgugaacuucaacuucaacggccuuaccggcaccggcgugcugaccgagagcaacaagaaauuccugcccuuucagcaguucggccgggacaucgccgacaccaccgacgcugugcgggauccccagacccuggagauccuggacaucaccccuugcagcuucggcggcgugagcgugaucaccccaggcaccaacaccagcaaccagguggccgugcuguaccagggcgugaacugcaccgaggugcccguggccauccacgccgaccagcugacacccaccuggcgggucuacagcaccggcagcaacguguuccagacccgggccgguugccugaucggcgccgagcacgugaacaacagcuacgagugcgacauccccaucggcgccggcaucugugccagcuaccagacccagaccaauucaccccggagggcaaggagcguggccagccagagcaucaucgccuacaccaugagccugggcgccgagaacagcguggccuacagcaacaacagcaucgccauccccaccaacuucaccaucagcgugaccaccgagauucugcccgugagcaugaccaagaccagcguggacugcaccauguacaucugcggcgacagcaccgagugcagcaaccugcugcugcaguacggcagcuucugcacccagcugaaccgggcccugaccggcaucgccguggagcaggacaagaacacccaggagguguucgcccaggugaagcagaucuacaagaccccucccaucaaggacuucggcggcuucaacuucagccagauccugcccgaccccagcaagcccagcaagcggagcuucaucgaggaccugcuguucaacaaggugacccuagccgacgccggcuucaucaagcaguacggcgacugccucggcgacauagccgcccgggaccugaucugcgcccagaaguucaacggccugaccgugcugccuccccugcugaccgacgagaugaucgcccaguacaccagcgcccuguuagccggaaccaucaccagcggcuggacuuucggcgcuggagccgcucugcagauccccuucgccaugcagauggccuaccgguucaacggcaucggcgugacccagaacgugcuguacgagaaccagaagcugaucgccaaccaguucaacagcgccaucggcaagauccaggacagccugagcagcaccgcuagcgcccugggcaagcugcaggacguggugaaccagaacgcccaggcccugaacacccuggugaagcagcugagcagcaacuucggcgccaucagcagcgugcugaacgacauccugagccggcuggacaaggucgaggccgaggugcagaucgaccggcugaucacuggccggcugcagagccugcagaccuacgugacccagcagcugauccgggccgccgagauucgggccagcgccaaccuggccgccaccaagaugagcgagugcgugcugggccagagcaagcggguggacuucugcggcaagggcuaccaccugaugagcuuuccccagagcgcaccccacggagugguguuccugcacgugaccuacgugcccgcccaggagaagaacuucaccaccgccccagccaucugccacgacggcaaggcccacuuuccccgggagggcguguucgugagcaacggcacccacugguucgugacccagcggaacuucuacgagccccagaucaucaccaccgacaacaccuucgugagcggcaacugcgacguggugaucggcaucgugaacaacaccguguacgauccccugcagcccgagcuggacagcuucaaggaggagcuggacaaguacuucaagaaucacaccagccccgacguggaccugggcgacaucagcggcaucaacgccagcguggugaacauccagaaggagaucgaucggcugaacgagguggccaagaaccugaacgagagccugaucgaccugcaggagcugggcaaguacgagcaguacaucaaguggcccugguacaucuggcugggcuucaucgccggccugaucgccaucgugauggugaccaucaugcugugcugcaugaccagcugcugcagcugccugaagggcuguugcagcugcggcagcugcugcaaguucgacgaggacgacagcgagcccgugcugaagggcgugaagcugcacuacaccugaugacucgagcugguacugcaugcacgcaaugcuagcugccccuuucccguccuggguaccccgagucucccccgaccucgggucccagguaugcucccaccuccaccugccccacucaccaccucugcuaguuccagacaccucccaagcacgcagcaaugcagcucaaaacgcuuagccuagccacacccccacgggaaacagcagugauuaaccuuuagcaauaaacgaaaguuuaacuaagcuauacuaaccccaggguuggucaauuucgugccagccacacccuggagcuagcaaaaaaaaaaaaaaaaaaaaaaaaaaaaaaaaaaaaaaaaaaaaaaaaaaaaaaaaaaaaaaaaaaaaaaaaaaaaaaaaaaaaaaaaaaaaaaaaaaaa

SEQ ID NO: 26323 - RNA, 4273 nt, Artificial Sequence
  SARS-CoV-2/Wuhan/WIV05/2019__EPI_ISL_402128 spike protein mRNA gc (1-1273)
agaauaaacuaguauucuucugguccccacagacucagagagaacccgccaccauguucguguuccuggugcugcugccccuggugagcagccagugcgugaaccugaccacccggacccagcugcccccugccuacaccaacagcuucacccggggcguguacuaccccgacaagguguuccggagcagcgugcugcacagcacccaggaccuguuccugcccuucuucagcaacgugaccugguuccacgccauccacgugagcggcaccaacggcaccaagcgguucgacaacccagugcugcccuucaacgacggcguguacuucgccagcaccgagaagucaaacaucauccggggcuggaucuucggcaccacccuggacagcaagacacagagccugcugaucgugaacaacgccaccaacguggugaucaaggugugcgaguuucaguucugcaacgaccccuuccugggcguguacuaccacaagaacaacaagagcuggauggagagcgaguuccgggucuacagcagcgcuaacaauugcaccuucgaguacgugagccagcccuuccugauggaccucgagggcaagcagggcaacuucaagaaccugcgggaguucguguucaagaacaucgauggcuacuucaagaucuacagcaagcacacccccaucaaccuggugcgggaccugccccagggauucagcgcccuggagccucugguggaccugcccaucggcaucaacaucaccagguuccagacccugcuggcccugcaccggagcuaccugacccccggcgacagcagcagcggcuggaccgccggcgccgccgcauacuacgugggcuaccugcagccacggaccuuccugcugaaguacaacgagaacggcaccaucaccgacgccguggacugcgcccuggacccccugagcgagaccaagugcacccuaaagagcuucaccguggagaagggcaucuaccagaccagcaacuuccgggugcagcccacugagagcaucgugcgguuccccaacauuaccaaccugugucccuucggcgagguguucaacgccacccgguucgccagcguguacgccuggaaccggaagcggaucagcaacugcguggccgacuacagcgugcuguacaacagcgccagcuucagcaccuucaagugcuacggcgugagcccuaccaagcugaacgaccugugcuucaccaacguguacgcugacagcuucgugauccggggcgacgaggugcggcagaucgcccccggccagaccggcaagaucgccgacuacaacuacaagcugcccgacgacuucaccggcugcgugaucgccuggaacagcaacaaccuggacagcaaggugggcggcaacuacaacuaccuguaccggcuguuccguaagagcaaccugaagccauucgagcgggacaucagcaccgagaucuaccaggccggcagcacccccugcaacgguguggagggcuuuaacugcuacuucccccugcagagcuacggcuuccagcccaccaacggcgugggcuaccagcccuaccgggugguggugcugagcuucgagcugcugcacgcccccgccaccgugugcggcccuaaaaagagcaccaaccuggugaagaacaagugcgugaacuucaauuucaacggccugaccggcaccggcgugcugaccgagagcaacaagaaguuccugcccuuccagcaguucggccgggauaucgccgacaccaccgacgcagugcgggacccccagacccuggagauccuggacaucaccccaugcagcuucggcggcgugagcgucaucacccccggcacaaacaccagcaaccagguggccgugcuguaccaggacgugaacugcaccgaggugcccguggccauccacgccgaccagcugacccccaccuggcggguguacagcaccggaagcaacguguuccagacccgggccggcugccugaucggcgccgagcacgugaacaacuccuacgagugcgacauccccaucggcgcuggcaucugcgccagcuaccagacccagaccaacagcccccggcgggcccggagcguggccagccagagcaucaucgccuacaccaugagcuuaggcgccgagaacagcguggccuacagcaacaacagcaucgcgaucccuaccaacuucaccaucagcgugaccaccgagauacugcccgugagcaugaccaagaccagcguggacuguaccauguacaucugcggcgacagcaccgagugcagcaaccugcugcugcaguacggcagcuucugcacccagcugaaccgggcccugaccggcaucgccguggagcaggacaagaacacccaagagguguucgcccaggugaagcagaucuacaagacucccccaaucaaggacuucggcggcuucaacuucagccagauccugcccgaccccagcaagcccagcaagcggagcuucaucgaggaccugcuguucaacaaggugacccuggccgacgccggcuucaucaagcaguacggcgauugccugggcgacaucgccgcucgggaccugaucugcgcccagaaguucaacgggcugaccgugcugcccccucugcugaccgacgagaugaucgcccaguacaccagcgcccugcuugccggcaccaucaccagcggcuggaccuucggcgccggcgcagcccugcagauccccuucgccaugcagauggccuaccgguucaacggcaucggcgugacccagaacgugcuguacgagaaccagaagcugaucgccaaccaguucaacagcgccaucggcaagauccaggacagccugagcagcaccgccagcgcccugggcaagcugcaggacguggugaaccagaacgcucaggcccugaacacccuggugaagcagcugagcagcaacuucggcgccaucagcucagugcugaaugacauccugagcaggcuggacaagguggaggccgaggugcagaucgaccggcugaucaccggccggcugcagagccugcagaccuacgugacccagcagcugauccgggccgccgagauccgggccagcgccaaccuggcagccaccaagaugagcgagugcgugcugggccagagcaagcggguggacuuuugcggcaagggcuaccaccugaugagcuucccccagagcgccccacacggcgugguguuccuccacgucacauacgugcccgcccaggagaagaacuucaccaccgcccccgccauuugccacgacggcaaggcucacuucccccgggagggcguguucgugagcaacggaacccacugguucgugacccagcggaacuucuacgagccccagaucaucaccaccgacaacaccuucgugagcggcaacugcgacguggugaucggcaucgugaacaacaccguguacgacccccugcagccugagcuggacagcuucaaggaggagcuggacaaguacuucaagaaccacaccagccccgauguggaccugggcgacaucagcggcaucaacgccagcguggugaacauccagaaggagaucgaccggcugaacgagguggccaagaaccugaacgagagccugaucgaccugcaggagcugggcaaguacgagcaguacaucaaguggcccugguacaucuggcugggcuucaucgccggccugaucgccaucgugauggugaccaucaugcugugcugcaugaccagcugcuguagcugccugaagggcugcugcagcugcggcagcugcugcaaguucgacgaggacgacagcgagccagugcugaagggcgugaagcugcacuacaccugaugacucgagcugguacugcaugcacgcaaugcuagcugccccuuucccguccuggguaccccgagucucccccgaccucgggucccagguaugcucccaccuccaccugccccacucaccaccucugcuaguuccagacaccucccaagcacgcagcaaugcagcucaaaacgcuuagccuagccacacccccacgggaaacagcagugauuaaccuuuagcaauaaacgaaaguuuaacuaagcuauacuaaccccaggguuggucaauuucgugccagccacacccuggagcuagcaaaaaaaaaaaaaaaaaaaaaaaaaaaaaaaaaaaaaaaaaaaaaaaaaaaaaaaaaaaaaaaaaaaaaaaaaaaaaaaaaaaaaaaaaaaaaaaaaaaa

SEQ ID NO: 26324 - RNA, 4273 nt, Artificial Sequence
  SARS-CoV-2/Wuhan/WIV05/2019__EPI_ISL_402128 spike protein mRNA gc (1-1273)(D614G)
agaauaaacuaguauucuucugguccccacagacucagagagaacccgccaccauguucguguuccuggugcugcugccccuggugagcagccagugcgugaaccugaccacccggacccagcugcccccugccuacaccaacagcuucacccggggcguguacuaccccgacaagguguuccggagcagcgugcugcacagcacccaggaccuguuccugcccuucuucagcaacgugaccugguuccacgccauccacgugagcggcaccaacggcaccaagcgguucgacaacccagugcugcccuucaacgacggcguguacuucgccagcaccgagaagucaaacaucauccggggcuggaucuucggcaccacccuggacagcaagacacagagccugcugaucgugaacaacgccaccaacguggugaucaaggugugcgaguuucaguucugcaacgaccccuuccugggcguguacuaccacaagaacaacaagagcuggauggagagcgaguuccgggucuacagcagcgcuaacaauugcaccuucgaguacgugagccagcccuuccugauggaccucgagggcaagcagggcaacuucaagaaccugcgggaguucguguucaagaacaucgauggcuacuucaagaucuacagcaagcacacccccaucaaccuggugcgggaccugccccagggauucagcgcccuggagccucugguggaccugcccaucggcaucaacaucaccagguuccagacccugcuggcccugcaccggagcuaccugacccccggcgacagcagcagcggcuggaccgccggcgccgccgcauacuacgugggcuaccugcagccacggaccuuccugcugaaguacaacgagaacggcaccaucaccgacgccguggacugcgcccuggacccccugagcgagaccaagugcacccuaaagagcuucaccguggagaagggcaucuaccagaccagcaacuuccgggugcagcccacugagagcaucgugcgguuccccaacauuaccaaccugugucccuucggcgagguguucaacgccacccgguucgccagcguguacgccuggaaccggaagcggaucagcaacugcguggccgacuacagcgugcuguacaacagcgccagcuucagcaccuucaagugcuacggcgugagcccuaccaagcugaacgaccugugcuucaccaacguguacgcugacagcuucgugauccggggcgacgaggugcggcagaucgcccccggccagaccggcaagaucgccgacuacaacuacaagcugcccgacgacuucaccggcugcgugaucgccuggaacagcaacaaccuggacagcaaggugggcggcaacuacaacuaccuguaccggcuguuccguaagagcaaccugaagccauucgagcgggacaucagcaccgagaucuaccaggccggcagcacccccugcaacgguguggagggcuuuaacugcuacuucccccugcagagcuacggcuuccagcccaccaacggcgugggcuaccagcccuaccgggugguggugcugagcuucgagcugcugcacgcccccgccaccgugugcggcccuaaaaagagcaccaaccuggugaagaacaagugcgugaacuucaauuucaacggccugaccggcaccggcgugcugaccgagagcaacaagaaguuccugcccuuccagcaguucggccgggauaucgccgacaccaccgacgcagugcgggacccccagacccuggagauccuggacaucaccccaugcagcuucggcggcgugagcgucaucacccccggcacaaacaccagcaaccagguggccgugcuguaccagggagugaacugcaccgaggugcccguggccauccacgccgaccagcugacccccaccuggcggguguacagcaccggcagcaacguguuccagacccgggccggcugccugaucggcgccgagcacgugaacaacuccuacgagugcgacauccccaucggcgcuggcaucugcgccagcuaccagacccagaccaacagcccccggcgggcccggagcguggccagccagagcaucaucgccuacaccaugagcuuaggcgccgagaacagcguggccuacagcaacaacagcaucgcgaucccuaccaacuucaccaucagcgugaccaccgagauacugcccgugagcaugaccaagaccagcguggacuguaccauguacaucugcggcgacagcaccgagugcagcaaccugcugcugcaguacggcagcuucugcacccagcugaaccgggcccugaccggcaucgccguggagcaggacaagaacacccaagagguguucgcccaggugaagcagaucuacaagacucccccaaucaaggacuucggcggcuucaacuucagccagauccugcccgaccccagcaagcccagcaagcggagcuucaucgaggaccugcuguucaacaaggugacccuggccgacgccggcuucaucaagcaguacggcgacugccugggggauaucgccgcucgggaccugaucugcgcccagaaguucaacggccugaccgugcugcccccucugcugaccgacgagaugaucgcccaguacaccagcgcccugcuugccggcaccaucaccagcggcuggaccuucggcgccggcgcagcccugcagauccccuucgccaugcagauggccuaccgguucaacggcaucggcgugacccagaacgugcuguacgagaaccagaagcugaucgccaaccaguucaacagcgccaucggcaagauccaggacagccugagcagcaccgccagcgcccugggcaagcugcaggacguggugaaccagaacgcucaggcccugaacacccuggugaagcagcugagcagcaacuucggcgccaucagcucagugcugaaugacauccugagcaggcuggacaagguggaggccgaggugcagaucgaccggcugaucaccggccggcugcagagccugcagaccuacgugacccagcagcugauccgggccgccgagauccgggccagcgccaaccuggcagccaccaagaugagcgagugcgugcugggccagagcaagcggguggacuuuugcggcaagggcuaccaccugaugagcuucccccagagcgccccacacggcgugguguuccuccacgucacauacgugcccgcccaggagaagaacuucaccaccgcccccgccauuugccacgacggcaaggcucacuucccccgggagggaguguucgugagcaacggcacccacugguucgugacccagcggaacuucuacgagccccagaucaucaccaccgacaacaccuucgugagcggcaacugcgacguggugaucggcaucgugaacaacaccguguacgacccccugcagccugagcuggacagcuucaaggaggagcuggacaaguacuucaagaaccacaccagccccgacguggaucugggcgacaucagcggcaucaacgccagcguggugaacauccagaaggagaucgaccggcugaacgagguggccaagaaccugaacgagagccugaucgaccugcaggagcugggcaaguacgagcaguacaucaaguggcccugguacaucuggcugggcuucaucgccggccugaucgccaucgugauggugaccaucaugcugugcugcaugaccagcugcuguagcugccugaagggcugcugcagcugcggcagcugcugcaaguucgacgaggacgacagcgagccagugcugaagggcgugaagcugcacuacaccugaugacucgagcugguacugcaugcacgcaaugcuagcugccccuuucccguccuggguaccccgagucucccccgaccucgggucccagguaugcucccaccuccaccugccccacucaccaccucugcuaguuccagacaccucccaagcacgcagcaaugcagcucaaaacgcuuagccuagccacacccccacgggaaacagcagugauuaaccuuuagcaauaaacgaaaguuuaacuaagcuauacuaaccccaggguuggucaauuucgugccagccacacccuggagcuagcaaaaaaaaaaaaaaaaaaaaaaaaaaaaaaaaaaaaaaaaaaaaaaaaaaaaaaaaaaaaaaaaaaaaaaaaaaaaaaaaaaaaaaaaaaaaaaaaaaaa

SEQ ID NO: 26325 - RNA, 4273 nt, Artificial Sequence
  SARS-CoV-2/Wuhan/WIV05/2019__EPI_ISL_402128 spike protein mRNA gc (1-1273)(A222V_D614G)
agaauaaacuaguauucuucugguccccacagacucagagagaacccgccaccauguucguguuccuggugcugcugccccuggugagcagccagugcgugaaccugaccacccggacccagcugcccccugccuacaccaacagcuucacccggggcguguacuaccccgacaagguguuccggagcagcgugcugcacagcacccaggaccuguuccugcccuucuucagcaacgugaccugguuccacgccauccacgugagcggcaccaacggcaccaagcgguucgacaacccagugcugcccuucaacgacggcguguacuucgccagcaccgagaagucaaacaucauccggggcuggaucuucggcaccacccuggacagcaagacacagagccugcugaucgugaacaacgccaccaacguggugaucaaggugugcgaguuucaguucugcaacgaccccuuccugggcguguacuaccacaagaacaacaagagcuggauggagagcgaguuccgggucuacagcagcgcuaacaauugcaccuucgaguacgugagccagcccuuccugauggaccucgagggcaagcagggcaacuucaagaaccugcgggaguucguguucaagaacaucgauggcuacuucaagaucuacagcaagcacacccccaucaaccuggugcgggaccugccccagggauucagcgugcuggagccucugguggaccugcccaucggcaucaacaucaccagguuccagacccugcuggcccugcaccggagcuaccugacccccggcgacagcagcagcggcuggaccgccggcgccgccgccuacuacgugggcuaccugcagccacggaccuuccugcugaaguacaacgagaacggcaccaucaccgacgcaguggacugcgcccuggacccccugagcgagaccaagugcacccuaaagagcuucaccguggagaagggcaucuaccagaccagcaacuuccgggugcagcccacugagagcaucgugcgguuccccaacauuaccaaccugugucccuucggcgagguguucaacgccacccgguucgccagcguguacgccuggaaccggaagcggaucagcaacugcguggccgacuacagcgugcuguacaacagcgccagcuucagcaccuucaagugcuacggcgugagcccuaccaagcugaacgaccugugcuucaccaacguguacgccgacagcuucgugauccggggcgacgaggugcggcagaucgcucccggccagaccggcaagaucgccgacuacaacuacaagcugcccgacgacuucaccggcugcgugaucgccuggaacagcaacaaccuggacagcaaggugggcggcaacuacaacuaccuguaccggcuguuccguaagagcaaccugaagccauucgagcgggacaucagcaccgagaucuaccaggccggcagcacccccugcaacgguguggagggcuuuaacugcuacuucccccugcagagcuacggcuuccagcccaccaacggcgugggcuaccagcccuaccgggugguggugcugagcuucgagcugcugcacgcccccgccaccgugugcggcccuaaaaagagcaccaaccuggugaagaacaagugcgugaacuucaauuucaacggccugaccggcaccggcgugcugaccgagagcaacaagaaguuccugcccuuccagcaguucggccgggauaucgccgacaccaccgacgccgugcgggacccccagacccuggagauccuggacaucaccccaugcagcuucggcggcgucagcgugaucacccccggcacaaacaccagcaaccagguggcagugcuguaccagggagugaacugcaccgaggugcccguggccauccacgccgaccagcugacccccaccuggcggguguacagcaccggcagcaacguguuccagacccgggccggcugccugaucggcgccgagcacgugaacaacuccuacgagugcgacauccccaucggcgccggcaucugcgcuagcuaccagacccagaccaacagcccccggcgggcccggagcguggccagccagagcaucaucgccuacaccaugagcuuaggcgccgagaacagcguggccuacagcaacaacagcaucgccaucccuaccaacuucaccaucagcgugaccaccgagauacugcccgugagcaugaccaagaccagcguggacuguaccauguacaucugcggcgacagcaccgagugcagcaaccugcugcugcaguacggcagcuucugcacccagcugaaccgggcgcugaccggcaucgccguggagcaggacaagaacacccaagagguguucgcccaggugaagcagaucuacaagacucccccaaucaaggacuucggcggcuucaacuucagccagauccugcccgaccccagcaagcccagcaagcggagcuucaucgaggaccugcuguucaacaaggugacccuggccgacgccggcuucaucaagcaguacggcgacugccugggggauaucgccgcccgggaccugaucugcgcucagaaguucaacggccugaccgugcugcccccucugcugaccgacgagaugaucgcccaguacaccagcgcccugcuugccggcaccaucaccagcggcuggaccuucggcgccggcgccgcacugcagauccccuucgccaugcagauggccuaccgguucaacggcaucggcgugacccagaacgugcuguacgagaaccagaagcugaucgccaaccaguucaacagcgccaucggcaagauccaggacagccugagcagcaccgccagcgcccugggcaagcugcaggacguggugaaccagaacgcccaggcucugaacacccuggugaagcagcugagcagcaacuucggcgccaucagcucagugcugaaugacauccugagcaggcuggacaagguggaggccgaggugcagaucgaccggcugaucaccggccggcugcagagccugcagaccuacgugacccagcagcugauccgggccgccgagauccgggccagcgccaaccuggccgcaaccaagaugagcgagugcgugcugggccagagcaagcggguggacuuuugcggcaagggcuaccaccugaugagcuucccccagagcgccccacacggcguggucuuccuccacgugacauacgugcccgcccaggagaagaacuucaccaccgcccccgccauuugccacgacggcaaggcccacuucccccgggagggaguguucgugagcaacggcacccacugguucgugacccagcggaacuucuacgagccccagaucaucaccaccgacaacaccuucgugagcggcaacugcgacguggugaucggcaucgugaacaacaccguguacgacccccugcagccugagcuggacagcuucaaggaggagcuggacaaguacuucaagaaccacaccagccccgacguggaucugggcgacaucagcggcaucaacgcuagcguggugaacauccagaaggagaucgaccggcugaacgagguggccaagaaccugaacgagagccugaucgaccugcaggagcugggcaaguacgagcaguacaucaaguggcccugguacaucuggcugggcuucaucgccggccugaucgccaucgugauggugaccaucaugcugugcugcaugaccagcugcuguagcugccugaagggcugcugcagcugcggcagcugcugcaaguucgacgaggacgacagcgagccagugcugaagggcgugaagcugcacuacaccugaugacucgagcugguacugcaugcacgcaaugcuagcugccccuuucccguccuggguaccccgagucucccccgaccucgggucccagguaugcucccaccuccaccugccccacucaccaccucugcuaguuccagacaccucccaagcacgcagcaaugcagcucaaaacgcuuagccuagccacacccccacgggaaacagcagugauuaaccuuuagcaauaaacgaaaguuuaacuaagcuauacuaaccccaggguuggucaauuucgugccagccacacccuggagcuagcaaaaaaaaaaaaaaaaaaaaaaaaaaaaaaaaaaaaaaaaaaaaaaaaaaaaaaaaaaaaaaaaaaaaaaaaaaaaaaaaaaaaaaaaaaaaaaaaaaaa

SEQ ID NO: 26326 - RNA, 4273 nt, Artificial Sequence
  SARS-CoV-2/Wuhan/WIV05/2019__EPI_ISL_402128 spike protein mRNA gc (1-1273)(N439K_D614G)
agaauaaacuaguauucuucugguccccacagacucagagagaacccgccaccauguucguguuccuggugcugcugccccuggugagcagccagugcgugaaccugaccacccggacccagcugcccccugccuacaccaacagcuucacccggggcguguacuaccccgacaagguguuccggagcagcgugcugcacagcacccaggaccuguuccugcccuucuucagcaacgugaccugguuccacgccauccacgugagcggcaccaacggcaccaagcgguucgacaacccagugcugcccuucaacgacggcguguacuucgccagcaccgagaagucaaacaucauccggggcuggaucuucggcaccacccuggacagcaagacacagagccugcugaucgugaacaacgccaccaacguggugaucaaggugugcgaguuucaguucugcaacgaccccuuccugggcguguacuaccacaagaacaacaagagcuggauggagagcgaguuccgggucuacagcagcgcuaacaauugcaccuucgaguacgugagccagcccuuccugauggaccucgagggcaagcagggcaacuucaagaaccugcgggaguucguguucaagaacaucgauggcuacuucaagaucuacagcaagcacacccccaucaaccuggugcgggaccugccccagggauucagcgcccuggagccucugguggaccugcccaucggcaucaacaucaccagguuccagacccugcuggcccugcaccggagcuaccugacccccggcgacagcagcagcggcuggaccgccggcgccgccgcauacuacgugggcuaccugcagccacggaccuuccugcugaaguacaacgagaacggcaccaucaccgacgccguggacugcgcccuggacccccugagcgagaccaagugcacccuaaagagcuucaccguggagaagggcaucuaccagaccagcaacuuccgggugcagcccacugagagcaucgugcgguuccccaacauuaccaaccugugucccuucggcgagguguucaacgccacccgguucgccagcguguacgccuggaaccggaagcggaucagcaacugcguggccgacuacagcgugcuguacaacagcgccagcuucagcaccuucaagugcuacggcgugagcccuaccaagcugaacgaccugugcuucaccaacguguacgcugacagcuucgugauccggggcgacgaggugcggcagaucgcccccggccagaccggcaagaucgccgacuacaacuacaagcugcccgacgacuucaccggcugcgugaucgccuggaacagcaagaaccuggacagcaaggugggcggcaacuacaacuaccuguaccggcuguuccguaagagcaaccugaagccauucgagcgggacaucagcaccgagaucuaccaggccggcagcacccccugcaacgguguggagggcuuuaacugcuacuucccccugcagagcuacggcuuccagcccaccaacggcgugggcuaccagcccuaccgggugguggugcugagcuucgagcugcugcacgcccccgccaccgugugcggcccuaaaaagagcaccaaccuggugaagaacaagugcgugaacuucaacuucaauggccugaccggcaccggcgugcugaccgagagcaacaagaaguuccugcccuuccagcaguucggccgggauaucgccgacaccaccgacgcagugcgggacccccagacccuggagauccuggacaucaccccaugcagcuucggcggcgugagcgucaucacccccggcacaaacaccagcaaccagguggccgugcuguaccagggagugaacugcaccgaggugcccguggccauccacgccgaccagcugacccccaccuggcggguguacagcaccggcagcaacguguuccagacccgggccggcugccugaucggcgccgagcacgugaacaacuccuacgagugcgacauccccaucggcgcuggcaucugcgccagcuaccagacccagaccaacagcccccggcgggcccggagcguggccagccagagcaucaucgccuacaccaugagcuuaggcgccgagaacagcguggccuacagcaacaacagcaucgcgaucccuaccaacuucaccaucagcgugaccaccgagauacugcccgugagcaugaccaagaccagcguggacuguaccauguacaucugcggcgacagcaccgagugcagcaaccugcugcugcaguacggcagcuucugcacccagcugaaccgggcccugaccggcaucgccguggagcaggacaagaacacccaagagguguucgcccaggugaagcagaucuacaagacucccccaaucaaggacuucggcggcuucaacuucagccagauccugcccgaccccagcaagcccagcaagcggagcuucaucgaggaccugcuguucaacaaggugacccuggccgacgccggcuucaucaagcaguacggcgacugccugggggauaucgccgcucgggaccugaucugcgcccagaaguucaacggccugaccgugcugcccccucugcugaccgacgagaugaucgcccaguacaccagcgcccugcuugccggcaccaucaccagcggcuggaccuucggcgccggcgcagcccugcagauccccuucgccaugcagauggccuaccgguucaacggcaucggcgugacccagaacgugcuguacgagaaccagaagcugaucgccaaccaguucaacagcgccaucggcaagauccaggacagccugagcagcaccgccagcgcccugggcaagcugcaggacguggugaaccagaacgcucaggcccugaacacccuggugaagcagcugagcagcaacuucggcgccaucagcucagugcugaacgacauccugagcaggcuggacaagguggaggccgaggugcagaucgaccggcugaucaccggccggcugcagagccugcagaccuacgugacccagcagcugauccgggccgccgagauccgggccagcgccaaucuggcagccaccaagaugagcgagugcgugcugggccagagcaagcggguggacuuuugcggcaagggcuaccaccugaugagcuucccccagagcgccccacacggcgugguguuccuccacgucacauacgugcccgcccaggagaagaacuucaccaccgcccccgccauuugccacgacggcaaggcucacuucccccgggagggaguguucgugagcaacggcacccacugguucgugacccagcggaacuucuacgagccccagaucaucaccaccgacaacaccuucgugagcggcaacugcgacguggugaucggcaucgugaacaacaccguguacgacccccugcagccugagcuggacagcuucaaggaggagcuggacaaguacuucaagaaccacaccagccccgacguggaucugggcgacaucagcggcaucaacgccagcguggugaacauccagaaggagaucgaccggcugaacgagguggccaagaaccugaacgagagccugaucgaccugcaggagcugggcaaguacgagcaguacaucaaguggcccugguacaucuggcugggcuucaucgccggccugaucgccaucgugauggugaccaucaugcugugcugcaugaccagcugcuguagcugccugaagggcugcugcagcugcggcagcugcugcaaguucgacgaggacgacagcgagccagugcugaagggcgugaagcugcacuacaccugaugacucgagcugguacugcaugcacgcaaugcuagcugccccuuucccguccuggguaccccgagucucccccgaccucgggucccagguaugcucccaccuccaccugccccacucaccaccucugcuaguuccagacaccucccaagcacgcagcaaugcagcucaaaacgcuuagccuagccacacccccacgggaaacagcagugauuaaccuuuagcaauaaacgaaaguuuaacuaagcuauacuaaccccaggguuggucaauuucgugccagccacacccuggagcuagcaaaaaaaaaaaaaaaaaaaaaaaaaaaaaaaaaaaaaaaaaaaaaaaaaaaaaaaaaaaaaaaaaaaaaaaaaaaaaaaaaaaaaaaaaaaaaaaaaaaa

SEQ ID NO: 26327 - RNA, 4273 nt, Artificial Sequence
  SARS-CoV-2/Wuhan/WIV05/2019__EPI_ISL_402128 spike protein mRNA gc (1-1273)(S477N_D614G)
agaauaaacuaguauucuucugguccccacagacucagagagaacccgccaccauguucguguuccuggugcugcugccccuggugagcagccagugcgugaaccugaccacccggacccagcugcccccugccuacaccaacagcuucacccggggcguguacuaccccgacaagguguuccggagcagcgugcugcacagcacccaggaccuguuccugcccuucuucagcaacgugaccugguuccacgccauccacgugagcggcaccaacggcaccaagcgguucgacaacccagugcugcccuucaacgacggcguguacuucgccagcaccgagaagucaaacaucauccggggcuggaucuucggcaccacccuggacagcaagacacagagccugcugaucgugaacaacgccaccaacguggugaucaaggugugcgaguuucaguucugcaacgaccccuuccugggcguguacuaccacaagaacaacaagagcuggauggagagcgaguuccgggucuacagcagcgcuaacaauugcaccuucgaguacgugagccagcccuuccugauggaccucgagggcaagcagggcaacuucaagaaccugcgggaguucguguucaagaacaucgauggcuacuucaagaucuacagcaagcacacccccaucaaccuggugcgggaccugccccagggauucagcgcccuggagccucugguggaccugcccaucggcaucaacaucaccagguuccagacccugcuggcccugcaccggagcuaccugacccccggcgacagcagcagcggcuggaccgccggcgccgccgcauacuacgugggcuaccugcagccacggaccuuccugcugaaguacaacgagaacggcaccaucaccgacgccguggacugcgcccuggacccccugagcgagaccaagugcacccuaaagagcuucaccguggagaagggcaucuaccagaccagcaacuuccgggugcagcccacugagagcaucgugcgguuccccaacauuaccaaccugugucccuucggcgagguguucaacgccacccgguucgccagcguguacgccuggaaccggaagcggaucagcaacugcguggccgacuacagcgugcuguacaacagcgccagcuucagcaccuucaagugcuacggcgugagcccuaccaagcugaacgaccugugcuucaccaacguguacgcugacagcuucgugauccggggcgacgaggugcggcagaucgcccccggccagaccggcaagaucgccgacuacaacuacaagcugcccgacgacuucaccggcugcgugaucgccuggaacagcaacaaccuggacagcaaggugggcggcaacuacaacuaccuguaccggcuguuccguaagagcaaccugaagccauucgagcgggacaucagcaccgagaucuaccaggccggcaacacccccugcaacgguguggagggcuuuaacugcuacuucccccugcagagcuacggcuuccagcccaccaacggcgugggcuaccagcccuaccgggugguggugcugagcuucgagcugcugcacgcccccgccaccgugugcggcccuaaaaagagcaccaaccuggugaagaacaagugcgugaauuucaacuucaacggccugaccggcaccggcgugcugaccgagagcaacaagaaguuccugcccuuccagcaguucggccgggauaucgccgacaccaccgacgcagugcgggacccccagacccuggagauccuggacaucaccccaugcagcuucggcggcgugagcgucaucacccccggcacaaacaccagcaaccagguggccgugcuguaccagggagugaacugcaccgaggugcccguggccauccacgccgaccagcugacccccaccuggcggguguacagcaccggcagcaacguguuccagacccgggccggcugccugaucggcgccgagcacgugaacaacagcuacgagugcgacauccccaucggcgcuggcaucugcgccuccuaccagacccagaccaacagcccccggcgggcccggagcguggccagccagagcaucaucgccuacaccaugagcuuaggcgccgagaacagcguggccuacagcaacaacagcaucgcgaucccuaccaacuucaccaucagcgugaccaccgagauacugcccgugagcaugaccaagaccagcguggacuguaccauguacaucugcggcgacagcaccgagugcagcaaccugcugcugcaguacggcagcuucugcacccagcugaaccgggcccugaccggcaucgccguggagcaggacaagaacacccaagagguguucgcccaggugaagcagaucuacaagacucccccaaucaaggacuucggcggcuucaacuucagccagauccugcccgaccccagcaagcccagcaagcggagcuucaucgaggaccugcuguucaacaaggugacccuggccgacgccggcuucaucaagcaguacggcgacugccugggggauaucgccgcucgggaccugaucugcgcccagaaguucaacggccugaccgugcugcccccucugcugaccgacgagaugaucgcccaguacaccagcgcccugcuugccggcaccaucaccagcggcuggaccuucggcgccggcgcagcccugcagauccccuucgccaugcagauggccuaccgguucaacggcaucggcgugacccagaacgugcuguacgagaaccagaagcugaucgccaaccaguucaacagcgccaucggcaagauccaggacagccugagcagcaccgccagcgcccugggcaagcugcaggacguggugaaccagaacgcucaggcccugaacacccuggugaagcagcugagcagcaauuucggcgccaucagcagcgugcugaacgacauccugucaaggcuggacaagguggaggccgaggugcagaucgaccggcugaucaccggccggcugcagagccugcagaccuacgugacccagcagcugauccgggccgccgagauccgggccagcgccaaccuggcagccaccaagaugagcgagugcgugcugggccagagcaagcggguggacuuuugcggcaagggcuaccaccugaugagcuucccccagagcgccccacacggcgugguguuccuccacgucacauacgugcccgcccaggagaagaacuucaccaccgcccccgccauuugccacgacggcaaggcucacuucccccgggagggaguguucgugagcaacggcacccacugguucgugacccagcggaacuucuacgagccccagaucaucaccaccgacaacaccuucgugagcggcaacugcgacguggugaucggcaucgugaacaacaccguguacgacccccugcagccugagcuggacagcuucaaggaggagcuggacaaguacuucaagaaccacaccagccccgacguggaucugggcgacaucagcggcaucaacgccagcguggugaacauccagaaggagaucgaccggcugaacgagguggccaagaaccugaacgagagccugaucgaccugcaggagcugggcaaguacgagcaguacaucaaguggcccugguacaucuggcugggcuucaucgccggccugaucgccaucgugauggugaccaucaugcugugcugcaugaccagcugcuguagcugccugaagggcugcugcagcugcggcagcugcugcaaguucgacgaggacgacagcgagccagugcugaagggcgugaagcugcacuacaccugaugacucgagcugguacugcaugcacgcaaugcuagcugccccuuucccguccuggguaccccgagucucccccgaccucgggucccagguaugcucccaccuccaccugccccacucaccaccucugcuaguuccagacaccucccaagcacgcagcaaugcagcucaaaacgcuuagccuagccacacccccacgggaaacagcagugauuaaccuuuagcaauaaacgaaaguuuaacuaagcuauacuaaccccaggguuggucaauuucgugccagccacacccuggagcuagcaaaaaaaaaaaaaaaaaaaaaaaaaaaaaaaaaaaaaaaaaaaaaaaaaaaaaaaaaaaaaaaaaaaaaaaaaaaaaaaaaaaaaaaaaaaaaaaaaaaa

SEQ ID NO: 26328 - RNA, 4273 nt, Artificial Sequence
  SARS-CoV-2/Wuhan/WIV05/2019__EPI_ISL_402128 spike protein mRNA gc (1-1273)(N501Y_D614G)
agaauaaacuaguauucuucugguccccacagacucagagagaacccgccaccauguucguguuccuggugcugcugccccuggugagcagccagugcgugaaccugaccacccggacccagcugcccccugccuacaccaacagcuucacccggggcguguacuaccccgacaagguguuccggagcagcgugcugcacagcacccaggaccuguuccugcccuucuucagcaacgugaccugguuccacgccauccacgugagcggcaccaacggcaccaagcgguucgacaacccagugcugcccuucaacgacggcguguacuucgccagcaccgagaagucaaacaucauccggggcuggaucuucggcaccacccuggacagcaagacacagagccugcugaucgugaacaacgccaccaacguggugaucaaggugugcgaguuucaguucugcaacgaccccuuccugggcguguacuaccacaagaacaacaagagcuggauggagagcgaguuccgggucuacagcagcgcuaacaauugcaccuucgaguacgugagccagcccuuccugauggaccucgagggcaagcagggcaacuucaagaaccugcgggaguucguguucaagaacaucgauggcuacuucaagaucuacagcaagcacacccccaucaaccuggugcgggaccugccccagggauucagcgcccuggagccucugguggaccugcccaucggcaucaacaucaccagguuccagacccugcuggcccugcaccggagcuaccugacccccggcgacagcagcagcggcuggaccgccggcgccgccgcauacuacgugggcuaccugcagccacggaccuuccugcugaaguacaacgagaacggcaccaucaccgacgccguggacugcgcccuggacccccugagcgagaccaagugcacccuaaagagcuucaccguggagaagggcaucuaccagaccagcaacuuccgggugcagcccacugagagcaucgugcgguuccccaacauuaccaaccugugucccuucggcgagguguucaacgccacccgguucgccagcguguacgccuggaaccggaagcggaucagcaacugcguggccgacuacagcgugcuguacaacagcgccagcuucagcaccuucaagugcuacggcgugagcccuaccaagcugaacgaccugugcuucaccaacguguacgcugacagcuucgugauccggggcgacgaggugcggcagaucgcccccggccagaccggcaagaucgccgacuacaacuacaagcugcccgacgacuucaccggcugcgugaucgccuggaacagcaacaaccuggacagcaaggugggcggcaacuacaacuaccuguaccggcuguuccguaagagcaaccugaagccauucgagcgggacaucagcaccgagaucuaccaggccggcagcacccccugcaacgguguggagggcuuuaacugcuacuucccccugcagagcuacggcuuccagcccaccuacggcgugggcuaccagcccuaccgggugguggugcugagcuucgagcugcugcacgcccccgccaccgugugcggcccuaaaaagagcaccaaccuggugaagaacaagugcgugaacuucaacuucaauggccugaccggcaccggcgugcugaccgagagcaacaagaaguuccugcccuuccagcaguucggccgggauaucgccgacaccaccgacgcagugcgggacccccagacccuggagauccuggacaucaccccaugcagcuucggcggcgugagcgucaucacccccggcacaaacaccagcaaccagguggccgugcuguaccagggagugaacugcaccgaggugcccguggccauccacgccgaccagcugacccccaccuggcggguguacagcaccggcagcaacguguuccagacccgggccggcugccugaucggcgccgagcacgugaacaacuccuacgagugcgacauccccaucggcgcuggcaucugcgccagcuaccagacccagaccaacagcccccggcgggcccggagcguggccagccagagcaucaucgccuacaccaugagcuuaggcgccgagaacagcguggccuacagcaacaacagcaucgcgaucccuaccaacuucaccaucagcgugaccaccgagauacugcccgugagcaugaccaagaccagcguggacuguaccauguacaucugcggcgacagcaccgagugcagcaaccugcugcugcaguacggcagcuucugcacccagcugaaccgggcccugaccggcaucgccguggagcaggacaagaacacccaagagguguucgcccaggugaagcagaucuacaagacucccccaaucaaggacuucggcggcuucaacuucagccagauccugcccgaccccagcaagcccagcaagcggagcuucaucgaggaccugcuguucaacaaggugacccuggccgacgccggcuucaucaagcaguacggcgacugccugggggauaucgccgcucgggaccugaucugcgcccagaaguucaacggccugaccgugcugcccccucugcugaccgacgagaugaucgcccaguacaccagcgcccugcuugccggcaccaucaccagcggcuggaccuucggcgccggcgcagcccugcagauccccuucgccaugcagauggccuaccgguucaacggcaucggcgugacccagaacgugcuguacgagaaccagaagcugaucgccaaccaguucaacagcgccaucggcaagauccaggacagccugagcagcaccgccagcgcccugggcaagcugcaggacguggugaaccagaacgcucaggcccugaacacccuggugaagcagcugagcagcaacuucggcgccaucagcucagugcugaacgacauccugagcaggcuggacaagguggaggccgaggugcagaucgaccggcugaucaccggccggcugcagagccugcagaccuacgugacccagcagcugauccgggccgccgagauccgggccagcgccaaucuggcagccaccaagaugagcgagugcgugcugggccagagcaagcggguggacuuuugcggcaagggcuaccaccugaugagcuucccccagagcgccccacacggcgugguguuccuccacgucacauacgugcccgcccaggagaagaacuucaccaccgcccccgccauuugccacgacggcaaggcucacuucccccgggagggaguguucgugagcaacggcacccacugguucgugacccagcggaacuucuacgagccccagaucaucaccaccgacaacaccuucgugagcggcaacugcgacguggugaucggcaucgugaacaacaccguguacgacccccugcagccugagcuggacagcuucaaggaggagcuggacaaguacuucaagaaccacaccagccccgacguggaucugggcgacaucagcggcaucaacgccagcguggugaacauccagaaggagaucgaccggcugaacgagguggccaagaaccugaacgagagccugaucgaccugcaggagcugggcaaguacgagcaguacaucaaguggcccugguacaucuggcugggcuucaucgccggccugaucgccaucgugauggugaccaucaugcugugcugcaugaccagcugcuguagcugccugaagggcugcugcagcugcggcagcugcugcaaguucgacgaggacgacagcgagccagugcugaagggcgugaagcugcacuacaccugaugacucgagcugguacugcaugcacgcaaugcuagcugccccuuucccguccuggguaccccgagucucccccgaccucgggucccagguaugcucccaccuccaccugccccacucaccaccucugcuaguuccagacaccucccaagcacgcagcaaugcagcucaaaacgcuuagccuagccacacccccacgggaaacagcagugauuaaccuuuagcaauaaacgaaaguuuaacuaagcuauacuaaccccaggguuggucaauuucgugccagccacacccuggagcuagcaaaaaaaaaaaaaaaaaaaaaaaaaaaaaaaaaaaaaaaaaaaaaaaaaaaaaaaaaaaaaaaaaaaaaaaaaaaaaaaaaaaaaaaaaaaaaaaaaaaa

SEQ ID NO: 26329 - RNA, 4267 nt, Artificial Sequence
  SARS-CoV-2/Wuhan/WIV05/2019__EPI_ISL_402128 spike protein mRNA gc (1-1273)(H69del_V70del_D614G)
agaauaaacuaguauucuucugguccccacagacucagagagaacccgccaccauguucguguuccuggugcugcugccccuggugagcagccagugcgugaaccugaccacccggacccagcugcccccugccuacaccaacagcuucacccggggcguguacuaccccgacaagguguuccggagcagcgugcugcacagcacccaggaccuguuccugcccuucuucagcaacgugaccugguuccacgccaucagcggcaccaacggcaccaagcgguucgacaacccagugcugcccuucaacgacggcguguacuucgccagcaccgagaagucaaacaucauccggggcuggaucuucggcaccacccuggacagcaagacacagagccugcugaucgugaacaacgccaccaacguggugaucaaggugugcgaguuucaguucugcaacgaccccuuccugggcguguacuaccacaagaacaacaagagcuggauggagagcgaguuccggguguacagcagcgcuaacaauugcaccuucgaguacgucagccagcccuuccugauggaccucgagggcaagcagggcaacuucaagaaccugcgggaguucguguucaagaacaucgauggcuacuucaagaucuacagcaagcacacccccaucaaccuggugcgggaccugccccagggauucagcgcccuggagccucugguggaccugcccaucggcaucaacaucaccagguuccagacccugcuggcccugcaccggagcuaccugacccccggcgacagcagcagcggcuggaccgccggcgccgccgcauacuacgugggcuaccugcagccacggaccuuccugcugaaguacaacgagaacggcaccaucaccgacgccguggacugcgcccuggacccccugagcgagaccaagugcacccuaaagagcuucaccguggagaagggcaucuaccagaccagcaacuuccgggugcagcccacugagagcaucgugcgguuccccaacauuaccaaccugugucccuucggcgagguguucaacgccacccgguucgccagcguguacgccuggaaccggaagcggaucagcaacugcguggccgacuacagcgugcuguacaacagcgccagcuucagcaccuucaagugcuacggcgugagcccuaccaagcugaacgaccugugcuucaccaacguguacgcugacagcuucgugauccggggcgacgaggugcggcagaucgcccccggccagaccggcaagaucgccgacuacaacuacaagcugcccgacgacuucaccggcugcgugaucgccuggaacagcaacaaccuggacagcaaggugggcggcaacuacaacuaccuguaccggcuguuccguaagagcaaccugaagccauucgagcgggacaucagcaccgagaucuaccaggccggcagcacccccugcaacgguguggagggcuuuaacugcuacuucccccugcagagcuacggcuuccagcccaccaacggcgugggcuaccagcccuaccgggugguggugcugagcuucgagcugcugcacgcccccgccaccgugugcggcccuaaaaagagcaccaaccuggugaagaacaagugcgugaacuucaauuucaacggccugaccggcaccggcgugcugaccgagagcaacaagaaguuccugcccuuccagcaguucggccgggauaucgccgacaccaccgacgcagugcgggacccccagacccuggagauccuggacaucaccccaugcagcuucggcggcgugagcgugaucacccccggcacaaacaccagcaaccaggucgccgugcuguaccagggagugaacugcaccgaggugcccguggccauccacgccgaccagcugacccccaccuggcggguguacagcaccggcagcaacguguuccagacccgggccggcugccugaucggcgccgagcacgugaacaacuccuacgagugcgacauccccaucggcgcuggcaucugcgccagcuaccagacccagaccaacagcccccggcgggcccggagcguggccagccagagcaucaucgccuacaccaugagcuuaggcgccgagaacagcguggccuacagcaacaacagcaucgcgaucccuaccaacuucaccaucagcgugaccaccgagauacugcccgugagcaugaccaagaccagcguggacuguaccauguacaucugcggcgacagcaccgagugcagcaaccugcugcugcaguacggcagcuucugcacccagcugaaccgggcccugaccggcaucgccguggagcaggacaagaacacccaagagguguucgcccaggugaagcagaucuacaagacucccccaaucaaggacuucggcggcuucaacuucagccagauccugcccgaccccagcaagcccagcaagcggagcuucaucgaggaccugcuguucaacaaggugacccuggccgacgccggcuucaucaagcaguacggcgacugccugggggauaucgccgcucgggaccugaucugcgcccagaaguucaacggccugaccgugcugcccccucugcugaccgacgagaugaucgcccaguacaccagcgcccugcuugccggcaccaucaccagcggcuggaccuucggcgccggcgcagcccugcagauccccuucgccaugcagauggccuaccgguucaacggcaucggcgugacccagaacgugcuguacgagaaccagaagcugaucgccaaccaguucaacagcgccaucggcaagauccaggacagccugagcagcaccgccagcgcccugggcaagcugcaggacguggugaaccagaacgcucaggcccugaacacccuggugaagcagcugagcagcaacuucggcgccaucagcucagugcugaaugacauccugagcaggcuggacaagguggaggccgaggugcagaucgaccggcugaucaccggccggcugcagagccugcagaccuacgugacccagcagcugauccgggccgccgagauccgggccagcgccaaccuggcagccaccaagaugagcgagugcgugcugggccagagcaagcggguggacuuuugcggcaagggcuaccaccugaugagcuucccccagagcgccccacacggcgugguguuccuccacgugacauacguccccgcccaggagaagaacuucaccaccgcccccgccauuugccacgacggcaaggcucacuucccccgggagggaguguucgugagcaacggcacccacugguucgugacccagcggaacuucuacgagccccagaucaucaccaccgacaacaccuucgugagcggcaacugcgacguggugaucggcaucgugaacaacaccguguacgacccccugcagccugagcuggacagcuucaaggaggagcuggacaaguacuucaagaaccacaccagccccgacguggaucugggcgacaucagcggcaucaacgccagcguggugaacauccagaaggagaucgaccggcugaacgagguggccaagaaccugaacgagagccugaucgaccugcaggagcugggcaaguacgagcaguacaucaaguggcccugguacaucuggcugggcuucaucgccggccugaucgccaucgugauggugaccaucaugcugugcugcaugaccagcugcuguagcugccugaagggcugcugcagcugcggcagcugcugcaaguucgacgaggacgacagcgagccagugcugaagggcgugaagcugcacuacaccugaugacucgagcugguacugcaugcacgcaaugcuagcugccccuuucccguccuggguaccccgagucucccccgaccucgggucccagguaugcucccaccuccaccugccccacucaccaccucugcuaguuccagacaccucccaagcacgcagcaaugcagcucaaaacgcuuagccuagccacacccccacgggaaacagcagugauuaaccuuuagcaauaaacgaaaguuuaacuaagcuauacuaaccccaggguuggucaauuucgugccagccacacccuggagcuagcaaaaaaaaaaaaaaaaaaaaaaaaaaaaaaaaaaaaaaaaaaaaaaaaaaaaaaaaaaaaaaaaaaaaaaaaaaaaaaaaaaaaaaaaaaaaaaaaaaaa

SEQ ID NO: 26330 - RNA, 4273 nt, Artificial Sequence
  SARS-CoV-2/Wuhan/WIV05/2019__EPI_ISL_402128 spike protein mRNA gc (1-1273)(Y453F_D614G)
agaauaaacuaguauucuucugguccccacagacucagagagaacccgccaccauguucguguuccuggugcugcugccccuggugagcagccagugcgugaaccugaccacccggacccagcugcccccugccuacaccaacagcuucacccggggcguguacuaccccgacaagguguuccggagcagcgugcugcacagcacccaggaccuguuccugcccuucuucagcaacgugaccugguuccacgccauccacgugagcggcaccaacggcaccaagcgguucgacaacccagugcugcccuucaacgacggcguguacuucgccagcaccgagaagucaaacaucauccggggcuggaucuucggcaccacccuggacagcaagacacagagccugcugaucgugaacaacgccaccaacguggugaucaaggugugcgaguuucaguucugcaacgaccccuuccugggcguguacuaccacaagaacaacaagagcuggauggagagcgaguuccgggucuacagcagcgcuaacaauugcaccuucgaguacgugagccagcccuuccugauggaccucgagggcaagcagggcaacuucaagaaccugcgggaguucguguucaagaacaucgauggcuacuucaagaucuacagcaagcacacccccaucaaccuggugcgggaccugccccagggauucagcgcccuggagccucugguggaccugcccaucggcaucaacaucaccagguuccagacccugcuggcccugcaccggagcuaccugacccccggcgacagcagcagcggcuggaccgccggcgccgccgcauacuacgugggcuaccugcagccacggaccuuccugcugaaguacaacgagaacggcaccaucaccgacgccguggacugcgcccuggacccccugagcgagaccaagugcacccuaaagagcuucaccguggagaagggcaucuaccagaccagcaacuuccgggugcagcccacugagagcaucgugcgguuccccaacauuaccaaccugugucccuucggcgagguguucaacgccacccgguucgccagcguguacgccuggaaccggaagcggaucagcaacugcguggccgacuacagcgugcuguacaacagcgccagcuucagcaccuucaagugcuacggcgugagcccuaccaagcugaacgaccugugcuucaccaacguguacgcugacagcuucgugauccggggcgacgaggugcggcagaucgcccccggccagaccggcaagaucgccgacuacaacuacaagcugcccgacgacuucaccggcugcgugaucgccuggaacagcaacaaccuggacagcaaggugggcggcaacuacaacuaccuguuccggcuguuccguaagagcaaccugaagccauuugagcgggacaucagcaccgagaucuaccaggccggcagcacccccugcaacgguguggagggcuucaacugcuacuucccccugcagagcuacggcuuccagcccaccaacggcgugggcuaccagcccuaccgggugguggugcugagcuucgagcugcugcacgcccccgccaccgugugcggcccuaaaaagagcaccaaccuggugaagaacaagugcgugaacuucaauuucaacggccugaccggcaccggcgugcugaccgagagcaacaagaaguuccugcccuuccagcaguucggccgggauaucgccgacaccaccgacgcagugcgggacccccagacccuggagauccuggacaucaccccaugcagcuucggcggcgugagcgucaucacccccggcacaaacaccagcaaccagguggccgugcuguaccagggagugaacugcaccgaggugcccguggccauccacgccgaccagcugacccccaccuggcggguguacagcaccggcagcaacguguuccagacccgggccggcugccugaucggcgccgagcacgugaacaacuccuacgagugcgacauccccaucggcgcuggcaucugcgccagcuaccagacccagaccaacagcccccggcgggcccggagcguggccagccagagcaucaucgccuacaccaugagcuuaggcgccgagaacagcguggccuacagcaacaacagcaucgcgaucccuaccaacuucaccaucagcgugaccaccgagauacugcccgugagcaugaccaagaccagcguggacuguaccauguacaucugcggcgacagcaccgagugcagcaaccugcugcugcaguacggcagcuucugcacccagcugaaccgggcccugaccggcaucgccguggagcaggacaagaacacccaagagguguucgcccaggugaagcagaucuacaagacucccccaaucaaggacuucggcggcuucaacuucagccagauccugcccgaccccagcaagcccagcaagcggagcuucaucgaggaccugcuguucaacaaggugacccuggccgacgccggcuucaucaagcaguacggcgacugccugggggauaucgccgcucgggaccugaucugcgcccagaaguucaacggccugaccgugcugcccccucugcugaccgacgagaugaucgcccaguacaccagcgcccugcuugccggcaccaucaccagcggcuggaccuucggcgccggcgcagcccugcagauccccuucgccaugcagauggccuaccgguucaacggcaucggcgugacccagaacgugcuguacgagaaccagaagcugaucgccaaccaguucaacagcgccaucggcaagauccaggacagccugagcagcaccgccagcgcccugggcaagcugcaggacguggugaaccagaacgcucaggcccugaacacccuggugaagcagcugagcagcaacuuuggcgccaucagcucagugcugaaugacauccugagcaggcuggacaagguggaggccgaggugcagaucgaccggcugaucaccggccggcugcagagccugcagaccuacgugacccagcagcugauccgggccgccgagauccgggccagcgccaaccuggcagccaccaagaugagcgagugcgugcugggccagagcaagcggguggacuucugcggcaagggcuaccaccugaugagcuucccccagagcgccccacacggcgugguguuccuccacgucacauacgugcccgcccaggagaagaacuucaccaccgcccccgccauuugccacgacggcaaggcucacuucccccgggagggaguguucgugagcaacggcacccacugguucgugacccagcggaacuucuacgagccccagaucaucaccaccgacaacaccuucgugagcggcaacugcgacguggugaucggcaucgugaacaacaccguguacgacccccugcagccugagcuggacagcuucaaggaggagcuggacaaguacuucaagaaccacaccagccccgacguggaucugggcgacaucagcggcaucaacgccagcguggugaacauccagaaggagaucgaccggcugaacgagguggccaagaaccugaacgagagccugaucgaccugcaggagcugggcaaguacgagcaguacaucaaguggcccugguacaucuggcugggcuucaucgccggccugaucgccaucgugauggugaccaucaugcugugcugcaugaccagcugcuguagcugccugaagggcugcugcagcugcggcagcugcugcaaguucgacgaggacgacagcgagccagugcugaagggcgugaagcugcacuacaccugaugacucgagcugguacugcaugcacgcaaugcuagcugccccuuucccguccuggguaccccgagucucccccgaccucgggucccagguaugcucccaccuccaccugccccacucaccaccucugcuaguuccagacaccucccaagcacgcagcaaugcagcucaaaacgcuuagccuagccacacccccacgggaaacagcagugauuaaccuuuagcaauaaacgaaaguuuaacuaagcuauacuaaccccaggguuggucaauuucgugccagccacacccuggagcuagcaaaaaaaaaaaaaaaaaaaaaaaaaaaaaaaaaaaaaaaaaaaaaaaaaaaaaaaaaaaaaaaaaaaaaaaaaaaaaaaaaaaaaaaaaaaaaaaaaaaa

SEQ ID NO: 26331 - RNA, 4273 nt, Artificial Sequence
  SARS-CoV-2/Wuhan/WIV05/2019__EPI_ISL_402128 spike protein mRNA gc (1-1273)(D614G_I692V)
agaauaaacuaguauucuucugguccccacagacucagagagaacccgccaccauguucguguuccuggugcugcugccccuggugagcagccagugcgugaaccugaccacccggacccagcugcccccugccuacaccaacagcuucacccggggcguguacuaccccgacaagguguuccggagcagcgugcugcacagcacccaggaccuguuccugcccuucuucagcaacgugaccugguuccacgccauccacgugagcggcaccaacggcaccaagcgguucgacaacccagugcugcccuucaacgacggcguguacuucgccagcaccgagaagucaaacaucauccggggcuggaucuucggcaccacccuggacagcaagacacagagccugcugaucgugaacaacgccaccaacguggugaucaaggugugcgaguuucaguucugcaacgaccccuuccugggcguguacuaccacaagaacaacaagagcuggauggagagcgaguuccgggucuacagcagcgcuaacaauugcaccuucgaguacgugagccagcccuuccugauggaccucgagggcaagcagggcaacuucaagaaccugcgggaguucguguucaagaacaucgauggcuacuucaagaucuacagcaagcacacccccaucaaccuggugcgggaccugccccagggauucagcgcccuggagccucugguggaccugcccaucggcaucaacaucaccagguuccagacccugcuggcccugcaccggagcuaccugacccccggcgacagcagcagcggcuggaccgccggcgccgccgcauacuacgugggcuaccugcagccacggaccuuccugcugaaguacaacgagaacggcaccaucaccgacgccguggacugcgcccuggacccccugagcgagaccaagugcacccuaaagagcuucaccguggagaagggcaucuaccagaccagcaacuuccgggugcagcccacugagagcaucgugcgguuccccaacauuaccaaccugugucccuucggcgagguguucaacgccacccgguucgccagcguguacgccuggaaccggaagcggaucagcaacugcguggccgacuacagcgugcuguacaacagcgccagcuucagcaccuucaagugcuacggcgugagcccuaccaagcugaacgaccugugcuucaccaacguguacgcugacagcuucgugauccggggcgacgaggugcggcagaucgcccccggccagaccggcaagaucgccgacuacaacuacaagcugcccgacgacuucaccggcugcgugaucgccuggaacagcaacaaccuggacagcaaggugggcggcaacuacaacuaccuguaccggcuguuccguaagagcaaccugaagccauucgagcgggacaucagcaccgagaucuaccaggccggcagcacccccugcaacgguguggagggcuuuaacugcuacuucccccugcagagcuacggcuuccagcccaccaacggcgugggcuaccagcccuaccgggugguggugcugagcuucgagcugcugcacgcccccgccaccgugugcggcccuaaaaagagcaccaaccuggugaagaacaagugcgugaacuucaauuucaacggccugaccggcaccggcgugcugaccgagagcaacaagaaguuccugcccuuccagcaguucggccgggauaucgccgacaccaccgacgcagugcgggacccccagacccuggagauccuggacaucaccccaugcagcuucggcggcgugagcgucaucacccccggcacaaacaccagcaaccagguggccgugcuguaccagggagugaacugcaccgaggugcccguggccauccacgccgaccagcugacccccaccuggcggguguacagcaccggcagcaacguguuccagacccgggccggcugccugaucggcgccgagcacgugaacaacuccuacgagugcgacauccccaucggcgcuggcaucugcgccagcuaccagacccagaccaacagcccccggcgggcccggagcguggccagccagagcgugaucgccuacaccaugagcuuaggcgccgagaacagcguggccuacagcaacaacagcaucgcgaucccuaccaacuucaccaucagcgugaccaccgagauccugcccgugagcaugaccaagaccagcguggacuguaccauguacauaugcggcgacagcaccgagugcagcaaccugcugcugcaguacggcagcuucugcacccagcugaaccgggcccugaccggcaucgccguggagcaggacaagaacacccaagagguguucgcccaggugaagcagaucuacaagacucccccaaucaaggacuucggcggcuucaacuucagccagauccugcccgaccccagcaagcccagcaagcggagcuucaucgaggaccugcuguucaacaaggugacccuggccgacgccggcuucaucaagcaguacggcgacugccugggggauaucgccgcucgggaccugaucugcgcccagaaguucaacggccugaccgugcugcccccucugcugaccgacgagaugaucgcccaguacaccagcgcccugcuugccggcaccaucaccagcggcuggaccuucggcgccggcgcagcccugcagauccccuucgccaugcagauggccuaccgguucaacggcaucggcgugacccagaacgugcuguacgagaaccagaagcugaucgccaaccaguucaacagcgccaucggcaagauccaggacagccugagcagcaccgccagcgcccugggcaagcugcaggacguggugaaccagaacgcucaggcccugaacacccuggugaagcagcugagcagcaacuucggcgccaucagcucagugcugaaugacauccugagcaggcuggacaagguggaggccgaggugcagaucgaccggcugaucaccggccggcugcagagccugcagaccuacgugacccagcagcugauccgggccgccgagauccgggccagcgccaaccuggcagccaccaagaugagcgagugcgugcugggccagagcaagcggguggacuuuugcggcaagggcuaccaccugaugagcuucccccagagcgccccacacggcguggucuuccuccacgugacauacgugcccgcccaggagaagaacuucaccaccgcccccgccaucugccacgacggcaaggcucacuucccccgggagggaguguucgugagcaacggcacccacugguucgugacccagcggaacuucuacgagccccagauuaucaccaccgacaacaccuucgugagcggcaacugcgacguggugaucggcaucgugaacaacaccguguacgacccccugcagccugagcuggacagcuucaaggaggagcuggacaaguacuucaagaaccacaccagccccgacguggaucugggcgacaucagcggcaucaacgccagcguggugaacauccagaaggagaucgaccggcugaacgagguggccaagaaccugaacgagagccugaucgaccugcaggagcugggcaaguacgagcaguacaucaaguggcccugguacaucuggcugggcuucaucgccggccugaucgccaucgugauggugaccaucaugcugugcugcaugaccagcugcuguagcugccugaagggcugcugcagcugcggcagcugcugcaaguucgacgaggacgacagcgagccagugcugaagggcgugaagcugcacuacaccugaugacucgagcugguacugcaugcacgcaaugcuagcugccccuuucccguccuggguaccccgagucucccccgaccucgggucccagguaugcucccaccuccaccugccccacucaccaccucugcuaguuccagacaccucccaagcacgcagcaaugcagcucaaaacgcuuagccuagccacacccccacgggaaacagcagugauuaaccuuuagcaauaaacgaaaguuuaacuaagcuauacuaaccccaggguuggucaauuucgugccagccacacccuggagcuagcaaaaaaaaaaaaaaaaaaaaaaaaaaaaaaaaaaaaaaaaaaaaaaaaaaaaaaaaaaaaaaaaaaaaaaaaaaaaaaaaaaaaaaaaaaaaaaaaaaaa

SEQ ID NO: 26332 - RNA, 4273 nt, Artificial Sequence
  SARS-CoV-2/Wuhan/WIV05/2019__EPI_ISL_402128 spike protein mRNA gc (1-1273)(D614G_M1229I)
agaauaaacuaguauucuucugguccccacagacucagagagaacccgccaccauguucguguuccuggugcugcugccccuggugagcagccagugcgugaaccugaccacccggacccagcugcccccugccuacaccaacagcuucacccggggcguguacuaccccgacaagguguuccggagcagcgugcugcacagcacccaggaccuguuccugcccuucuucagcaacgugaccugguuccacgccauccacgugagcggcaccaacggcaccaagcgguucgacaacccagugcugcccuucaacgacggcguguacuucgccagcaccgagaagucaaacaucauccggggcuggaucuucggcaccacccuggacagcaagacacagagccugcugaucgugaacaacgccaccaacguggugaucaaggugugcgaguuucaguucugcaacgaccccuuccugggcguguacuaccacaagaacaacaagagcuggauggagagcgaguuccgggucuacagcagcgcuaacaauugcaccuucgaguacgugagccagcccuuccugauggaccucgagggcaagcagggcaacuucaagaaccugcgggaguucguguucaagaacaucgauggcuacuucaagaucuacagcaagcacacccccaucaaccuggugcgggaccugccccagggauucagcgcccuggagccucugguggaccugcccaucggcaucaacaucaccagguuccagacccugcuggcccugcaccggagcuaccugacccccggcgacagcagcagcggcuggaccgccggcgccgccgcauacuacgugggcuaccugcagccacggaccuuccugcugaaguacaacgagaacggcaccaucaccgacgccguggacugcgcccuggacccccugagcgagaccaagugcacccuaaagagcuucaccguggagaagggcaucuaccagaccagcaacuuccgggugcagcccacugagagcaucgugcgguuccccaacauuaccaaccugugucccuucggcgagguguucaacgccacccgguucgccagcguguacgccuggaaccggaagcggaucagcaacugcguggccgacuacagcgugcuguacaacagcgccagcuucagcaccuucaagugcuacggcgugagcccuaccaagcugaacgaccugugcuucaccaacguguacgcugacagcuucgugauccggggcgacgaggugcggcagaucgcccccggccagaccggcaagaucgccgacuacaacuacaagcugcccgacgacuucaccggcugcgugaucgccuggaacagcaacaaccuggacagcaaggugggcggcaacuacaacuaccuguaccggcuguuccguaagagcaaccugaagccauucgagcgggacaucagcaccgagaucuaccaggccggcagcacccccugcaacgguguggagggcuuuaacugcuacuucccccugcagagcuacggcuuccagcccaccaacggcgugggcuaccagcccuaccgggugguggugcugagcuucgagcugcugcacgcccccgccaccgugugcggcccuaaaaagagcaccaaccuggugaagaacaagugcgugaacuucaauuucaacggccugaccggcaccggcgugcugaccgagagcaacaagaaguuccugcccuuccagcaguucggccgggauaucgccgacaccaccgacgcagugcgggacccccagacccuggagauccuggacaucaccccaugcagcuucggcggcgugagcgucaucacccccggcacaaacaccagcaaccagguggccgugcuguaccagggagugaacugcaccgaggugcccguggccauccacgccgaccagcugacccccaccuggcggguguacagcaccggcagcaacguguuccagacccgggccggcugccugaucggcgccgagcacgugaacaacuccuacgagugcgacauccccaucggcgcuggcaucugcgccagcuaccagacccagaccaacagcccccggcgggcccggagcguggccagccagagcaucaucgccuacaccaugagcuuaggcgccgagaacagcguggccuacagcaacaacagcaucgcgaucccuaccaacuucaccaucagcgugaccaccgagauacugcccgugagcaugaccaagaccagcguggacuguaccauguacaucugcggcgacagcaccgagugcagcaaccugcugcugcaguacggcagcuucugcacccagcugaaccgggcccugaccggcaucgccguggagcaggacaagaacacccaagagguguucgcccaggugaagcagaucuacaagacucccccaaucaaggacuucggcggcuucaacuucagccagauccugcccgaccccagcaagcccagcaagcggagcuucaucgaggaccugcuguucaacaaggugacccuggccgacgccggcuucaucaagcaguacggcgacugccugggggauaucgccgcucgggaccugaucugcgcccagaaguucaacggccugaccgugcugcccccucugcugaccgacgagaugaucgcccaguacaccagcgcccugcuugccggcaccaucaccagcggcuggaccuucggcgccggcgcagcccugcagauccccuucgccaugcagauggccuaccgguucaacggcaucggcgugacccagaacgugcuguacgagaaccagaagcugaucgccaaccaguucaacagcgccaucggcaagauccaggacagccugagcagcaccgccagcgcccugggcaagcugcaggacguggugaaccagaacgcucaggcccugaacacccuggugaagcagcugagcagcaacuucggcgccaucagcucagugcugaaugacauccugagcaggcuggacaagguggaggccgaggugcagaucgaccggcugaucaccggccggcugcagagccugcagaccuacgugacccagcagcugauccgggccgccgagauccgggccagcgccaaccuggcagccaccaagaugagcgagugcgugcugggccagagcaagcggguggacuuuugcggcaagggcuaccaccugaugagcuucccccagagcgccccacacggcgugguguuccuccacgucacauacgugcccgcccaggagaagaacuucaccaccgcccccgccauuugccacgacggcaaggcucacuucccccgggagggaguguucgugagcaacggcacccacugguucgugacccagcggaacuucuacgagccccagaucaucaccaccgacaacaccuucgugagcggcaacugcgacguggugaucggcaucgugaacaacaccguguacgacccccugcagccugagcuggacagcuucaaggaggagcuggacaaguacuucaagaaccacaccagccccgacguggaucugggcgacaucagcggcaucaacgccagcguggugaacauccagaaggagaucgaccggcugaacgagguggccaagaaccugaacgagagccugaucgaccugcaggagcugggcaaguacgagcaguacaucaaguggcccugguacaucuggcugggcuucaucgccggccugaucgccaucgugaucgugaccaucaugcugugcugcaugaccagcugcuguagcugccugaagggcugcugcagcugcggcagcugcugcaaguucgacgaggacgacagcgagccagugcugaagggcgugaagcugcacuacaccugaugacucgagcugguacugcaugcacgcaaugcuagcugccccuuucccguccuggguaccccgagucucccccgaccucgggucccagguaugcucccaccuccaccugccccacucaccaccucugcuaguuccagacaccucccaagcacgcagcaaugcagcucaaaacgcuuagccuagccacacccccacgggaaacagcagugauuaaccuuuagcaauaaacgaaaguuuaacuaagcuauacuaaccccaggguuggucaauuucgugccagccacacccuggagcuagcaaaaaaaaaaaaaaaaaaaaaaaaaaaaaaaaaaaaaaaaaaaaaaaaaaaaaaaaaaaaaaaaaaaaaaaaaaaaaaaaaaaaaaaaaaaaaaaaaaaa

SEQ ID NO: 26333 - RNA, 4267 nt, Artificial Sequence
  SARS-CoV-2/Wuhan/WIV05/2019__EPI_ISL_402128 spike protein mRNA gc (1-1273)(H69del_V70del_A222V_Y453F_S477N_D614G_I692V)
agaauaaacuaguauucuucugguccccacagacucagagagaacccgccaccauguucguguuccuggugcugcugccccuggugagcagccagugcgugaaccugaccacccggacccagcugcccccugccuacaccaacagcuucacccggggcguguacuaccccgacaagguguuccggagcagcgugcugcacagcacccaggaccuguuccugcccuucuucagcaacgugaccugguuccacgccaucagcggcaccaacggcaccaagcgguucgacaacccagugcugcccuucaacgacggcguguacuucgccagcaccgagaagucaaacaucauccggggcuggaucuucggcaccacccuggacagcaagacacagagccugcugaucgugaacaacgccaccaacguggugaucaaggugugcgaguuucaguucugcaacgaccccuuccugggcguguacuaccacaagaacaacaagagcuggauggagagcgaguuccggguguacagcagcgcuaacaauugcaccuucgaguacgucagccagcccuuccugauggaccucgagggcaagcagggcaacuucaagaaccugcgggaguucguguucaagaacaucgauggcuacuucaagaucuacagcaagcacacccccaucaaccuggugcgggaccugccccagggauucagcgugcuggagccucugguggaccugcccaucggcaucaacaucaccagguuccagacccugcuggcccugcaccggagcuaccugacccccggcgacagcagcagcggcuggaccgccggcgccgccgccuacuacgugggcuaccugcagccacggaccuuccugcugaaguacaacgagaacggcaccaucaccgacgcaguggacugcgcccuggacccccugagcgagaccaagugcacccuaaagagcuucaccguggagaagggcaucuaccagaccagcaacuuccgggugcagcccacugagagcaucgugcgguuccccaacauuaccaaccugugucccuucggcgagguguucaacgccacccgguucgccagcguguacgccuggaaccggaagcggaucagcaacugcguggccgacuacagcgugcuguacaacagcgccagcuucagcaccuucaagugcuacggcgugagcccuaccaagcugaacgaccugugcuucaccaacguguacgccgacagcuucgugauccggggcgacgaggugcggcagaucgcucccggccagaccggcaagaucgccgacuacaacuacaagcugcccgacgacuucaccggcugcgugaucgccuggaacagcaacaaccuggacagcaaggugggcggcaacuacaacuaccuguuccggcuguuccguaagagcaaccugaagccauuugagcgggacaucagcaccgagaucuaccaggccggcaacacccccugcaacgguguggagggcuucaacugcuacuucccccugcagagcuacggcuuccagcccaccaacggcgugggcuaccagcccuaccgggugguggugcugagcuucgagcugcugcacgcccccgccaccgugugcggcccuaaaaagagcaccaaccuggugaagaacaagugcgugaauuucaacuucaacggccugaccggcaccggcgugcugaccgagagcaacaagaaguuccugcccuuccagcaguucggccgggauaucgccgacaccaccgacgccgugcgggacccccagacccuggagauccuggacaucaccccaugcagcuucggcggcgugagcgucaucacccccggcacaaacaccagcaaccagguggcagugcuguaccagggagugaacugcaccgaggugcccguggccauccacgccgaccagcugacccccaccuggcggguguacagcaccggcagcaacguguuccagacccgggccggcugccugaucggcgccgagcacgugaacaacagcuacgagugcgacauccccaucggcgccggcaucugcgcuuccuaccagacccagaccaacagcccccggcgggcccggagcguggccagccagagcgugaucgccuacaccaugagcuuaggcgccgagaacagcguggccuacagcaacaacagcaucgccaucccuaccaacuucaccaucagcgugaccaccgagauccugcccgugagcaugaccaagaccagcguggacuguaccauguacauaugcggcgacagcaccgagugcagcaaccugcugcugcaguacggcagcuucugcacccagcugaaccgggcgcugaccggcaucgccguggagcaggacaagaacacccaagagguguucgcccaggugaagcagaucuacaagacucccccaaucaaggacuucggcggcuucaacuucagccagauccugcccgaccccagcaagcccagcaagcggagcuucaucgaggaccugcuguucaacaaggugacccuggccgacgccggcuucaucaagcaguacggcgacugccugggggauaucgccgcccgggaccugaucugcgcucagaaguucaacggccugaccgugcugcccccucugcugaccgacgagaugaucgcccaguacaccagcgcccugcuugccggcaccaucaccagcggcuggaccuucggcgccggcgccgcacugcagauccccuucgccaugcagauggccuaccgguucaacggcaucggcgugacccagaacgugcuguacgagaaccagaagcugaucgccaaccaguucaacagcgccaucggcaagauccaggacagccugagcagcaccgccagcgcccugggcaagcugcaggacguggugaaccagaacgcccaggcucugaacacccuggugaagcagcugagcagcaauuuuggcgccaucagcagcgugcugaacgacauccugucaaggcuggacaagguggaggccgaggugcagaucgaccggcugaucaccggccggcugcagagccugcagaccuacgugacccagcagcugauccgggccgccgagauccgggccagcgccaaccuggccgcaaccaagaugagcgagugcgugcugggccagagcaagcggguggacuucugcggcaagggcuaccaccugaugagcuucccccagagcgccccacacggcguggucuuccuccacgugacauacgugcccgcccaggagaagaacuucaccaccgcccccgccaucugccacgacggcaaggcccacuucccccgggagggaguguucgugagcaacggcacccacugguucgugacccagcggaacuucuacgagccccagauuaucaccaccgacaacaccuucgugagcggcaacugcgacguggugaucggcaucgugaacaacaccguguacgacccccugcagccugagcuggacagcuucaaggaggagcuggacaaguacuucaagaaccacaccagccccgacguggaucugggcgacaucagcggcaucaacgcuagcguggugaacauccagaaggagaucgaccggcugaacgagguggccaagaaccugaacgagagccugaucgaccugcaggagcugggcaaguacgagcaguacaucaaguggcccugguacaucuggcugggcuucaucgccggccugaucgccaucgugauggugaccaucaugcugugcugcaugaccagcugcuguagcugccugaagggcugcugcagcugcggcagcugcugcaaguucgacgaggacgacagcgagccagugcugaagggcgugaagcugcacuacaccugaugacucgagcugguacugcaugcacgcaaugcuagcugccccuuucccguccuggguaccccgagucucccccgaccucgggucccagguaugcucccaccuccaccugccccacucaccaccucugcuaguuccagacaccucccaagcacgcagcaaugcagcucaaaacgcuuagccuagccacacccccacgggaaacagcagugauuaaccuuuagcaauaaacgaaaguuuaacuaagcuauacuaaccccaggguuggucaauuucgugccagccacacccuggagcuagcaaaaaaaaaaaaaaaaaaaaaaaaaaaaaaaaaaaaaaaaaaaaaaaaaaaaaaaaaaaaaaaaaaaaaaaaaaaaaaaaaaaaaaaaaaaaaaaaaaaa

SEQ ID NO: 26334 - RNA, 4267 nt, Artificial Sequence
  SARS-CoV-2/Wuhan/WIV05/2019__EPI_ISL_402128 spike protein mRNA gc (1-1273)(H69del_V70del_Y453F_D614G_I692V_M1229I)
agaauaaacuaguauucuucugguccccacagacucagagagaacccgccaccauguucguguuccuggugcugcugccccuggugagcagccagugcgugaaccugaccacccggacccagcugcccccugccuacaccaacagcuucacccggggcguguacuaccccgacaagguguuccggagcagcgugcugcacagcacccaggaccuguuccugcccuucuucagcaacgugaccugguuccacgccaucagcggcaccaacggcaccaagcgguucgacaacccagugcugcccuucaacgacggcguguacuucgccagcaccgagaagucaaacaucauccggggcuggaucuucggcaccacccuggacagcaagacacagagccugcugaucgugaacaacgccaccaacguggugaucaaggugugcgaguuucaguucugcaacgaccccuuccugggcguguacuaccacaagaacaacaagagcuggauggagagcgaguuccggguguacagcagcgcuaacaauugcaccuucgaguacgucagccagcccuuccugauggaccucgagggcaagcagggcaacuucaagaaccugcgggaguucguguucaagaacaucgauggcuacuucaagaucuacagcaagcacacccccaucaaccuggugcgggaccugccccagggauucagcgcccuggagccucugguggaccugcccaucggcaucaacaucaccagguuccagacccugcuggcccugcaccggagcuaccugacccccggcgacagcagcagcggcuggaccgccggcgccgccgcauacuacgugggcuaccugcagccacggaccuuccugcugaaguacaacgagaacggcaccaucaccgacgccguggacugcgcccuggacccccugagcgagaccaagugcacccuaaagagcuucaccguggagaagggcaucuaccagaccagcaacuuccgggugcagcccacugagagcaucgugcgguuccccaacauuaccaaccugugucccuucggcgagguguucaacgccacccgguucgccagcguguacgccuggaaccggaagcggaucagcaacugcguggccgacuacagcgugcuguacaacagcgccagcuucagcaccuucaagugcuacggcgugagcccuaccaagcugaacgaccugugcuucaccaacguguacgcugacagcuucgugauccggggcgacgaggugcggcagaucgcccccggccagaccggcaagaucgccgacuacaacuacaagcugcccgacgacuucaccggcugcgugaucgccuggaacagcaacaaccuggacagcaaggugggcggcaacuacaacuaccuguuccggcuguuccguaagagcaaccugaagccauuugagcgggacaucagcaccgagaucuaccaggccggcagcacccccugcaacgguguggagggcuucaacugcuacuucccccugcagagcuacggcuuccagcccaccaacggcgugggcuaccagcccuaccgggugguggugcugagcuucgagcugcugcacgcccccgccaccgugugcggcccuaaaaagagcaccaaccuggugaagaacaagugcgugaacuucaauuucaacggccugaccggcaccggcgugcugaccgagagcaacaagaaguuccugcccuuccagcaguucggccgggauaucgccgacaccaccgacgcagugcgggacccccagacccuggagauccuggacaucaccccaugcagcuucggcggcgugagcgugaucacccccggcacaaacaccagcaaccaggucgccgugcuguaccagggagugaacugcaccgaggugcccguggccauccacgccgaccagcugacccccaccuggcggguguacagcaccggcagcaacguguuccagacccgggccggcugccugaucggcgccgagcacgugaacaacuccuacgagugcgacauccccaucggcgcuggcaucugcgccagcuaccagacccagaccaacagcccccggcgggcccggagcguggccagccagagcgugaucgccuacaccaugagcuuaggcgccgagaacagcguggccuacagcaacaacagcaucgcgaucccuaccaacuucaccaucagcgugaccaccgagauccugcccgugagcaugaccaagaccagcguggacuguaccauguacauaugcggcgacagcaccgagugcagcaaccugcugcugcaguacggcagcuucugcacccagcugaaccgggcccugaccggcaucgccguggagcaggacaagaacacccaagagguguucgcccaggugaagcagaucuacaagacucccccaaucaaggacuucggcggcuucaacuucagccagauccugcccgaccccagcaagcccagcaagcggagcuucaucgaggaccugcuguucaacaaggugacccuggccgacgccggcuucaucaagcaguacggcgacugccugggggauaucgccgcucgggaccugaucugcgcccagaaguucaacggccugaccgugcugcccccucugcugaccgacgagaugaucgcccaguacaccagcgcccugcuugccggcaccaucaccagcggcuggaccuucggcgccggcgcagcccugcagauccccuucgccaugcagauggccuaccgguucaacggcaucggcgugacccagaacgugcuguacgagaaccagaagcugaucgccaaccaguucaacagcgccaucggcaagauccaggacagccugagcagcaccgccagcgcccugggcaagcugcaggacguggugaaccagaacgcucaggcccugaacacccuggugaagcagcugagcagcaacuuuggcgccaucagcucagugcugaaugacauccugagcaggcuggacaagguggaggccgaggugcagaucgaccggcugaucaccggccggcugcagagccugcagaccuacgugacccagcagcugauccgggccgccgagauccgggccagcgccaaccuggcagccaccaagaugagcgagugcgugcugggccagagcaagcggguggacuucugcggcaagggcuaccaccugaugagcuucccccagagcgccccacacggcgugguguuccuccacgucacauacgugcccgcccaggagaagaacuucaccaccgcccccgccaucugccacgacggcaaggcucacuucccccgggagggaguguucgugagcaacggcacccacugguucgugacccagcggaacuucuacgagccccagauuaucaccaccgacaacaccuucgugagcggcaacugcgacguggugaucggcaucgugaacaacaccguguacgacccccugcagccugagcuggacagcuucaaggaggagcuggacaaguacuucaagaaccacaccagccccgacguggaucugggcgacaucagcggcaucaacgccagcguggugaacauccagaaggagaucgaccggcugaacgagguggccaagaaccugaacgagagccugaucgaccugcaggagcugggcaaguacgagcaguacaucaaguggcccugguacaucuggcugggcuucaucgccggccugaucgccaucgugaucgugaccaucaugcugugcugcaugaccagcugcuguagcugccugaagggcugcugcagcugcggcagcugcugcaaguucgacgaggacgacagcgagccagugcugaagggcgugaagcugcacuacaccugaugacucgagcugguacugcaugcacgcaaugcuagcugccccuuucccguccuggguaccccgagucucccccgaccucgggucccagguaugcucccaccuccaccugccccacucaccaccucugcuaguuccagacaccucccaagcacgcagcaaugcagcucaaaacgcuuagccuagccacacccccacgggaaacagcagugauuaaccuuuagcaauaaacgaaaguuuaacuaagcuauacuaaccccaggguuggucaauuucgugccagccacacccuggagcuagcaaaaaaaaaaaaaaaaaaaaaaaaaaaaaaaaaaaaaaaaaaaaaaaaaaaaaaaaaaaaaaaaaaaaaaaaaaaaaaaaaaaaaaaaaaaaaaaaaaaa

SEQ ID NO: 26335 - RNA, 4264 nt, Artificial Sequence
  SARS-CoV-2/Wuhan/WIV05/2019__EPI_ISL_402128 spike protein mRNA gc (1-1273)(H69del_V70del_Y144del_N501Y_A570D_D614G_P681H_T716I_S982 A_D1118H)
agaauaaacuaguauucuucugguccccacagacucagagagaacccgccaccauguucguguuccuggugcugcugccccuggugagcagccagugcgugaaccugaccacccggacccagcugcccccugccuacaccaacagcuucacccggggcguguacuaccccgacaagguguuccggagcagcgugcugcacagcacccaggaccuguuccugcccuucuucagcaacgugaccugguuccacgccaucagcggcaccaacggcaccaagcgguucgacaacccagugcugcccuucaacgacggcguguacuucgccagcaccgagaagucaaacaucauccggggcuggaucuucggcaccacccuggacagcaagacacagagccugcugaucgugaacaacgccaccaacguggugaucaaggugugcgaguuucaguucugcaacgaccccuuccugggcguguaccacaagaacaacaagagcuggauggagagcgaguuccggguguacagcagcgcuaacaauugcaccuucgaguacgucagccagcccuuccugauggaccucgagggcaagcagggcaacuucaagaaccugcgggaguucguguucaagaacaucgauggcuacuucaagaucuacagcaagcacacccccaucaaccuggugcgggaccugccccagggauucagcgcccuggagccucugguggaccugcccaucggcaucaacaucaccagguuccagacccugcuggcccugcaccggagcuaccugacccccggcgacagcagcagcggcuggaccgccggcgccgccgcauacuacgugggcuaccugcagccacggaccuuccugcugaaguacaacgagaacggcaccaucaccgacgccguggacugcgcccuggacccccugagcgagaccaagugcacccuaaagagcuucaccguggagaagggcaucuaccagaccagcaacuuccgggugcagcccacugagagcaucgugcgguuccccaacauuaccaaccugugucccuucggcgagguguucaacgccacccgguucgccagcguguacgccuggaaccggaagcggaucagcaacugcguggccgacuacagcgugcuguacaacagcgccagcuucagcaccuucaagugcuacggcgugagcccuaccaagcugaacgaccugugcuucaccaacguguacgcugacagcuucgugauccggggcgacgaggugcggcagaucgcccccggccagaccggcaagaucgccgacuacaacuacaagcugcccgacgacuucaccggcugcgugaucgccuggaacagcaacaaccuggacagcaaggugggcggcaacuacaacuaccuguaccggcuguuccguaagagcaaccugaagccauucgagcgggacaucagcaccgagaucuaccaggccggcagcacccccugcaacgguguggagggcuuuaacugcuacuucccccugcagagcuacggcuuccagcccaccuacggcgugggcuaccagcccuaccgggugguggugcugagcuucgagcugcugcacgcccccgccaccgugugcggcccuaaaaagagcaccaaccuggugaagaacaagugcgugaacuucaacuucaauggccugaccggcaccggcgugcugaccgagagcaacaagaaguuccugcccuuccagcaguucggccgggauaucgacgacaccaccgacgccgugcgggacccccagacccuggagauccuggacaucaccccaugcagcuucggcggcgugagcgugaucacccccggcacaaacaccagcaaccaggucgcagugcuguaccagggagugaacugcaccgaggugcccguggccauccacgccgaccagcugacccccaccuggcggguguacagcaccggcagcaacguguuccagacccgggccggcugccugaucggcgccgagcacgugaacaacuccuacgagugcgacauccccaucggcgccggcaucugcgcuagcuaccagacccagaccaacagccaccggcgggcccggagcguggccagccagagcaucaucgccuacaccaugagcuuaggcgccgagaacagcguggccuacagcaacaacagcaucgccauccccaucaacuucaccauaagcgugaccaccgagauccugccugugagcaugaccaagaccagcguggacuguaccauguacaucugcggcgacagcaccgagugcagcaaccugcugcugcaguacggcagcuucugcacccagcugaaccgggcgcugaccggcaucgccguggagcaggacaagaacacccaagagguguucgcccaggugaagcagaucuacaagaccccacccaucaaggacuucggcggcuucaacuucagccagauccugcccgaccccagcaagcccagcaagcggagcuucaucgaggaccugcuguucaacaaggugacucuggccgacgccggcuucaucaagcaguacggcgauugccugggggacaucgccgcccgggaccugaucugcgcucagaaguucaacggccugaccgugcugccuccccugcugaccgacgagaugaucgcccaguacaccagcgcccugcuugccggcaccaucaccagcggcuggaccuucggcgccggcgccgcacugcagauccccuucgccaugcagauggccuaccgguucaacggcaucggcgugacccagaacgugcuguacgagaaccagaagcugaucgccaaccaguucaacagcgccaucggcaagauccaggacagccugagcagcaccgccagcgcccugggcaagcugcaggacguggugaaccagaacgcccaggcucugaacacccuggugaagcagcugagcagcaacuucggcgccaucagcucagugcugaacgacauccuggccaggcuggacaagguggaggccgaggugcagaucgaccggcugaucaccggccggcugcagagccugcagaccuacgugacccagcagcugauccgggccgccgagauucgggccagcgccaaucuggcagccaccaagaugagcgagugcgugcugggccagagcaagcggguggacuuuugcggcaagggcuaccaccugaugagcuucccccagagcgcuccccacggcgugguguuccuccacgugaccuacgucccagcccaggagaagaacuucacaaccgcccccgccaucugccacgacggcaaggcccacuucccccgggagggaguguucgugagcaacggcacccacugguucgugacccagcggaacuucuacgagccccagaucaucaccacccacaacaccuucgugagcggcaacugcgacguggugaucggcaucgugaacaacaccguguacgacccccugcagcccgagcuggacagcuucaaggaggagcuggacaaguacuucaagaaccacaccagcccugacguggaucugggcgacaucagcggcaucaacgccagcguggugaacauccagaaggagaucgaccggcugaacgagguggccaagaaccugaacgagagccugaucgaccugcaggagcugggcaaguacgagcaguacaucaaguggcccugguacaucuggcugggcuucaucgccggccugaucgccaucgugauggugaccaucaugcugugcugcaugaccagcugcuguagcugccugaagggcugcugcagcugcggcagcugcugcaaguucgacgaggacgacagcgagcccgugcugaagggcgugaagcugcacuacaccugaugacucgagcugguacugcaugcacgcaaugcuagcugccccuuucccguccuggguaccccgagucucccccgaccucgggucccagguaugcucccaccuccaccugccccacucaccaccucugcuaguuccagacaccucccaagcacgcagcaaugcagcucaaaacgcuuagccuagccacacccccacgggaaacagcagugauuaaccuuuagcaauaaacgaaaguuuaacuaagcuauacuaaccccaggguuggucaauuucgugccagccacacccuggagcuagcaaaaaaaaaaaaaaaaaaaaaaaaaaaaaaaaaaaaaaaaaaaaaaaaaaaaaaaaaaaaaaaaaaaaaaaaaaaaaaaaaaaaaaaaaaaaaaaaaaaa

SEQ ID NO: 26336 - RNA, 4273 nt, Artificial Sequence
  SARS-CoV-2/Wuhan/WIV05/2019__EPI_ISL_402128 spike protein mRNA gc (1-1273)(K417N_E484K_N501Y_D614G)
agaauaaacuaguauucuucugguccccacagacucagagagaacccgccaccauguucguguuccuggugcugcugccccuggugagcagccagugcgugaaccugaccacccggacccagcugcccccugccuacaccaacagcuucacccggggcguguacuaccccgacaagguguuccggagcagcgugcugcacagcacccaggaccuguuccugcccuucuucagcaacgugaccugguuccacgccauccacgugagcggcaccaacggcaccaagcgguucgacaacccagugcugcccuucaacgacggcguguacuucgccagcaccgagaagucaaacaucauccggggcuggaucuucggcaccacccuggacagcaagacacagagccugcugaucgugaacaacgccaccaacguggugaucaaggugugcgaguuucaguucugcaacgaccccuuccugggcguguacuaccacaagaacaacaagagcuggauggagagcgaguuccgggucuacagcagcgcuaacaauugcaccuucgaguacgugagccagcccuuccugauggaccucgagggcaagcagggcaacuucaagaaccugcgggaguucguguucaagaacaucgauggcuacuucaagaucuacagcaagcacacccccaucaaccuggugcgggaccugccccagggauucagcgcccuggagccucugguggaccugcccaucggcaucaacaucaccagguuccagacccugcuggcccugcaccggagcuaccugacccccggcgacagcagcagcggcuggaccgccggcgccgccgcauacuacgugggcuaccugcagccacggaccuuccugcugaaguacaacgagaacggcaccaucaccgacgccguggacugcgcccuggacccccugagcgagaccaagugcacccuaaagagcuucaccguggagaagggcaucuaccagaccagcaacuuccgggugcagcccacugagagcaucgugcgguuccccaacauuaccaaccugugucccuucggcgagguguucaacgccacccgguucgccagcguguacgccuggaaccggaagcggaucagcaacugcguggccgacuacagcgugcuguacaacagcgccagcuucagcaccuucaagugcuacggcgugagcccuaccaagcugaacgaccugugcuucaccaacguguacgcugacagcuucgugauccggggcgacgaggugcggcagaucgcccccggccagaccggcaacaucgccgacuacaacuacaagcugcccgacgacuucaccggcugcgugaucgccuggaacagcaacaaccuggacagcaaggugggcggcaacuacaacuaccuguaccggcuguuccguaagagcaaccugaagccauucgagcgggacaucagcaccgagaucuaccaggccggcagcacccccugcaacggugugaagggcuuuaacugcuacuucccccugcagagcuacggcuuccagcccaccuacggcgugggcuaccagcccuaccgggugguggugcugagcuucgagcugcugcacgcccccgccaccgugugcggcccuaaaaagagcaccaaccuggugaagaacaagugcgugaacuucaauuucaacggccugaccggcaccggcgugcugaccgagagcaacaagaaguuccugcccuuccagcaguucggccgggauaucgccgacaccaccgacgcagugcgggacccccagacccuggagauccuggacaucaccccaugcagcuucggcggcgugagcgucaucacccccggcacaaacaccagcaaccagguggccgugcuguaccagggagugaacugcaccgaggugcccguggccauccacgccgaccagcugacccccaccuggcggguguacagcaccggcagcaacguguuccagacccgggccggcugccugaucggcgccgagcacgugaacaacuccuacgagugcgacauccccaucggcgcuggcaucugcgccagcuaccagacccagaccaacagcccccggcgggcccggagcguggccagccagagcaucaucgccuacaccaugagcuuaggcgccgagaacagcguggccuacagcaacaacagcaucgcgaucccuaccaacuucaccaucagcgugaccaccgagauacugcccgugagcaugaccaagaccagcguggacuguaccauguacaucugcggcgacagcaccgagugcagcaaccugcugcugcaguacggcagcuucugcacccagcugaaccgggcccugaccggcaucgccguggagcaggacaagaacacccaagagguguucgcccaggugaagcagaucuacaagacucccccaaucaaggacuucggcggcuucaacuucagccagauccugcccgaccccagcaagcccagcaagcggagcuucaucgaggaccugcuguucaacaaggugacccuggccgacgccggcuucaucaagcaguacggcgacugccugggggauaucgccgcucgggaccugaucugcgcccagaaguucaacggccugaccgugcugcccccucugcugaccgacgagaugaucgcccaguacaccagcgcccugcuugccggcaccaucaccagcggcuggaccuucggcgccggcgcagcccugcagauccccuucgccaugcagauggccuaccgguucaacggcaucggcgugacccagaacgugcuguacgagaaccagaagcugaucgccaaccaguucaacagcgccaucggcaagauccaggacagccugagcagcaccgccagcgcccugggcaagcugcaggacguggugaaccagaacgcucaggcccugaacacccuggugaagcagcugagcagcaacuucggcgccaucagcucagugcugaaugacauccugagcaggcuggacaagguggaggccgaggugcagaucgaccggcugaucaccggccggcugcagagccugcagaccuacgugacccagcagcugauccgggccgccgagauccgggccagcgccaaccuggcagccaccaagaugagcgagugcgugcugggccagagcaagcggguggacuuuugcggcaagggcuaccaccugaugagcuucccccagagcgccccacacggcgugguguuccuccacgucacauacgugcccgcccaggagaagaacuucaccaccgcccccgccauuugccacgacggcaaggcucacuucccccgggagggaguguucgugagcaacggcacccacugguucgugacccagcggaacuucuacgagccccagaucaucaccaccgacaacaccuucgugagcggcaacugcgacguggugaucggcaucgugaacaacaccguguacgacccccugcagccugagcuggacagcuucaaggaggagcuggacaaguacuucaagaaccacaccagccccgacguggaucugggcgacaucagcggcaucaacgccagcguggugaacauccagaaggagaucgaccggcugaacgagguggccaagaaccugaacgagagccugaucgaccugcaggagcugggcaaguacgagcaguacaucaaguggcccugguacaucuggcugggcuucaucgccggccugaucgccaucgugauggugaccaucaugcugugcugcaugaccagcugcuguagcugccugaagggcugcugcagcugcggcagcugcugcaaguucgacgaggacgacagcgagccagugcugaagggcgugaagcugcacuacaccugaugacucgagcugguacugcaugcacgcaaugcuagcugccccuuucccguccuggguaccccgagucucccccgaccucgggucccagguaugcucccaccuccaccugccccacucaccaccucugcuaguuccagacaccucccaagcacgcagcaaugcagcucaaaacgcuuagccuagccacacccccacgggaaacagcagugauuaaccuuuagcaauaaacgaaaguuuaacuaagcuauacuaaccccaggguuggucaauuucgugccagccacacccuggagcuagcaaaaaaaaaaaaaaaaaaaaaaaaaaaaaaaaaaaaaaaaaaaaaaaaaaaaaaaaaaaaaaaaaaaaaaaaaaaaaaaaaaaaaaaaaaaaaaaaaaaa

SEQ ID NO: 26337 - RNA, 4264 nt, Artificial Sequence
  SARS-CoV-2/Wuhan/WIV05/2019__EPI_ISL_402128 spike protein mRNA gc (1-1273)(L18F_D80A_D215G_L242del_A243del_L244del_R246I_K417N_E484 K_N501Y_D614G_A701V)
agaauaaacuaguauucuucugguccccacagacucagagagaacccgccaccauguucguguuccuggugcugcugccccuggugagcagccagugcgugaacuucaccacccggacccagcugcccccugccuacaccaacagcuucacccggggcguguacuaccccgacaagguguuccggagcagcgugcugcacagcacccaggaccuguuccugcccuucuucagcaacgugaccugguuccacgccauccacgugagcggcaccaacggcaccaagcgguucgccaacccagugcugcccuucaacgacggcguguacuucgccagcaccgagaagucaaacaucauccggggcuggaucuuuggcaccacccuggacagcaagacacagagccugcugaucgugaacaacgcuaccaacguggugaucaaggugugcgaguuccaguucugcaacgaccccuuccugggcguguacuaccacaagaacaacaagagcuggauggagagcgaguuccgggucuacagcagcgccaacaauugcaccuucgaguacgugagccagcccuuccugauggaccuggagggcaagcagggcaacuucaagaaccuccgggaguucguguucaagaacaucgacggcuacuucaagaucuacagcaagcacacccccaucaaccuggugcggggacugccccagggcuucagcgcccuggagccucugguggaucugcccaucggcaucaacaucaccagguuccagacccugcacaucagcuaccugacccccggcgacagcagcagcggcuggaccgccggcgccgccgcauacuacgugggcuaccugcagccacggaccuuccugcugaaguacaacgagaacggcaccaucaccgacgccguggacugcgcccuggacccccugagcgagaccaagugcacccuuaagagcuucaccguggagaagggcaucuaccagaccagcaacuuccgggugcagcccacugagagcauugugcgguuccccaacaucaccaaccugugucccuucggcgagguguucaacgccacccgguucgccagcguguacgccuggaaccggaagcggaucagcaacugcguggccgacuacagcgugcuguacaacagcgccagcuucagcaccuucaagugcuacggcgugagcccuaccaagcugaacgaccugugcuucaccaacguguacgcugacagcuucgugauccggggcgacgaggugcggcagaucgcccccggccagaccggcaacaucgccgacuacaacuacaagcugcccgacgacuucaccggcugcgugaucgccuggaacagcaacaaccuggacagcaaggugggcggcaacuacaacuaccuguaccggcuauuccguaagagcaaccugaagccauuugagcgggacaucagcaccgagaucuaccaggccgguagcacccccugcaacggcgugaagggcuucaacugcuacuucccccugcagagcuacggcuuccagcccaccuacggcgugggcuaccagcccuaccgggugguggugcugagcuucgagcugcugcacgcccccgccaccgugugcggcccuaaaaagagcaccaaccuggugaagaacaagugcgugaacuucaauuucaacggccugaccggcaccggcgugcugaccgagagcaacaagaaguuccugcccuuccagcaguucggccgggacaucgccgacaccaccgaugcagugcgggacccccagacccuggagauccuggacaucaccccaugcagcuucggcggcgugagcgucaucacccccggaacaaacaccagcaaccagguggccgugcuguaccagggcgugaacugcaccgaggugcccguggccauccacgccgaccagcugacccccaccuggcggguguacagcaccggcagcaacguguuccagacccgggccggcugccugaucggcgccgagcacgugaacaacuccuacgagugcgacauccccaucggcgcuggcaucugcgccagcuaccagacccagaccaacagcccccggcgggcccggagcguggccagccagagcaucaucgccuacaccaugagccugggcguggagaacagcguggccuacagcaacaacagcaucgccaucccuaccaacuucaccauaagcgugaccaccgagauccugcccgugagcaugaccaagaccagcguggacuguaccauguacaucugcggcgacagcaccgagugcagcaaccuguuacugcaguacggcagcuucugcacccagcugaaccgggcgcugaccggcaucgccguggagcaggacaagaacacccaagagguguucgcccaggugaagcagaucuacaagacucccccaaucaaggacuucggcggcuucaacuucagccagauccugcccgaccccagcaagcccagcaagcggagcuucaucgaggaccugcuguucaacaaggugacccuggccgacgccggcuucaucaagcaguacggggacugccugggcgacaucgccgcccgggaccugaucugcgcucagaaguucaacggccugaccgugcugcccccucugcugaccgaugagaugaucgcccaguacaccagcgcccugcuggccggcaccaucaccagcggcuggaccuucggcgccggcgccgcacugcagauccccuucgccaugcagauggccuaccgguucaacggcaucggcgugacccagaacgugcuguacgagaaccagaagcugaucgccaaccaguucaacagcgccaucggcaagauccaggacagccugagcagcaccgccagcgcccugggcaagcugcaggacguggugaaccagaacgcccaggcucugaacacccuggugaagcagcugagcagcaacuuuggcgccaucagcucagugcugaaugacauccugagccggcuggacaagguggaggccgaggugcagaucgacaggcugaucaccggccggcugcagagccugcagaccuacgugacccagcagcugauccgggccgccgagauucgggccagcgccaaccuggccgcaaccaagaugagcgagugcgugcugggccagagcaagcggguggacuucugcggcaagggcuaccaccugaugagcuucccccagagcgccccacacggcguggucuuccugcacgugacauacgugcccgcccaggagaagaacuucaccaccgcccccgccaucugccacgacggaaaggcccacuucccccgggagggcguguucgugagcaacggcacccacugguucgugacccagcggaacuucuacgagccccagaucaucaccaccgacaacaccuucgugagcggcaacugcgacguggugaucggcaucgugaacaacaccguguacgacccccugcagccugagcuggacagcuucaaggaggagcucgacaaguacuucaagaaccacaccagccccgacguggaccugggcgacaucagcggcaucaacgcuagcguggugaacauccagaaggagaucgaucggcugaacgagguggccaagaaccugaacgagagccugaucgaccugcaggagcugggcaaguacgagcaguacaucaaguggcccugguacaucuggcugggcuucaucgccggccugaucgccaucgugauggugaccaucaugcugugcugcaugaccagcugcuguagcugccugaagggcugcugcagcugcggcagcugcugcaaguucgacgaggacgacagcgagccagugcugaagggcgugaagcugcacuacaccugaugacucgagcugguacugcaugcacgcaaugcuagcugccccuuucccguccuggguaccccgagucucccccgaccucgggucccagguaugcucccaccuccaccugccccacucaccaccucugcuaguuccagacaccucccaagcacgcagcaaugcagcucaaaacgcuuagccuagccacacccccacgggaaacagcagugauuaaccuuuagcaauaaacgaaaguuuaacuaagcuauacuaaccccaggguuggucaauuucgugccagccacacccuggagcuagcaaaaaaaaaaaaaaaaaaaaaaaaaaaaaaaaaaaaaaaaaaaaaaaaaaaaaaaaaaaaaaaaaaaaaaaaaaaaaaaaaaaaaaaaaaaaaaaaaaaa

SEQ ID NO: 26338 - RNA, 4273 nt, Artificial Sequence
  SARS-CoV-2/Wuhan/WIV05/2019__EPI_ISL_402128 spike protein mRNA gc (1-1273)(E484K_D614G)
agaauaaacuaguauucuucugguccccacagacucagagagaacccgccaccauguucguguuccuggugcugcugccccuggugagcagccagugcgugaaccugaccacccggacccagcugcccccugccuacaccaacagcuucacccggggcguguacuaccccgacaagguguuccggagcagcgugcugcacagcacccaggaccuguuccugcccuucuucagcaacgugaccugguuccacgccauccacgugagcggcaccaacggcaccaagcgguucgacaacccagugcugcccuucaacgacggcguguacuucgccagcaccgagaagucaaacaucauccggggcuggaucuucggcaccacccuggacagcaagacacagagccugcugaucgugaacaacgccaccaacguggugaucaaggugugcgaguuucaguucugcaacgaccccuuccugggcguguacuaccacaagaacaacaagagcuggauggagagcgaguuccgggucuacagcagcgcuaacaauugcaccuucgaguacgugagccagcccuuccugauggaccucgagggcaagcagggcaacuucaagaaccugcgggaguucguguucaagaacaucgauggcuacuucaagaucuacagcaagcacacccccaucaaccuggugcgggaccugccccagggauucagcgcccuggagccucugguggaccugcccaucggcaucaacaucaccagguuccagacccugcuggcccugcaccggagcuaccugacccccggcgacagcagcagcggcuggaccgccggcgccgccgcauacuacgugggcuaccugcagccacggaccuuccugcugaaguacaacgagaacggcaccaucaccgacgccguggacugcgcccuggacccccugagcgagaccaagugcacccuaaagagcuucaccguggagaagggcaucuaccagaccagcaacuuccgggugcagcccacugagagcaucgugcgguuccccaacauuaccaaccugugucccuucggcgagguguucaacgccacccgguucgccagcguguacgccuggaaccggaagcggaucagcaacugcguggccgacuacagcgugcuguacaacagcgccagcuucagcaccuucaagugcuacggcgugagcccuaccaagcugaacgaccugugcuucaccaacguguacgcugacagcuucgugauccggggcgacgaggugcggcagaucgcccccggccagaccggcaagaucgccgacuacaacuacaagcugcccgacgacuucaccggcugcgugaucgccuggaacagcaacaaccuggacagcaaggugggcggcaacuacaacuaccuguaccggcuguuccguaagagcaaccugaagccauucgagcgggacaucagcaccgagaucuaccaggccggcagcacccccugcaacggugugaagggcuuuaacugcuacuucccccugcagagcuacggcuuccagcccaccaacggcgugggcuaccagcccuaccgggugguggugcugagcuucgagcugcugcacgcccccgccaccgugugcggcccuaaaaagagcaccaaccuggugaagaacaagugcgugaacuucaauuucaacggccugaccggcaccggcgugcugaccgagagcaacaagaaguuccugcccuuccagcaguucggccgggauaucgccgacaccaccgacgcagugcgggacccccagacccuggagauccuggacaucaccccaugcagcuucggcggcgugagcgucaucacccccggcacaaacaccagcaaccagguggccgugcuguaccagggagugaacugcaccgaggugcccguggccauccacgccgaccagcugacccccaccuggcggguguacagcaccggcagcaacguguuccagacccgggccggcugccugaucggcgccgagcacgugaacaacuccuacgagugcgacauccccaucggcgcuggcaucugcgccagcuaccagacccagaccaacagcccccggcgggcccggagcguggccagccagagcaucaucgccuacaccaugagcuuaggcgccgagaacagcguggccuacagcaacaacagcaucgcgaucccuaccaacuucaccaucagcgugaccaccgagauacugcccgugagcaugaccaagaccagcguggacuguaccauguacaucugcggcgacagcaccgagugcagcaaccugcugcugcaguacggcagcuucugcacccagcugaaccgggcccugaccggcaucgccguggagcaggacaagaacacccaagagguguucgcccaggugaagcagaucuacaagacucccccaaucaaggacuucggcggcuucaacuucagccagauccugcccgaccccagcaagcccagcaagcggagcuucaucgaggaccugcuguucaacaaggugacccuggccgacgccggcuucaucaagcaguacggcgacugccugggggauaucgccgcucgggaccugaucugcgcccagaaguucaacggccugaccgugcugcccccucugcugaccgacgagaugaucgcccaguacaccagcgcccugcuugccggcaccaucaccagcggcuggaccuucggcgccggcgcagcccugcagauccccuucgccaugcagauggccuaccgguucaacggcaucggcgugacccagaacgugcuguacgagaaccagaagcugaucgccaaccaguucaacagcgccaucggcaagauccaggacagccugagcagcaccgccagcgcccugggcaagcugcaggacguggugaaccagaacgcucaggcccugaacacccuggugaagcagcugagcagcaacuucggcgccaucagcucagugcugaaugacauccugagcaggcuggacaagguggaggccgaggugcagaucgaccggcugaucaccggccggcugcagagccugcagaccuacgugacccagcagcugauccgggccgccgagauccgggccagcgccaaccuggcagccaccaagaugagcgagugcgugcugggccagagcaagcggguggacuuuugcggcaagggcuaccaccugaugagcuucccccagagcgccccacacggcgugguguuccuccacgucacauacgugcccgcccaggagaagaacuucaccaccgcccccgccauuugccacgacggcaaggcucacuucccccgggagggaguguucgugagcaacggcacccacugguucgugacccagcggaacuucuacgagccccagaucaucaccaccgacaacaccuucgugagcggcaacugcgacguggugaucggcaucgugaacaacaccguguacgacccccugcagccugagcuggacagcuucaaggaggagcuggacaaguacuucaagaaccacaccagccccgacguggaucugggcgacaucagcggcaucaacgccagcguggugaacauccagaaggagaucgaccggcugaacgagguggccaagaaccugaacgagagccugaucgaccugcaggagcugggcaaguacgagcaguacaucaaguggcccugguacaucuggcugggcuucaucgccggccugaucgccaucgugauggugaccaucaugcugugcugcaugaccagcugcuguagcugccugaagggcugcugcagcugcggcagcugcugcaaguucgacgaggacgacagcgagccagugcugaagggcgugaagcugcacuacaccugaugacucgagcugguacugcaugcacgcaaugcuagcugccccuuucccguccuggguaccccgagucucccccgaccucgggucccagguaugcucccaccuccaccugccccacucaccaccucugcuaguuccagacaccucccaagcacgcagcaaugcagcucaaaacgcuuagccuagccacacccccacgggaaacagcagugauuaaccuuuagcaauaaacgaaaguuuaacuaagcuauacuaaccccaggguuggucaauuucgugccagccacacccuggagcuagcaaaaaaaaaaaaaaaaaaaaaaaaaaaaaaaaaaaaaaaaaaaaaaaaaaaaaaaaaaaaaaaaaaaaaaaaaaaaaaaaaaaaaaaaaaaaaaaaaaaa

SEQ ID NO: 26339 - RNA, 4273 nt, Artificial Sequence
  SARS-CoV-2/Wuhan/WIV05/2019__EPI_ISL_402128 spike protein mRNA gc (1-1273)(L18F_T20N_P26S_D138Y_R190S_K417T_E484K_N501Y_D614G_H655Y _T1027I)
agaauaaacuaguauucuucugguccccacagacucagagagaacccgccaccauguucguguuccuggugcugcugccccuggugagcagccagugcgugaacuucaccaaccggacccagcugcccagcgccuacaccaacagcuucacccggggcguguacuacccugacaagguguuccggagcagcgugcugcacagcacccaggaccuguuccugcccuucuucagcaacgugaccugguuccacgccauccacgugagcggcaccaacggcaccaagcgguucgacaaccccgugcugccauucaacgacggcguguacuucgccagcaccgagaagucaaacaucauccggggcuggaucuuuggcaccacccuggacagcaagacccagagccugcugaucgugaacaacgccacaaacguggugaucaaggugugcgaguuccaguucugcaacuaccccuuccugggcguguacuaccacaagaacaacaagagcuggauggagagcgaguuccgggucuacagcagcgcuaauaacugcaccuucgaguacgugagccagcccuuccugauggaccuggagggcaagcagggcaacuucaagaaccucagcgaguucguguucaagaacaucgacggcuacuucaagaucuacagcaagcacacccccaucaaccuggugcgggaucugccccagggauucagcgcccuggagccccugguggaccugccuaucggcaucaacaucacccgguuccagacccugcuggcccugcacaggagcuaccugacccccggcgacagcagcagcggcuggaccgccggcgccgccgcauacuacgugggcuaccugcagccccggaccuuccugcugaaguacaacgagaacggcaccaucaccgacgccguggacugcgcccuggacccacugagcgagaccaagugcacccuaaagagcuucaccguggagaagggcaucuaccagaccagcaacuuccgggugcagcccaccgagagcaucgugcgguuccccaacauuacuaaccugugucccuucggcgagguguucaacgccacccgguucgccagcguguacgccuggaaccggaagcggaucagcaacugcguggccgacuacagcgugcuguacaacagcgccagcuucagcaccuucaagugcuacggcgugagccccaccaagcugaacgaccugugcuucaccaacguguacgcugacagcuucgugauccggggcgacgaggugcggcagaucgccccuggccagaccggcaccaucgccgacuacaacuacaagcugcccgacgacuucaccggcugcgugaucgccuggaacagcaacaaccuggacagcaaggugggcggcaacuacaacuaccuguaccggcuguuccguaagagcaaccugaagcccuuugagcgggacaucagcaccgagaucuaccaggccggcagcaccccaugcaacggugugaagggcuucaacugcuacuucccccugcagagcuacggcuuccagcccaccuacggcgugggcuaccagcccuaccgggugguggugcugagcuucgagcugcugcacgcccccgccaccgugugcggccccaaaaagagcaccaaccuggugaagaacaagugcgugaacuucaauuucaacggccugaccggcaccggcgugcugaccgagagcaacaagaaguuccugccuuuccagcaguucggccgggacaucgccgauaccaccgacgcagugcgggacccccagacccuggagauccuggacaucacccccugcagcuucggcggcgugagcgucaucaccccaggcacaaacaccagcaaccagguggccgugcuguaccagggagugaacugcaccgaggugcccguggccauccacgccgaccagcugacccccaccuggcggguguacuccaccggcagcaacguguuccagacccgggccggcugccugaucggcgccgaguacgugaacaacagcuacgagugcgacauccccaucggcgcuggcaucugcgccagcuaccagacccagaccaacagcccccggcgggcccggagcguggccagccagagcaucaucgccuacaccaugagccugggcgccgagaacagcguggccuacagcaacaacagcaucgcgauccccaccaacuucaccaucagcgugaccaccgagauauuaccugugagcaugaccaagaccagcguggacuguaccauguacaucugcggcgacagcaccgagugcagcaaccugcugcugcaguacggcagcuucugcacccagcugaaccgggcccugaccggcaucgccguggagcaggacaagaacacccaagagguguucgcccaggugaagcagaucuacaagacuccacccaucaaggacuucggcggcuucaacuucagccagauccugcccgaccccagcaagcccagcaagcggagcuucaucgaggaccugcuguucaacaaggugacccuggccgacgccggcuucaucaagcaguacggcgacugccugggggacaucgccgcucgggaucugaucugcgcccagaaguucaacggccugaccgugcugccuccccugcugaccgacgagaugaucgcccaguacaccagcgcccugcuggccggcaccaucaccagcggcuggaccuucggcgccggcgcagcccuucagauccccuucgccaugcagauggccuaccgguucaacggcaucggcgugacccagaacgugcuguacgagaaccagaagcugaucgccaaccaguucaacagcgccaucggcaagauccaggacagccugagcagcaccgccagcgcccugggcaagcugcaggacguggugaaccagaacgcucaggcccugaacacccuggugaagcagcugagcucaaacuuuggcgccaucagcagcgugcugaaugacauccugagccggcuggacaagguggaggccgaggugcagaucgacaggcugaucaccggccggcugcagagccugcagaccuacgugacccagcagcugauccgggccgccgagauccgggccagcgccaaccuggcagccauuaagaugagcgagugcgugcugggccagagcaagcggguggacuucugcggcaagggcuaccaccugaugagcuucccccagagcgcuccccacggcgugguguuccugcacgucaccuacgugccagcccaggagaagaacuucacaaccgcccccgccaucugccacgacggcaaggcccacuucccccgggagggaguguucgugagcaacggcacccacugguucgugacccagcggaacuucuacgagccccagaucaucaccaccgacaacaccuucgugagcggcaacugcgacguggugaucggcaucgugaacaacaccguguacgacccccuccagcccgagcuggacagcuucaaggaggagcuggacaaguacuucaagaaccacaccagcccugacguggaccugggcgauaucagcggcaucaacgccagcguggugaacauccagaaggagaucgaccggcugaacgagguggccaagaaccugaacgagagccugaucgaccugcaggagcugggcaaguacgagcaguacaucaaguggcccugguacaucuggcugggcuucaucgccggccugaucgccaucgugauggugaccaucaugcugugcugcaugaccagcugcuguagcugccugaagggcugcugcagcugcggcagcugcugcaaguucgacgaggacgacagcgagcccgugcugaagggcgugaagcugcacuacaccugaugacucgagcugguacugcaugcacgcaaugcuagcugccccuuucccguccuggguaccccgagucucccccgaccucgggucccagguaugcucccaccuccaccugccccacucaccaccucugcuaguuccagacaccucccaagcacgcagcaaugcagcucaaaacgcuuagccuagccacacccccacgggaaacagcagugauuaaccuuuagcaauaaacgaaaguuuaacuaagcuauacuaaccccaggguuggucaauuucgugccagccacacccuggagcuagcaaaaaaaaaaaaaaaaaaaaaaaaaaaaaaaaaaaaaaaaaaaaaaaaaaaaaaaaaaaaaaaaaaaaaaaaaaaaaaaaaaaaaaaaaaaaaaaaaaaa

SEQ ID NO: 26340 - RNA, 4273 nt, Artificial Sequence
  SARS-CoV-2/Wuhan/WIV05/2019__EPI_ISL_402128 spike protein mRNA gc (1-1273)(S13I_W152C_L452R_D614G)
agaauaaacuaguauucuucugguccccacagacucagagagaacccgccaccauguucguguuccuggugcugcugccccuggugagcauccagugcgugaaccugaccacccggacccagcugcccccugccuacaccaacagcuucacccggggcguguacuaccccgacaagguguuccggagcagcgugcugcacagcacccaggaccuguuccugcccuucuucagcaacgugaccugguuccacgccauccacgugagcggcaccaacggcaccaagcgguucgacaacccagugcugcccuucaacgacggcguguacuucgccagcaccgagaagucaaacaucauccggggcuggaucuucggcaccacccuggacagcaagacacagagccugcugaucgugaacaacgccaccaacguggugaucaaggugugcgaguuucaguucugcaacgaccccuuccugggcguguacuaccacaagaacaacaagagcugcauggagagcgaguuccgggucuacagcagcgcuaacaauugcaccuucgaguacgugagccagcccuuccugauggaccucgagggcaagcagggcaacuucaagaaccugcgggaguucguguucaagaacaucgauggcuacuucaagaucuacagcaagcacacccccaucaaccuggugcgggaccugccccagggauucagcgcccuggagccucugguggaccugcccaucggcaucaacaucaccagguuccagacccugcuggcccugcaccggagcuaccugacccccggcgacagcagcagcggcuggaccgccggcgccgccgcauacuacgugggcuaccugcagccacggaccuuccugcugaaguacaacgagaacggcaccaucaccgacgccguggacugcgcccuggacccccugagcgagaccaaguguacccuaaagagcuucaccguggagaagggcaucuaccagaccagcaacuuccgggugcagcccacugagagcauugugcgguuccccaacaucaccaaccugugccccuucggcgagguguucaacgccacccgguucgccagcguguacgccuggaaccggaagcggaucagcaacugcguggccgacuacagcgugcuguacaacagcgccagcuucagcaccuucaagugcuacggcgugagcccuaccaagcugaacgaccugugcuucaccaacguguacgcugacagcuucgugauccggggcgacgaggugcggcagaucgcccccggccagaccggcaagaucgccgacuacaacuacaagcugcccgacgacuucaccggcugcgugaucgccuggaacagcaacaaccuggacagcaaggugggcggcaacuacaacuaccgguaccggcuguuccguaagagcaaccugaagccauucgagcgggacaucagcaccgagaucuaccaggccggcagcacccccugcaacgguguggagggcuuuaacugcuacuucccccugcagagcuacggcuuccagcccaccaacggcgugggcuaccagcccuaccgggugguggugcugagcuucgagcugcugcacgcccccgccaccgugugcggcccuaaaaagagcaccaaccuggugaagaacaagugcgugaacuucaauuucaacggccugaccggcaccggcgugcugaccgagagcaacaagaaguuccugcccuuccagcaguucggccgggauaucgccgacaccaccgacgcagugcgggacccccagacccuggagauccuggacaucaccccaugcagcuucggcggcgugagcgucaucacccccggcacaaacaccagcaaccagguggccgugcuguaccagggagugaacugcaccgaggugcccguggccauccacgccgaccagcugacccccaccuggcggguguacagcaccggcagcaacguguuccagacccgggccggcugccugaucggcgccgagcacgugaacaacagcuacgagugcgacauccccaucggcgcuggcaucugugccuccuaccagacccagaccaacagcccccggcgggcccggagcguggccagccagagcaucaucgccuacaccaugagccugggcgccgagaacagcguggccuacagcaacaacagcaucgcgaucccuaccaacuucaccauaagcgugaccaccgagaucuuacccgugagcaugaccaagaccagcguggacugcaccauguacaucugcggcgacagcaccgagugcagcaaccugcugcugcaguacggcagcuucugcacccagcugaaccgggcccugaccggcaucgccguggagcaggacaagaacacccaagagguguucgcccaggugaagcagaucuacaagacucccccaaucaaggacuucggcggcuucaacuucagccagauccugcccgaccccagcaagcccagcaagcggagcuucaucgaggaccugcuguucaacaaggugacccuggccgacgccggcuucaucaagcaguacggcgacugccugggggauaucgccgcucgggaccugaucugcgcccagaaguucaacggccugaccgugcugcccccucugcugaccgacgagaugaucgcccaguacaccagcgcccugcuggccggcaccaucaccagcggcuggaccuucggcgccggcgcagcccuucagauccccuucgccaugcagauggccuacagguucaacggcaucggcgugacccagaacgugcuguacgagaaccagaagcugaucgccaaccaguucaacagcgccaucggcaagauccaggacagccugagcagcaccgccagcgcccugggcaagcugcaggacguggugaaccagaacgcucaggcccugaacacccuggugaagcagcugagcagcaacuucggcgccaucagcagcgugcugaaugacauccugucacggcuggacaagguggaggccgaggugcagaucgaccggcugaucaccggccggcugcagagccugcagaccuacgugacccagcagcugauccgggccgccgagauucgggccagcgccaaccuggcagccaccaagaugagcgagugcgugcugggccagagcaagcggguggacuuuugcggcaagggcuaccaccugaugagcuucccccagagcgccccacacggcgugguguuccugcacgucacauacgugcccgcccaggagaagaacuucaccaccgcccccgccaucugccacgacggcaaggcucacuucccccgggagggaguguucgugagcaacggcacccacugguucgugacccagcggaacuucuacgagccccagaucaucaccaccgacaacaccuucgugagcggcaacugcgacguggugaucggcaucgugaacaacaccguguacgacccccuccagccugagcuggacagcuucaaggaggagcuggacaaguacuucaagaaccacaccagccccgacguggaucugggcgacaucagcggcaucaacgccagcguggugaacauccagaaggagaucgaccggcugaacgagguggccaagaaccugaacgagagccugaucgaccugcaggagcugggcaaguacgagcaguacaucaaguggcccugguacaucuggcugggcuucaucgccggccugaucgccaucgugauggugaccaucaugcugugcugcaugaccagcuguugcagcugccugaagggcugcugcagcugcggcagcugcugcaaguucgacgaggacgacagcgagccagugcugaagggcgugaagcugcacuacaccugaugacucgagcugguacugcaugcacgcaaugcuagcugccccuuucccguccuggguaccccgagucucccccgaccucgggucccagguaugcucccaccuccaccugccccacucaccaccucugcuaguuccagacaccucccaagcacgcagcaaugcagcucaaaacgcuuagccuagccacacccccacgggaaacagcagugauuaaccuuuagcaauaaacgaaaguuuaacuaagcuauacuaaccccaggguuggucaauuucgugccagccacacccuggagcuagcaaaaaaaaaaaaaaaaaaaaaaaaaaaaaaaaaaaaaaaaaaaaaaaaaaaaaaaaaaaaaaaaaaaaaaaaaaaaaaaaaaaaaaaaaaaaaaaaaaaa

SEQ ID NO: 26341 - RNA, 4273 nt, Artificial Sequence
  SARS-CoV-2/Wuhan/WIV05/2019__EPI_ISL_402128 spike protein mRNA gc mod (1-1273)
agaauaaacuaguauucuucugguccccacagacucagagagaacccgccaccauguucguguuucuggugcugcugccccugguguccagccagugugugaaccugaccaccagaacacagcugccuccagccuacaccaacagcuucaccagaggcguguacuaccccgacaagguguucagauccagcgugcugcacucuacccaggaccuguuccugccuuucuucagcaacgugaccugguuccacgccauccacguguccggcaccaauggcaccaagagauucgacaaccccgugcugcccuucaacgacgggguguacuuugccagcaccgagaaguccaacaucaucagaggcuggaucuucggcaccacacuggacagcaagacccagagccugcugaucgugaacaacgccaccaacguggucaucaaagugugcgaguuccaguucugcaacgaccccuuccugggcgucuacuaccacaagaacaacaagagcuggauggaaagcgaguuccggguguacagcagcgccaacaacugcaccuucgaguacgugucccagccuuuccugauggaccuggaaggcaagcagggcaacuucaagaaccugcgcgaguucguguucaagaacaucgacggcuacuucaaaaucuacagcaagcacaccccuaucaaccucgugcgggaucugccucagggcuucucugcucuggaaccccugguggaucugcccaucggcaucaacaucacccgguuucagacacugcuggcccugcacagaagcuaccugacaccuggcgauagcagcagcggauggacagcuggugccgccgcuuacuaugugggcuaccugcagccuagaaccuuccugcugaaguacaacgagaacggcaccaucaccgacgccguggauugugcucuggauccucugagcgagacaaagugcacccugaaguccuucaccguggaaaagggcaucuaccagaccagcaacuuccgggugcagcccaccgaauccaucgugcgguuccccaauaucaccaaucugugccccuucggcgagguguucaaugccaccagauucgccucuguguacgccuggaaccggaagcggaucagcaauugcguggccgacuacuccgugcuguacaacuccgccagcuucagcaccuucaagugcuacggcguguccccuaccaagcugaacgaccugugcuucacaaacguguacgccgacagcuucgugauccggggagaugaagugcggcagauugccccuggacagacaggcaagaucgccgacuacaacuacaagcugcccgacgacuucaccggcugugugauugccuggaacagcaacaaccuggacuccaaagucggcggcaacuacaauuaccuguaccggcuguuccggaaguccaaucugaagcccuucgagcgggacaucagcaccgaaaucuaucaggccggcagcaccccuugcaacggcguggaaggcuucaacugcuacuucccacugcaguccuacggcuuucagcccacaaauggcgugggcuaucagcccuacagagugguggugcugagcuucgaacugcugcaugcuccugccacagugugcggcccuaagaaaagcaccaaucucgugaagaacaaaugcgugaacuucaacuucaacggccugaccggcaccggcgugcugacagagagcaacaagaaguuccugccauuccagcaguuuggccgggauaucgccgauaccacagacgccguuagagauccccagacacuggaaauccuggacaucaccccaugcagcuucggcggagugucugugaucaccccuggcaccaacaccagcaaucagguggcagugcuguaccaggacgugaacuguaccgaagugcccguggccauucacgccgaucagcugacaccuacauggcggguguacuccaccggcagcaauguguuucagaccagagccggcugucugaucggagccgagcacgugaacaauagcuacgagugcgacauccccaucggcgcuggcaucugugccagcuaccagacacagacaaacagccccagacgggcuagaagcguggccagccagagcaucauugccuacacaaugucucugggcgccgagaacagcguggccuacuccaacaacucuaucgcuauccccaccaacuucaccaucagcgugaccaccgagauccugccuguguccaugaccaagaccagcguggacugcaccauguacaucugcggcgauuccaccgagugcuccaaccugcugcugcaguacggcagcuucugcacccagcugaauagagcccugacagggaucgccguggaacaggacaagaacacccaagagguguucgcccaagugaagcaaaucuacaagaccccuccuaucaaggacuucggcggcuucaauuucagccagauucugcccgauccuagcaagcccagcaagcggagcuucaucgaggaccugcuguucaacaaagugacacuggccgacgccggcuucaucaagcaguauggcgauugucugggcgacauugccgccagggaucugauuugcgcccagaaguuuaacggacugacagugcugccuccucugcugaccgaugagaugaucgcccaguacacaucugcccugcuggccggcacaaucacaagcggcuggacauuuggagcuggcgccgcucugcagauccccuuugcuaugcagauggccuaccgguucaacggcaucggagugacccagaaugugcuguacgagaaccagaagcugaucgccaaccaguucaacagcgccaucggcaagauccaggacagccugagcagcacagcaagcgcccugggaaagcugcaggacguggucaaccagaaugcccaggcacugaacacccuggucaagcagcuguccuccaacuucggcgccaucagcucugugcugaacgauauccugagcagacuggacaaggucgaggccgaggugcagaucgacagacugaucacaggcagacugcagagccuccagacauacgugacccagcagcugaucagagccgccgagauuagagccucugccaaucuggccgccaccaagaugucugagugugugcugggccagagcaagagaguggacuuuugcggcaagggcuaccaccugaugagcuucccucagucugccccucacggcgugguguuucugcacgugacauaugugcccgcucaagagaagaauuucaccaccgcuccagccaucugccacgacggcaaagcccacuuuccuagagaaggcguguucguguccaacggcacccauugguucgugacacagcggaacuucuacgagccccagaucaucaccaccgacaacaccuucgugucuggcaacugcgacguugugaucggcauugugaacaauaccguguacgacccucugcagcccgagcuggacagcuucaaagaggaacuggacaaguacuuuaagaaccacacaagccccgacguggaccugggcgauaucagcggaaucaaugccagcgucgugaacauccagaaagagaucgaccggcugaacgagguggccaagaaucugaacgagagccugaucgaccugcaagaacuggggaaguacgagcaguacaucaaguggcccugguacaucuggcugggcuuuaucgccggacugauugccaucgugauggucacaaucaugcuguguugcaugaccagcugcuguagcugccugaagggcuguuguagcuguggcagcugcugcaaguucgacgaggacgauucugagcccgugcugaagggcgugaaacugcacuacaccugaugacucgagcugguacugcaugcacgcaaugcuagcugccccuuucccguccuggguaccccgagucucccccgaccucgggucccagguaugcucccaccuccaccugccccacucaccaccucugcuaguuccagacaccucccaagcacgcagcaaugcagcucaaaacgcuuagccuagccacacccccacgggaaacagcagugauuaaccuuuagcaauaaacgaaaguuuaacuaagcuauacuaaccccaggguuggucaauuucgugccagccacacccuggagcuagcaaaaaaaaaaaaaaaaaaaaaaaaaaaaaaaaaaaaaaaaaaaaaaaaaaaaaaaaaaaaaaaaaaaaaaaaaaaaaaaaaaaaaaaaaaaaaaaaaaaa

SEQ ID NO: 26342 - RNA, 4273 nt, Artificial Sequence
  SARS-CoV-2/Wuhan/WIV05/2019__EPI_ISL_402128 spike protein mRNA gc mod (1-1273)(D614G)
agaauaaacuaguauucuucugguccccacagacucagagagaacccgccaccauguucguguuucuggugcugcugccccugguguccagccagugugugaaccugaccaccagaacacagcugccuccagccuacaccaacagcuucaccagaggcguguacuaccccgacaagguguucagauccagcgugcugcacucuacccaggaccuguuccugccuuucuucagcaacgugaccugguuccacgccauccacguguccggcaccaauggcaccaagagauucgacaaccccgugcugcccuucaacgacgggguguacuuugccagcaccgagaaguccaacaucaucagaggcuggaucuucggcaccacacuggacagcaagacccagagccugcugaucgugaacaacgccaccaacguggucaucaaagugugcgaguuccaguucugcaacgaccccuuccugggcgucuacuaccacaagaacaacaagagcuggauggaaagcgaguuccggguguacagcagcgccaacaacugcaccuucgaguacgugucccagccuuuccugauggaccuggaaggcaagcagggcaacuucaagaaccugcgcgaguucguguucaagaacaucgacggcuacuucaaaaucuacagcaagcacaccccuaucaaccucgugcgggaucugccucagggcuucucugcucuggaaccccugguggaucugcccaucggcaucaacaucacccgguuucagacacugcuggcccugcacagaagcuaccugacaccuggcgauagcagcagcggauggacagcuggugccgccgcuuacuaugugggcuaccugcagccuagaaccuuccugcugaaguacaacgagaacggcaccaucaccgacgccguggauugugcucuggauccucugagcgagacaaagugcacccugaaguccuucaccguggaaaagggcaucuaccagaccagcaacuuccgggugcagcccaccgaauccaucgugcgguuccccaauaucaccaaucugugccccuucggcgagguguucaaugccaccagauucgccucuguguacgccuggaaccggaagcggaucagcaauugcguggccgacuacuccgugcuguacaacuccgccagcuucagcaccuucaagugcuacggcguguccccuaccaagcugaacgaccugugcuucacaaacguguacgccgacagcuucgugauccggggagaugaagugcggcagauugccccuggacagacaggcaagaucgccgacuacaacuacaagcugcccgacgacuucaccggcugugugauugccuggaacagcaacaaccuggacuccaaagucggcggcaacuacaauuaccuguaccggcuguuccggaaguccaaucugaagcccuucgagcgggacaucagcaccgaaaucuaucaggccggcagcaccccuugcaacggcguggaaggcuucaacugcuacuucccacugcaguccuacggcuuucagcccacaaauggcgugggcuaucagcccuacagagugguggugcugagcuucgaacugcugcaugcuccugccacagugugcggcccuaagaaaagcaccaaucucgugaagaacaaaugcgugaacuucaacuucaacggccugaccggcaccggcgugcugacagagagcaacaagaaguuccugccauuccagcaguuuggccgggauaucgccgauaccacagacgccguuagagauccccagacacuggaaauccuggacaucaccccaugcagcuucggcggagugucugugaucaccccuggcaccaacaccagcaaucagguggcagugcuguaccagggcgugaacuguaccgaagugcccguggccauucacgccgaucagcugacaccuacauggcggguguacuccaccggcagcaauguguuucagaccagagccggcugucugaucggagccgagcacgugaacaauagcuacgagugcgacauccccaucggcgcuggcaucugugccagcuaccagacacagacaaacagccccagacgggcuagaagcguggccagccagagcaucauugccuacacaaugucucugggcgccgagaacagcguggccuacuccaacaacucuaucgcuauccccaccaacuucaccaucagcgugaccaccgagauccugccuguguccaugaccaagaccagcguggacugcaccauguacaucugcggcgauuccaccgagugcuccaaccugcugcugcaguacggcagcuucugcacccagcugaauagagcccugacagggaucgccguggaacaggacaagaacacccaagagguguucgcccaagugaagcaaaucuacaagaccccuccuaucaaggacuucggcggcuucaauuucagccagauucugcccgauccuagcaagcccagcaagcggagcuucaucgaggaccugcuguucaacaaagugacacuggccgacgccggcuucaucaagcaguauggcgauugucugggcgacauugccgccagggaucugauuugcgcccagaaguuuaacggacugacagugcugccuccucugcugaccgaugagaugaucgcccaguacacaucugcccugcuggccggcacaaucacaagcggcuggacauuuggagcuggcgccgcucugcagauccccuuugcuaugcagauggccuaccgguucaacggcaucggagugacccagaaugugcuguacgagaaccagaagcugaucgccaaccaguucaacagcgccaucggcaagauccaggacagccugagcagcacagcaagcgcccugggaaagcugcaggacguggucaaccagaaugcccaggcacugaacacccuggucaagcagcuguccuccaacuucggcgccaucagcucugugcugaacgauauccugagcagacuggacaaggucgaggccgaggugcagaucgacagacugaucacaggcagacugcagagccuccagacauacgugacccagcagcugaucagagccgccgagauuagagccucugccaaucuggccgccaccaagaugucugagugugugcugggccagagcaagagaguggacuuuugcggcaagggcuaccaccugaugagcuucccucagucugccccucacggcgugguguuucugcacgugacauaugugcccgcucaagagaagaauuucaccaccgcuccagccaucugccacgacggcaaagcccacuuuccuagagaaggcguguucguguccaacggcacccauugguucgugacacagcggaacuucuacgagccccagaucaucaccaccgacaacaccuucgugucuggcaacugcgacguugugaucggcauugugaacaauaccguguacgacccucugcagcccgagcuggacagcuucaaagaggaacuggacaaguacuuuaagaaccacacaagccccgacguggaccugggcgauaucagcggaaucaaugccagcgucgugaacauccagaaagagaucgaccggcugaacgagguggccaagaaucugaacgagagccugaucgaccugcaagaacuggggaaguacgagcaguacaucaaguggcccugguacaucuggcugggcuuuaucgccggacugauugccaucgugauggucacaaucaugcuguguugcaugaccagcugcuguagcugccugaagggcuguuguagcuguggcagcugcugcaaguucgacgaggacgauucugagcccgugcugaagggcgugaaacugcacuacaccugaugacucgagcugguacugcaugcacgcaaugcuagcugccccuuucccguccuggguaccccgagucucccccgaccucgggucccagguaugcucccaccuccaccugccccacucaccaccucugcuaguuccagacaccucccaagcacgcagcaaugcagcucaaaacgcuuagccuagccacacccccacgggaaacagcagugauuaaccuuuagcaauaaacgaaaguuuaacuaagcuauacuaaccccaggguuggucaauuucgugccagccacacccuggagcuagcaaaaaaaaaaaaaaaaaaaaaaaaaaaaaaaaaaaaaaaaaaaaaaaaaaaaaaaaaaaaaaaaaaaaaaaaaaaaaaaaaaaaaaaaaaaaaaaaaaaa

SEQ ID NO: 26343 - RNA, 4273 nt, Artificial Sequence
  SARS-CoV-2/Wuhan/WIV05/2019__EPI_ISL_402128 spike protein mRNA gc mod (1-1273)(A222V_D614G)
agaauaaacuaguauucuucugguccccacagacucagagagaacccgccaccauguucguguuucuggugcugcugccccugguguccagccagugugugaaccugaccaccagaacacagcugccuccagccuacaccaacagcuucaccagaggcguguacuaccccgacaagguguucagauccagcgugcugcacucuacccaggaccuguuccugccuuucuucagcaacgugaccugguuccacgccauccacguguccggcaccaauggcaccaagagauucgacaaccccgugcugcccuucaacgacgggguguacuuugccagcaccgagaaguccaacaucaucagaggcuggaucuucggcaccacacuggacagcaagacccagagccugcugaucgugaacaacgccaccaacguggucaucaaagugugcgaguuccaguucugcaacgaccccuuccugggcgucuacuaccacaagaacaacaagagcuggauggaaagcgaguuccggguguacagcagcgccaacaacugcaccuucgaguacgugucccagccuuuccugauggaccuggaaggcaagcagggcaacuucaagaaccugcgcgaguucguguucaagaacaucgacggcuacuucaaaaucuacagcaagcacaccccuaucaaccucgugcgggaucugccucagggcuucucugugcuggaaccccugguggaucugcccaucggcaucaacaucacccgguuucagacacugcuggcccugcacagaagcuaccugacaccuggcgauagcagcagcggauggacagcuggugccgccgcuuacuaugugggcuaccugcagccuagaaccuuccugcugaaguacaacgagaacggcaccaucaccgacgccguggauugugcucuggauccucugagcgagacaaagugcacccugaaguccuucaccguggaaaagggcaucuaccagaccagcaacuuccgggugcagcccaccgaauccaucgugcgguuccccaauaucaccaaucugugccccuucggcgagguguucaaugccaccagauucgccucuguguacgccuggaaccggaagcggaucagcaauugcguggccgacuacuccgugcuguacaacuccgccagcuucagcaccuucaagugcuacggcguguccccuaccaagcugaacgaccugugcuucacaaacguguacgccgacagcuucgugauccggggagaugaagugcggcagauugccccuggacagacaggcaagaucgccgacuacaacuacaagcugcccgacgacuucaccggcugugugauugccuggaacagcaacaaccuggacuccaaagucggcggcaacuacaauuaccuguaccggcuguuccggaaguccaaucugaagcccuucgagcgggacaucagcaccgaaaucuaucaggccggcagcaccccuugcaacggcguggaaggcuucaacugcuacuucccacugcaguccuacggcuuucagcccacaaauggcgugggcuaucagcccuacagagugguggugcugagcuucgaacugcugcaugcuccugccacagugugcggcccuaagaaaagcaccaaucucgugaagaacaaaugcgugaacuucaacuucaacggccugaccggcaccggcgugcugacagagagcaacaagaaguuccugccauuccagcaguuuggccgggauaucgccgauaccacagacgccguuagagauccccagacacuggaaauccuggacaucaccccaugcagcuucggcggagugucugugaucaccccuggcaccaacaccagcaaucagguggcagugcuguaccagggcgugaacuguaccgaagugcccguggccauucacgccgaucagcugacaccuacauggcggguguacuccaccggcagcaauguguuucagaccagagccggcugucugaucggagccgagcacgugaacaauagcuacgagugcgacauccccaucggcgcuggcaucugugccagcuaccagacacagacaaacagccccagacgggcuagaagcguggccagccagagcaucauugccuacacaaugucucugggcgccgagaacagcguggccuacuccaacaacucuaucgcuauccccaccaacuucaccaucagcgugaccaccgagauccugccuguguccaugaccaagaccagcguggacugcaccauguacaucugcggcgauuccaccgagugcuccaaccugcugcugcaguacggcagcuucugcacccagcugaauagagcccugacagggaucgccguggaacaggacaagaacacccaagagguguucgcccaagugaagcaaaucuacaagaccccuccuaucaaggacuucggcggcuucaauuucagccagauucugcccgauccuagcaagcccagcaagcggagcuucaucgaggaccugcuguucaacaaagugacacuggccgacgccggcuucaucaagcaguauggcgauugucugggcgacauugccgccagggaucugauuugcgcccagaaguuuaacggacugacagugcugccuccucugcugaccgaugagaugaucgcccaguacacaucugcccugcuggccggcacaaucacaagcggcuggacauuuggagcuggcgccgcucugcagauccccuuugcuaugcagauggccuaccgguucaacggcaucggagugacccagaaugugcuguacgagaaccagaagcugaucgccaaccaguucaacagcgccaucggcaagauccaggacagccugagcagcacagcaagcgcccugggaaagcugcaggacguggucaaccagaaugcccaggcacugaacacccuggucaagcagcuguccuccaacuucggcgccaucagcucugugcugaacgauauccugagcagacuggacaaggucgaggccgaggugcagaucgacagacugaucacaggcagacugcagagccuccagacauacgugacccagcagcugaucagagccgccgagauuagagccucugccaaucuggccgccaccaagaugucugagugugugcugggccagagcaagagaguggacuuuugcggcaagggcuaccaccugaugagcuucccucagucugccccucacggcgugguguuucugcacgugacauaugugcccgcucaagagaagaauuucaccaccgcuccagccaucugccacgacggcaaagcccacuuuccuagagaaggcguguucguguccaacggcacccauugguucgugacacagcggaacuucuacgagccccagaucaucaccaccgacaacaccuucgugucuggcaacugcgacguugugaucggcauugugaacaauaccguguacgacccucugcagcccgagcuggacagcuucaaagaggaacuggacaaguacuuuaagaaccacacaagccccgacguggaccugggcgauaucagcggaaucaaugccagcgucgugaacauccagaaagagaucgaccggcugaacgagguggccaagaaucugaacgagagccugaucgaccugcaagaacuggggaaguacgagcaguacaucaaguggcccugguacaucuggcugggcuuuaucgccggacugauugccaucgugauggucacaaucaugcuguguugcaugaccagcugcuguagcugccugaagggcuguuguagcuguggcagcugcugcaaguucgacgaggacgauucugagcccgugcugaagggcgugaaacugcacuacaccugaugacucgagcugguacugcaugcacgcaaugcuagcugccccuuucccguccuggguaccccgagucucccccgaccucgggucccagguaugcucccaccuccaccugccccacucaccaccucugcuaguuccagacaccucccaagcacgcagcaaugcagcucaaaacgcuuagccuagccacacccccacgggaaacagcagugauuaaccuuuagcaauaaacgaaaguuuaacuaagcuauacuaaccccaggguuggucaauuucgugccagccacacccuggagcuagcaaaaaaaaaaaaaaaaaaaaaaaaaaaaaaaaaaaaaaaaaaaaaaaaaaaaaaaaaaaaaaaaaaaaaaaaaaaaaaaaaaaaaaaaaaaaaaaaaaaa

SEQ ID NO: 26344 - RNA, 4273 nt, Artificial Sequence
  SARS-CoV-2/Wuhan/WIV05/2019__EPI_ISL_402128 spike protein mRNA gc mod (1-1273)(N439K_D614G)
agaauaaacuaguauucuucugguccccacagacucagagagaacccgccaccauguucguguuucuggugcugcugccccugguguccagccagugugugaaccugaccaccagaacacagcugccuccagccuacaccaacagcuucaccagaggcguguacuaccccgacaagguguucagauccagcgugcugcacucuacccaggaccuguuccugccuuucuucagcaacgugaccugguuccacgccauccacguguccggcaccaauggcaccaagagauucgacaaccccgugcugcccuucaacgacgggguguacuuugccagcaccgagaaguccaacaucaucagaggcuggaucuucggcaccacacuggacagcaagacccagagccugcugaucgugaacaacgccaccaacguggucaucaaagugugcgaguuccaguucugcaacgaccccuuccugggcgucuacuaccacaagaacaacaagagcuggauggaaagcgaguuccggguguacagcagcgccaacaacugcaccuucgaguacgugucccagccuuuccugauggaccuggaaggcaagcagggcaacuucaagaaccugcgcgaguucguguucaagaacaucgacggcuacuucaaaaucuacagcaagcacaccccuaucaaccucgugcgggaucugccucagggcuucucugcucuggaaccccugguggaucugcccaucggcaucaacaucacccgguuucagacacugcuggcccugcacagaagcuaccugacaccuggcgauagcagcagcggauggacagcuggugccgccgcuuacuaugugggcuaccugcagccuagaaccuuccugcugaaguacaacgagaacggcaccaucaccgacgccguggauugugcucuggauccucugagcgagacaaagugcacccugaaguccuucaccguggaaaagggcaucuaccagaccagcaacuuccgggugcagcccaccgaauccaucgugcgguuccccaauaucaccaaucugugccccuucggcgagguguucaaugccaccagauucgccucuguguacgccuggaaccggaagcggaucagcaauugcguggccgacuacuccgugcuguacaacuccgccagcuucagcaccuucaagugcuacggcguguccccuaccaagcugaacgaccugugcuucacaaacguguacgccgacagcuucgugauccggggagaugaagugcggcagauugccccuggacagacaggcaagaucgccgacuacaacuacaagcugcccgacgacuucaccggcugugugauugccuggaacagcaagaaccuggacuccaaagucggcggcaacuacaauuaccuguaccggcuguuccggaaguccaaucugaagcccuucgagcgggacaucagcaccgaaaucuaucaggccggcagcaccccuugcaacggcguggaaggcuucaacugcuacuucccacugcaguccuacggcuuucagcccacaaauggcgugggcuaucagcccuacagagugguggugcugagcuucgaacugcugcaugcuccugccacagugugcggcccuaagaaaagcaccaaucucgugaagaacaaaugcgugaacuucaacuucaacggccugaccggcaccggcgugcugacagagagcaacaagaaguuccugccauuccagcaguuuggccgggauaucgccgauaccacagacgccguuagagauccccagacacuggaaauccuggacaucaccccaugcagcuucggcggagugucugugaucaccccuggcaccaacaccagcaaucagguggcagugcuguaccagggcgugaacuguaccgaagugcccguggccauucacgccgaucagcugacaccuacauggcggguguacuccaccggcagcaauguguuucagaccagagccggcugucugaucggagccgagcacgugaacaauagcuacgagugcgacauccccaucggcgcuggcaucugugccagcuaccagacacagacaaacagccccagacgggcuagaagcguggccagccagagcaucauugccuacacaaugucucugggcgccgagaacagcguggccuacuccaacaacucuaucgcuauccccaccaacuucaccaucagcgugaccaccgagauccugccuguguccaugaccaagaccagcguggacugcaccauguacaucugcggcgauuccaccgagugcuccaaccugcugcugcaguacggcagcuucugcacccagcugaauagagcccugacagggaucgccguggaacaggacaagaacacccaagagguguucgcccaagugaagcaaaucuacaagaccccuccuaucaaggacuucggcggcuucaauuucagccagauucugcccgauccuagcaagcccagcaagcggagcuucaucgaggaccugcuguucaacaaagugacacuggccgacgccggcuucaucaagcaguauggcgauugucugggcgacauugccgccagggaucugauuugcgcccagaaguuuaacggacugacagugcugccuccucugcugaccgaugagaugaucgcccaguacacaucugcccugcuggccggcacaaucacaagcggcuggacauuuggagcuggcgccgcucugcagauccccuuugcuaugcagauggccuaccgguucaacggcaucggagugacccagaaugugcuguacgagaaccagaagcugaucgccaaccaguucaacagcgccaucggcaagauccaggacagccugagcagcacagcaagcgcccugggaaagcugcaggacguggucaaccagaaugcccaggcacugaacacccuggucaagcagcuguccuccaacuucggcgccaucagcucugugcugaacgauauccugagcagacuggacaaggucgaggccgaggugcagaucgacagacugaucacaggcagacugcagagccuccagacauacgugacccagcagcugaucagagccgccgagauuagagccucugccaaucuggccgccaccaagaugucugagugugugcugggccagagcaagagaguggacuuuugcggcaagggcuaccaccugaugagcuucccucagucugccccucacggcgugguguuucugcacgugacauaugugcccgcucaagagaagaauuucaccaccgcuccagccaucugccacgacggcaaagcccacuuuccuagagaaggcguguucguguccaacggcacccauugguucgugacacagcggaacuucuacgagccccagaucaucaccaccgacaacaccuucgugucuggcaacugcgacguugugaucggcauugugaacaauaccguguacgacccucugcagcccgagcuggacagcuucaaagaggaacuggacaaguacuuuaagaaccacacaagccccgacguggaccugggcgauaucagcggaaucaaugccagcgucgugaacauccagaaagagaucgaccggcugaacgagguggccaagaaucugaacgagagccugaucgaccugcaagaacuggggaaguacgagcaguacaucaaguggcccugguacaucuggcugggcuuuaucgccggacugauugccaucgugauggucacaaucaugcuguguugcaugaccagcugcuguagcugccugaagggcuguuguagcuguggcagcugcugcaaguucgacgaggacgauucugagcccgugcugaagggcgugaaacugcacuacaccugaugacucgagcugguacugcaugcacgcaaugcuagcugccccuuucccguccuggguaccccgagucucccccgaccucgggucccagguaugcucccaccuccaccugccccacucaccaccucugcuaguuccagacaccucccaagcacgcagcaaugcagcucaaaacgcuuagccuagccacacccccacgggaaacagcagugauuaaccuuuagcaauaaacgaaaguuuaacuaagcuauacuaaccccaggguuggucaauuucgugccagccacacccuggagcuagcaaaaaaaaaaaaaaaaaaaaaaaaaaaaaaaaaaaaaaaaaaaaaaaaaaaaaaaaaaaaaaaaaaaaaaaaaaaaaaaaaaaaaaaaaaaaaaaaaaaa

SEQ ID NO: 26345 - RNA, 4273 nt, Artificial Sequence
  SARS-CoV-2/Wuhan/WIV05/2019__EPI_ISL_402128 spike protein mRNA gc mod (1-1273)(S477N_D614G)
agaauaaacuaguauucuucugguccccacagacucagagagaacccgccaccauguucguguuucuggugcugcugccccugguguccagccagugugugaaccugaccaccagaacacagcugccuccagccuacaccaacagcuucaccagaggcguguacuaccccgacaagguguucagauccagcgugcugcacucuacccaggaccuguuccugccuuucuucagcaacgugaccugguuccacgccauccacguguccggcaccaauggcaccaagagauucgacaaccccgugcugcccuucaacgacgggguguacuuugccagcaccgagaaguccaacaucaucagaggcuggaucuucggcaccacacuggacagcaagacccagagccugcugaucgugaacaacgccaccaacguggucaucaaagugugcgaguuccaguucugcaacgaccccuuccugggcgucuacuaccacaagaacaacaagagcuggauggaaagcgaguuccggguguacagcagcgccaacaacugcaccuucgaguacgugucccagccuuuccugauggaccuggaaggcaagcagggcaacuucaagaaccugcgcgaguucguguucaagaacaucgacggcuacuucaaaaucuacagcaagcacaccccuaucaaccucgugcgggaucugccucagggcuucucugcucuggaaccccugguggaucugcccaucggcaucaacaucacccgguuucagacacugcuggcccugcacagaagcuaccugacaccuggcgauagcagcagcggauggacagcuggugccgccgcuuacuaugugggcuaccugcagccuagaaccuuccugcugaaguacaacgagaacggcaccaucaccgacgccguggauugugcucuggauccucugagcgagacaaagugcacccugaaguccuucaccguggaaaagggcaucuaccagaccagcaacuuccgggugcagcccaccgaauccaucgugcgguuccccaauaucaccaaucugugccccuucggcgagguguucaaugccaccagauucgccucuguguacgccuggaaccggaagcggaucagcaauugcguggccgacuacuccgugcuguacaacuccgccagcuucagcaccuucaagugcuacggcguguccccuaccaagcugaacgaccugugcuucacaaacguguacgccgacagcuucgugauccggggagaugaagugcggcagauugccccuggacagacaggcaagaucgccgacuacaacuacaagcugcccgacgacuucaccggcugugugauugccuggaacagcaacaaccuggacuccaaagucggcggcaacuacaauuaccuguaccggcuguuccggaaguccaaucugaagcccuucgagcgggacaucagcaccgaaaucuaucaggccggcaacaccccuugcaacggcguggaaggcuucaacugcuacuucccacugcaguccuacggcuuucagcccacaaauggcgugggcuaucagcccuacagagugguggugcugagcuucgaacugcugcaugcuccugccacagugugcggcccuaagaaaagcaccaaucucgugaagaacaaaugcgugaacuucaacuucaacggccugaccggcaccggcgugcugacagagagcaacaagaaguuccugccauuccagcaguuuggccgggauaucgccgauaccacagacgccguuagagauccccagacacuggaaauccuggacaucaccccaugcagcuucggcggagugucugugaucaccccuggcaccaacaccagcaaucagguggcagugcuguaccagggcgugaacuguaccgaagugcccguggccauucacgccgaucagcugacaccuacauggcggguguacuccaccggcagcaauguguuucagaccagagccggcugucugaucggagccgagcacgugaacaauagcuacgagugcgacauccccaucggcgcuggcaucugugccagcuaccagacacagacaaacagccccagacgggcuagaagcguggccagccagagcaucauugccuacacaaugucucugggcgccgagaacagcguggccuacuccaacaacucuaucgcuauccccaccaacuucaccaucagcgugaccaccgagauccugccuguguccaugaccaagaccagcguggacugcaccauguacaucugcggcgauuccaccgagugcuccaaccugcugcugcaguacggcagcuucugcacccagcugaauagagcccugacagggaucgccguggaacaggacaagaacacccaagagguguucgcccaagugaagcaaaucuacaagaccccuccuaucaaggacuucggcggcuucaauuucagccagauucugcccgauccuagcaagcccagcaagcggagcuucaucgaggaccugcuguucaacaaagugacacuggccgacgccggcuucaucaagcaguauggcgauugucugggcgacauugccgccagggaucugauuugcgcccagaaguuuaacggacugacagugcugccuccucugcugaccgaugagaugaucgcccaguacacaucugcccugcuggccggcacaaucacaagcggcuggacauuuggagcuggcgccgcucugcagauccccuuugcuaugcagauggccuaccgguucaacggcaucggagugacccagaaugugcuguacgagaaccagaagcugaucgccaaccaguucaacagcgccaucggcaagauccaggacagccugagcagcacagcaagcgcccugggaaagcugcaggacguggucaaccagaaugcccaggcacugaacacccuggucaagcagcuguccuccaacuucggcgccaucagcucugugcugaacgauauccugagcagacuggacaaggucgaggccgaggugcagaucgacagacugaucacaggcagacugcagagccuccagacauacgugacccagcagcugaucagagccgccgagauuagagccucugccaaucuggccgccaccaagaugucugagugugugcugggccagagcaagagaguggacuuuugcggcaagggcuaccaccugaugagcuucccucagucugccccucacggcgugguguuucugcacgugacauaugugcccgcucaagagaagaauuucaccaccgcuccagccaucugccacgacggcaaagcccacuuuccuagagaaggcguguucguguccaacggcacccauugguucgugacacagcggaacuucuacgagccccagaucaucaccaccgacaacaccuucgugucuggcaacugcgacguugugaucggcauugugaacaauaccguguacgacccucugcagcccgagcuggacagcuucaaagaggaacuggacaaguacuuuaagaaccacacaagccccgacguggaccugggcgauaucagcggaaucaaugccagcgucgugaacauccagaaagagaucgaccggcugaacgagguggccaagaaucugaacgagagccugaucgaccugcaagaacuggggaaguacgagcaguacaucaaguggcccugguacaucuggcugggcuuuaucgccggacugauugccaucgugauggucacaaucaugcuguguugcaugaccagcugcuguagcugccugaagggcuguuguagcuguggcagcugcugcaaguucgacgaggacgauucugagcccgugcugaagggcgugaaacugcacuacaccugaugacucgagcugguacugcaugcacgcaaugcuagcugccccuuucccguccuggguaccccgagucucccccgaccucgggucccagguaugcucccaccuccaccugccccacucaccaccucugcuaguuccagacaccucccaagcacgcagcaaugcagcucaaaacgcuuagccuagccacacccccacgggaaacagcagugauuaaccuuuagcaauaaacgaaaguuuaacuaagcuauacuaaccccaggguuggucaauuucgugccagccacacccuggagcuagcaaaaaaaaaaaaaaaaaaaaaaaaaaaaaaaaaaaaaaaaaaaaaaaaaaaaaaaaaaaaaaaaaaaaaaaaaaaaaaaaaaaaaaaaaaaaaaaaaaaa

SEQ ID NO: 26346 - RNA, 4273 nt, Artificial Sequence
  SARS-CoV-2/Wuhan/WIV05/2019__EPI_ISL_402128 spike protein mRNA gc mod (1-1273)(N501Y_D614G)
agaauaaacuaguauucuucugguccccacagacucagagagaacccgccaccauguucguguuucuggugcugcugccccugguguccagccagugugugaaccugaccaccagaacacagcugccuccagccuacaccaacagcuucaccagaggcguguacuaccccgacaagguguucagauccagcgugcugcacucuacccaggaccuguuccugccuuucuucagcaacgugaccugguuccacgccauccacguguccggcaccaauggcaccaagagauucgacaaccccgugcugcccuucaacgacgggguguacuuugccagcaccgagaaguccaacaucaucagaggcuggaucuucggcaccacacuggacagcaagacccagagccugcugaucgugaacaacgccaccaacguggucaucaaagugugcgaguuccaguucugcaacgaccccuuccugggcgucuacuaccacaagaacaacaagagcuggauggaaagcgaguuccggguguacagcagcgccaacaacugcaccuucgaguacgugucccagccuuuccugauggaccuggaaggcaagcagggcaacuucaagaaccugcgcgaguucguguucaagaacaucgacggcuacuucaaaaucuacagcaagcacaccccuaucaaccucgugcgggaucugccucagggcuucucugcucuggaaccccugguggaucugcccaucggcaucaacaucacccgguuucagacacugcuggcccugcacagaagcuaccugacaccuggcgauagcagcagcggauggacagcuggugccgccgcuuacuaugugggcuaccugcagccuagaaccuuccugcugaaguacaacgagaacggcaccaucaccgacgccguggauugugcucuggauccucugagcgagacaaagugcacccugaaguccuucaccguggaaaagggcaucuaccagaccagcaacuuccgggugcagcccaccgaauccaucgugcgguuccccaauaucaccaaucugugccccuucggcgagguguucaaugccaccagauucgccucuguguacgccuggaaccggaagcggaucagcaauugcguggccgacuacuccgugcuguacaacuccgccagcuucagcaccuucaagugcuacggcguguccccuaccaagcugaacgaccugugcuucacaaacguguacgccgacagcuucgugauccggggagaugaagugcggcagauugccccuggacagacaggcaagaucgccgacuacaacuacaagcugcccgacgacuucaccggcugugugauugccuggaacagcaacaaccuggacuccaaagucggcggcaacuacaauuaccuguaccggcuguuccggaaguccaaucugaagcccuucgagcgggacaucagcaccgaaaucuaucaggccggcagcaccccuugcaacggcguggaaggcuucaacugcuacuucccacugcaguccuacggcuuucagcccacauacggcgugggcuaucagcccuacagagugguggugcugagcuucgaacugcugcaugcuccugccacagugugcggcccuaagaaaagcaccaaucucgugaagaacaaaugcgugaacuucaacuucaacggccugaccggcaccggcgugcugacagagagcaacaagaaguuccugccauuccagcaguuuggccgggauaucgccgauaccacagacgccguuagagauccccagacacuggaaauccuggacaucaccccaugcagcuucggcggagugucugugaucaccccuggcaccaacaccagcaaucagguggcagugcuguaccagggcgugaacuguaccgaagugcccguggccauucacgccgaucagcugacaccuacauggcggguguacuccaccggcagcaauguguuucagaccagagccggcugucugaucggagccgagcacgugaacaauagcuacgagugcgacauccccaucggcgcuggcaucugugccagcuaccagacacagacaaacagccccagacgggcuagaagcguggccagccagagcaucauugccuacacaaugucucugggcgccgagaacagcguggccuacuccaacaacucuaucgcuauccccaccaacuucaccaucagcgugaccaccgagauccugccuguguccaugaccaagaccagcguggacugcaccauguacaucugcggcgauuccaccgagugcuccaaccugcugcugcaguacggcagcuucugcacccagcugaauagagcccugacagggaucgccguggaacaggacaagaacacccaagagguguucgcccaagugaagcaaaucuacaagaccccuccuaucaaggacuucggcggcuucaauuucagccagauucugcccgauccuagcaagcccagcaagcggagcuucaucgaggaccugcuguucaacaaagugacacuggccgacgccggcuucaucaagcaguauggcgauugucugggcgacauugccgccagggaucugauuugcgcccagaaguuuaacggacugacagugcugccuccucugcugaccgaugagaugaucgcccaguacacaucugcccugcuggccggcacaaucacaagcggcuggacauuuggagcuggcgccgcucugcagauccccuuugcuaugcagauggccuaccgguucaacggcaucggagugacccagaaugugcuguacgagaaccagaagcugaucgccaaccaguucaacagcgccaucggcaagauccaggacagccugagcagcacagcaagcgcccugggaaagcugcaggacguggucaaccagaaugcccaggcacugaacacccuggucaagcagcuguccuccaacuucggcgccaucagcucugugcugaacgauauccugagcagacuggacaaggucgaggccgaggugcagaucgacagacugaucacaggcagacugcagagccuccagacauacgugacccagcagcugaucagagccgccgagauuagagccucugccaaucuggccgccaccaagaugucugagugugugcugggccagagcaagagaguggacuuuugcggcaagggcuaccaccugaugagcuucccucagucugccccucacggcgugguguuucugcacgugacauaugugcccgcucaagagaagaauuucaccaccgcuccagccaucugccacgacggcaaagcccacuuuccuagagaaggcguguucguguccaacggcacccauugguucgugacacagcggaacuucuacgagccccagaucaucaccaccgacaacaccuucgugucuggcaacugcgacguugugaucggcauugugaacaauaccguguacgacccucugcagcccgagcuggacagcuucaaagaggaacuggacaaguacuuuaagaaccacacaagccccgacguggaccugggcgauaucagcggaaucaaugccagcgucgugaacauccagaaagagaucgaccggcugaacgagguggccaagaaucugaacgagagccugaucgaccugcaagaacuggggaaguacgagcaguacaucaaguggcccugguacaucuggcugggcuuuaucgccggacugauugccaucgugauggucacaaucaugcuguguugcaugaccagcugcuguagcugccugaagggcuguuguagcuguggcagcugcugcaaguucgacgaggacgauucugagcccgugcugaagggcgugaaacugcacuacaccugaugacucgagcugguacugcaugcacgcaaugcuagcugccccuuucccguccuggguaccccgagucucccccgaccucgggucccagguaugcucccaccuccaccugccccacucaccaccucugcuaguuccagacaccucccaagcacgcagcaaugcagcucaaaacgcuuagccuagccacacccccacgggaaacagcagugauuaaccuuuagcaauaaacgaaaguuuaacuaagcuauacuaaccccaggguuggucaauuucgugccagccacacccuggagcuagcaaaaaaaaaaaaaaaaaaaaaaaaaaaaaaaaaaaaaaaaaaaaaaaaaaaaaaaaaaaaaaaaaaaaaaaaaaaaaaaaaaaaaaaaaaaaaaaaaaaa

SEQ ID NO: 26347 - RNA, 4267 nt, Artificial Sequence
  SARS-CoV-2/Wuhan/WIV05/2019__EPI_ISL_402128 spike protein mRNA gc mod (1-1273)(H69del_V70del_D614G)
agaauaaacuaguauucuucugguccccacagacucagagagaacccgccaccauguucguguuucuggugcugcugccccugguguccagccagugugugaaccugaccaccagaacacagcugccuccagccuacaccaacagcuucaccagaggcguguacuaccccgacaagguguucagauccagcgugcugcacucuacccaggaccuguuccugccuuucuucagcaacgugaccugguuccacgccaucuccggcaccaauggcaccaagagauucgacaaccccgugcugcccuucaacgacgggguguacuuugccagcaccgagaaguccaacaucaucagaggcuggaucuucggcaccacacuggacagcaagacccagagccugcugaucgugaacaacgccaccaacguggucaucaaagugugcgaguuccaguucugcaacgaccccuuccugggcgucuacuaccacaagaacaacaagagcuggauggaaagcgaguuccggguguacagcagcgccaacaacugcaccuucgaguacgugucccagccuuuccugauggaccuggaaggcaagcagggcaacuucaagaaccugcgcgaguucguguucaagaacaucgacggcuacuucaaaaucuacagcaagcacaccccuaucaaccucgugcgggaucugccucagggcuucucugcucuggaaccccugguggaucugcccaucggcaucaacaucacccgguuucagacacugcuggcccugcacagaagcuaccugacaccuggcgauagcagcagcggauggacagcuggugccgccgcuuacuaugugggcuaccugcagccuagaaccuuccugcugaaguacaacgagaacggcaccaucaccgacgccguggauugugcucuggauccucugagcgagacaaagugcacccugaaguccuucaccguggaaaagggcaucuaccagaccagcaacuuccgggugcagcccaccgaauccaucgugcgguuccccaauaucaccaaucugugccccuucggcgagguguucaaugccaccagauucgccucuguguacgccuggaaccggaagcggaucagcaauugcguggccgacuacuccgugcuguacaacuccgccagcuucagcaccuucaagugcuacggcguguccccuaccaagcugaacgaccugugcuucacaaacguguacgccgacagcuucgugauccggggagaugaagugcggcagauugccccuggacagacaggcaagaucgccgacuacaacuacaagcugcccgacgacuucaccggcugugugauugccuggaacagcaacaaccuggacuccaaagucggcggcaacuacaauuaccuguaccggcuguuccggaaguccaaucugaagcccuucgagcgggacaucagcaccgaaaucuaucaggccggcagcaccccuugcaacggcguggaaggcuucaacugcuacuucccacugcaguccuacggcuuucagcccacaaauggcgugggcuaucagcccuacagagugguggugcugagcuucgaacugcugcaugcuccugccacagugugcggcccuaagaaaagcaccaaucucgugaagaacaaaugcgugaacuucaacuucaacggccugaccggcaccggcgugcugacagagagcaacaagaaguuccugccauuccagcaguuuggccgggauaucgccgauaccacagacgccguuagagauccccagacacuggaaauccuggacaucaccccaugcagcuucggcggagugucugugaucaccccuggcaccaacaccagcaaucagguggcagugcuguaccagggcgugaacuguaccgaagugcccguggccauucacgccgaucagcugacaccuacauggcggguguacuccaccggcagcaauguguuucagaccagagccggcugucugaucggagccgagcacgugaacaauagcuacgagugcgacauccccaucggcgcuggcaucugugccagcuaccagacacagacaaacagccccagacgggcuagaagcguggccagccagagcaucauugccuacacaaugucucugggcgccgagaacagcguggccuacuccaacaacucuaucgcuauccccaccaacuucaccaucagcgugaccaccgagauccugccuguguccaugaccaagaccagcguggacugcaccauguacaucugcggcgauuccaccgagugcuccaaccugcugcugcaguacggcagcuucugcacccagcugaauagagcccugacagggaucgccguggaacaggacaagaacacccaagagguguucgcccaagugaagcaaaucuacaagaccccuccuaucaaggacuucggcggcuucaauuucagccagauucugcccgauccuagcaagcccagcaagcggagcuucaucgaggaccugcuguucaacaaagugacacuggccgacgccggcuucaucaagcaguauggcgauugucugggcgacauugccgccagggaucugauuugcgcccagaaguuuaacggacugacagugcugccuccucugcugaccgaugagaugaucgcccaguacacaucugcccugcuggccggcacaaucacaagcggcuggacauuuggagcuggcgccgcucugcagauccccuuugcuaugcagauggccuaccgguucaacggcaucggagugacccagaaugugcuguacgagaaccagaagcugaucgccaaccaguucaacagcgccaucggcaagauccaggacagccugagcagcacagcaagcgcccugggaaagcugcaggacguggucaaccagaaugcccaggcacugaacacccuggucaagcagcuguccuccaacuucggcgccaucagcucugugcugaacgauauccugagcagacuggacaaggucgaggccgaggugcagaucgacagacugaucacaggcagacugcagagccuccagacauacgugacccagcagcugaucagagccgccgagauuagagccucugccaaucuggccgccaccaagaugucugagugugugcugggccagagcaagagaguggacuuuugcggcaagggcuaccaccugaugagcuucccucagucugccccucacggcgugguguuucugcacgugacauaugugcccgcucaagagaagaauuucaccaccgcuccagccaucugccacgacggcaaagcccacuuuccuagagaaggcguguucguguccaacggcacccauugguucgugacacagcggaacuucuacgagccccagaucaucaccaccgacaacaccuucgugucuggcaacugcgacguugugaucggcauugugaacaauaccguguacgacccucugcagcccgagcuggacagcuucaaagaggaacuggacaaguacuuuaagaaccacacaagccccgacguggaccugggcgauaucagcggaaucaaugccagcgucgugaacauccagaaagagaucgaccggcugaacgagguggccaagaaucugaacgagagccugaucgaccugcaagaacuggggaaguacgagcaguacaucaaguggcccugguacaucuggcugggcuuuaucgccggacugauugccaucgugauggucacaaucaugcuguguugcaugaccagcugcuguagcugccugaagggcuguuguagcuguggcagcugcugcaaguucgacgaggacgauucugagcccgugcugaagggcgugaaacugcacuacaccugaugacucgagcugguacugcaugcacgcaaugcuagcugccccuuucccguccuggguaccccgagucucccccgaccucgggucccagguaugcucccaccuccaccugccccacucaccaccucugcuaguuccagacaccucccaagcacgcagcaaugcagcucaaaacgcuuagccuagccacacccccacgggaaacagcagugauuaaccuuuagcaauaaacgaaaguuuaacuaagcuauacuaaccccaggguuggucaauuucgugccagccacacccuggagcuagcaaaaaaaaaaaaaaaaaaaaaaaaaaaaaaaaaaaaaaaaaaaaaaaaaaaaaaaaaaaaaaaaaaaaaaaaaaaaaaaaaaaaaaaaaaaaaaaaaaaa

SEQ ID NO: 26348 - RNA, 4273 nt, Artificial Sequence
  SARS-CoV-2/Wuhan/WIV05/2019__EPI_ISL_402128 spike protein mRNA gc mod (1-1273)(Y453F_D614G)
agaauaaacuaguauucuucugguccccacagacucagagagaacccgccaccauguucguguuucuggugcugcugccccugguguccagccagugugugaaccugaccaccagaacacagcugccuccagccuacaccaacagcuucaccagaggcguguacuaccccgacaagguguucagauccagcgugcugcacucuacccaggaccuguuccugccuuucuucagcaacgugaccugguuccacgccauccacguguccggcaccaauggcaccaagagauucgacaaccccgugcugcccuucaacgacgggguguacuuugccagcaccgagaaguccaacaucaucagaggcuggaucuucggcaccacacuggacagcaagacccagagccugcugaucgugaacaacgccaccaacguggucaucaaagugugcgaguuccaguucugcaacgaccccuuccugggcgucuacuaccacaagaacaacaagagcuggauggaaagcgaguuccggguguacagcagcgccaacaacugcaccuucgaguacgugucccagccuuuccugauggaccuggaaggcaagcagggcaacuucaagaaccugcgcgaguucguguucaagaacaucgacggcuacuucaaaaucuacagcaagcacaccccuaucaaccucgugcgggaucugccucagggcuucucugcucuggaaccccugguggaucugcccaucggcaucaacaucacccgguuucagacacugcuggcccugcacagaagcuaccugacaccuggcgauagcagcagcggauggacagcuggugccgccgcuuacuaugugggcuaccugcagccuagaaccuuccugcugaaguacaacgagaacggcaccaucaccgacgccguggauugugcucuggauccucugagcgagacaaagugcacccugaaguccuucaccguggaaaagggcaucuaccagaccagcaacuuccgggugcagcccaccgaauccaucgugcgguuccccaauaucaccaaucugugccccuucggcgagguguucaaugccaccagauucgccucuguguacgccuggaaccggaagcggaucagcaauugcguggccgacuacuccgugcuguacaacuccgccagcuucagcaccuucaagugcuacggcguguccccuaccaagcugaacgaccugugcuucacaaacguguacgccgacagcuucgugauccggggagaugaagugcggcagauugccccuggacagacaggcaagaucgccgacuacaacuacaagcugcccgacgacuucaccggcugugugauugccuggaacagcaacaaccuggacuccaaagucggcggcaacuacaauuaccuguuccggcuguuccggaaguccaaucugaagcccuucgagcgggacaucagcaccgaaaucuaucaggccggcagcaccccuugcaacggcguggaaggcuucaacugcuacuucccacugcaguccuacggcuuucagcccacaaauggcgugggcuaucagcccuacagagugguggugcugagcuucgaacugcugcaugcuccugccacagugugcggcccuaagaaaagcaccaaucucgugaagaacaaaugcgugaacuucaacuucaacggccugaccggcaccggcgugcugacagagagcaacaagaaguuccugccauuccagcaguuuggccgggauaucgccgauaccacagacgccguuagagauccccagacacuggaaauccuggacaucaccccaugcagcuucggcggagugucugugaucaccccuggcaccaacaccagcaaucagguggcagugcuguaccagggcgugaacuguaccgaagugcccguggccauucacgccgaucagcugacaccuacauggcggguguacuccaccggcagcaauguguuucagaccagagccggcugucugaucggagccgagcacgugaacaauagcuacgagugcgacauccccaucggcgcuggcaucugugccagcuaccagacacagacaaacagccccagacgggcuagaagcguggccagccagagcaucauugccuacacaaugucucugggcgccgagaacagcguggccuacuccaacaacucuaucgcuauccccaccaacuucaccaucagcgugaccaccgagauccugccuguguccaugaccaagaccagcguggacugcaccauguacaucugcggcgauuccaccgagugcuccaaccugcugcugcaguacggcagcuucugcacccagcugaauagagcccugacagggaucgccguggaacaggacaagaacacccaagagguguucgcccaagugaagcaaaucuacaagaccccuccuaucaaggacuucggcggcuucaauuucagccagauucugcccgauccuagcaagcccagcaagcggagcuucaucgaggaccugcuguucaacaaagugacacuggccgacgccggcuucaucaagcaguauggcgauugucugggcgacauugccgccagggaucugauuugcgcccagaaguuuaacggacugacagugcugccuccucugcugaccgaugagaugaucgcccaguacacaucugcccugcuggccggcacaaucacaagcggcuggacauuuggagcuggcgccgcucugcagauccccuuugcuaugcagauggccuaccgguucaacggcaucggagugacccagaaugugcuguacgagaaccagaagcugaucgccaaccaguucaacagcgccaucggcaagauccaggacagccugagcagcacagcaagcgcccugggaaagcugcaggacguggucaaccagaaugcccaggcacugaacacccuggucaagcagcuguccuccaacuucggcgccaucagcucugugcugaacgauauccugagcagacuggacaaggucgaggccgaggugcagaucgacagacugaucacaggcagacugcagagccuccagacauacgugacccagcagcugaucagagccgccgagauuagagccucugccaaucuggccgccaccaagaugucugagugugugcugggccagagcaagagaguggacuuuugcggcaagggcuaccaccugaugagcuucccucagucugccccucacggcgugguguuucugcacgugacauaugugcccgcucaagagaagaauuucaccaccgcuccagccaucugccacgacggcaaagcccacuuuccuagagaaggcguguucguguccaacggcacccauugguucgugacacagcggaacuucuacgagccccagaucaucaccaccgacaacaccuucgugucuggcaacugcgacguugugaucggcauugugaacaauaccguguacgacccucugcagcccgagcuggacagcuucaaagaggaacuggacaaguacuuuaagaaccacacaagccccgacguggaccugggcgauaucagcggaaucaaugccagcgucgugaacauccagaaagagaucgaccggcugaacgagguggccaagaaucugaacgagagccugaucgaccugcaagaacuggggaaguacgagcaguacaucaaguggcccugguacaucuggcugggcuuuaucgccggacugauugccaucgugauggucacaaucaugcuguguugcaugaccagcugcuguagcugccugaagggcuguuguagcuguggcagcugcugcaaguucgacgaggacgauucugagcccgugcugaagggcgugaaacugcacuacaccugaugacucgagcugguacugcaugcacgcaaugcuagcugccccuuucccguccuggguaccccgagucucccccgaccucgggucccagguaugcucccaccuccaccugccccacucaccaccucugcuaguuccagacaccucccaagcacgcagcaaugcagcucaaaacgcuuagccuagccacacccccacgggaaacagcagugauuaaccuuuagcaauaaacgaaaguuuaacuaagcuauacuaaccccaggguuggucaauuucgugccagccacacccuggagcuagcaaaaaaaaaaaaaaaaaaaaaaaaaaaaaaaaaaaaaaaaaaaaaaaaaaaaaaaaaaaaaaaaaaaaaaaaaaaaaaaaaaaaaaaaaaaaaaaaaaaa

SEQ ID NO: 26349 - RNA, 4273 nt, Artificial Sequence
  SARS-CoV-2/Wuhan/WIV05/2019__EPI_ISL_402128 spike protein mRNA gc mod (1-1273)(D614G_I692V)
agaauaaacuaguauucuucugguccccacagacucagagagaacccgccaccauguucguguuucuggugcugcugccccugguguccagccagugugugaaccugaccaccagaacacagcugccuccagccuacaccaacagcuucaccagaggcguguacuaccccgacaagguguucagauccagcgugcugcacucuacccaggaccuguuccugccuuucuucagcaacgugaccugguuccacgccauccacguguccggcaccaauggcaccaagagauucgacaaccccgugcugcccuucaacgacgggguguacuuugccagcaccgagaaguccaacaucaucagaggcuggaucuucggcaccacacuggacagcaagacccagagccugcugaucgugaacaacgccaccaacguggucaucaaagugugcgaguuccaguucugcaacgaccccuuccugggcgucuacuaccacaagaacaacaagagcuggauggaaagcgaguuccggguguacagcagcgccaacaacugcaccuucgaguacgugucccagccuuuccugauggaccuggaaggcaagcagggcaacuucaagaaccugcgcgaguucguguucaagaacaucgacggcuacuucaaaaucuacagcaagcacaccccuaucaaccucgugcgggaucugccucagggcuucucugcucuggaaccccugguggaucugcccaucggcaucaacaucacccgguuucagacacugcuggcccugcacagaagcuaccugacaccuggcgauagcagcagcggauggacagcuggugccgccgcuuacuaugugggcuaccugcagccuagaaccuuccugcugaaguacaacgagaacggcaccaucaccgacgccguggauugugcucuggauccucugagcgagacaaagugcacccugaaguccuucaccguggaaaagggcaucuaccagaccagcaacuuccgggugcagcccaccgaauccaucgugcgguuccccaauaucaccaaucugugccccuucggcgagguguucaaugccaccagauucgccucuguguacgccuggaaccggaagcggaucagcaauugcguggccgacuacuccgugcuguacaacuccgccagcuucagcaccuucaagugcuacggcguguccccuaccaagcugaacgaccugugcuucacaaacguguacgccgacagcuucgugauccggggagaugaagugcggcagauugccccuggacagacaggcaagaucgccgacuacaacuacaagcugcccgacgacuucaccggcugugugauugccuggaacagcaacaaccuggacuccaaagucggcggcaacuacaauuaccuguaccggcuguuccggaaguccaaucugaagcccuucgagcgggacaucagcaccgaaaucuaucaggccggcagcaccccuugcaacggcguggaaggcuucaacugcuacuucccacugcaguccuacggcuuucagcccacaaauggcgugggcuaucagcccuacagagugguggugcugagcuucgaacugcugcaugcuccugccacagugugcggcccuaagaaaagcaccaaucucgugaagaacaaaugcgugaacuucaacuucaacggccugaccggcaccggcgugcugacagagagcaacaagaaguuccugccauuccagcaguuuggccgggauaucgccgauaccacagacgccguuagagauccccagacacuggaaauccuggacaucaccccaugcagcuucggcggagugucugugaucaccccuggcaccaacaccagcaaucagguggcagugcuguaccagggcgugaacuguaccgaagugcccguggccauucacgccgaucagcugacaccuacauggcggguguacuccaccggcagcaauguguuucagaccagagccggcugucugaucggagccgagcacgugaacaauagcuacgagugcgacauccccaucggcgcuggcaucugugccagcuaccagacacagacaaacagccccagacgggcuagaagcguggccagccagagcgugauugccuacacaaugucucugggcgccgagaacagcguggccuacuccaacaacucuaucgcuauccccaccaacuucaccaucagcgugaccaccgagauccugccuguguccaugaccaagaccagcguggacugcaccauguacaucugcggcgauuccaccgagugcuccaaccugcugcugcaguacggcagcuucugcacccagcugaauagagcccugacagggaucgccguggaacaggacaagaacacccaagagguguucgcccaagugaagcaaaucuacaagaccccuccuaucaaggacuucggcggcuucaauuucagccagauucugcccgauccuagcaagcccagcaagcggagcuucaucgaggaccugcuguucaacaaagugacacuggccgacgccggcuucaucaagcaguauggcgauugucugggcgacauugccgccagggaucugauuugcgcccagaaguuuaacggacugacagugcugccuccucugcugaccgaugagaugaucgcccaguacacaucugcccugcuggccggcacaaucacaagcggcuggacauuuggagcuggcgccgcucugcagauccccuuugcuaugcagauggccuaccgguucaacggcaucggagugacccagaaugugcuguacgagaaccagaagcugaucgccaaccaguucaacagcgccaucggcaagauccaggacagccugagcagcacagcaagcgcccugggaaagcugcaggacguggucaaccagaaugcccaggcacugaacacccuggucaagcagcuguccuccaacuucggcgccaucagcucugugcugaacgauauccugagcagacuggacaaggucgaggccgaggugcagaucgacagacugaucacaggcagacugcagagccuccagacauacgugacccagcagcugaucagagccgccgagauuagagccucugccaaucuggccgccaccaagaugucugagugugugcugggccagagcaagagaguggacuuuugcggcaagggcuaccaccugaugagcuucccucagucugccccucacggcgugguguuucugcacgugacauaugugcccgcucaagagaagaauuucaccaccgcuccagccaucugccacgacggcaaagcccacuuuccuagagaaggcguguucguguccaacggcacccauugguucgugacacagcggaacuucuacgagccccagaucaucaccaccgacaacaccuucgugucuggcaacugcgacguugugaucggcauugugaacaauaccguguacgacccucugcagcccgagcuggacagcuucaaagaggaacuggacaaguacuuuaagaaccacacaagccccgacguggaccugggcgauaucagcggaaucaaugccagcgucgugaacauccagaaagagaucgaccggcugaacgagguggccaagaaucugaacgagagccugaucgaccugcaagaacuggggaaguacgagcaguacaucaaguggcccugguacaucuggcugggcuuuaucgccggacugauugccaucgugauggucacaaucaugcuguguugcaugaccagcugcuguagcugccugaagggcuguuguagcuguggcagcugcugcaaguucgacgaggacgauucugagcccgugcugaagggcgugaaacugcacuacaccugaugacucgagcugguacugcaugcacgcaaugcuagcugccccuuucccguccuggguaccccgagucucccccgaccucgggucccagguaugcucccaccuccaccugccccacucaccaccucugcuaguuccagacaccucccaagcacgcagcaaugcagcucaaaacgcuuagccuagccacacccccacgggaaacagcagugauuaaccuuuagcaauaaacgaaaguuuaacuaagcuauacuaaccccaggguuggucaauuucgugccagccacacccuggagcuagcaaaaaaaaaaaaaaaaaaaaaaaaaaaaaaaaaaaaaaaaaaaaaaaaaaaaaaaaaaaaaaaaaaaaaaaaaaaaaaaaaaaaaaaaaaaaaaaaaaaa

SEQ ID NO: 26350 - RNA, 4273 nt, Artificial Sequence
  SARS-CoV-2/Wuhan/WIV05/2019__EPI_ISL_402128 spike protein mRNA gc mod (1-1273)(D614G_M1229I)
agaauaaacuaguauucuucugguccccacagacucagagagaacccgccaccauguucguguuucuggugcugcugccccugguguccagccagugugugaaccugaccaccagaacacagcugccuccagccuacaccaacagcuucaccagaggcguguacuaccccgacaagguguucagauccagcgugcugcacucuacccaggaccuguuccugccuuucuucagcaacgugaccugguuccacgccauccacguguccggcaccaauggcaccaagagauucgacaaccccgugcugcccuucaacgacgggguguacuuugccagcaccgagaaguccaacaucaucagaggcuggaucuucggcaccacacuggacagcaagacccagagccugcugaucgugaacaacgccaccaacguggucaucaaagugugcgaguuccaguucugcaacgaccccuuccugggcgucuacuaccacaagaacaacaagagcuggauggaaagcgaguuccggguguacagcagcgccaacaacugcaccuucgaguacgugucccagccuuuccugauggaccuggaaggcaagcagggcaacuucaagaaccugcgcgaguucguguucaagaacaucgacggcuacuucaaaaucuacagcaagcacaccccuaucaaccucgugcgggaucugccucagggcuucucugcucuggaaccccugguggaucugcccaucggcaucaacaucacccgguuucagacacugcuggcccugcacagaagcuaccugacaccuggcgauagcagcagcggauggacagcuggugccgccgcuuacuaugugggcuaccugcagccuagaaccuuccugcugaaguacaacgagaacggcaccaucaccgacgccguggauugugcucuggauccucugagcgagacaaagugcacccugaaguccuucaccguggaaaagggcaucuaccagaccagcaacuuccgggugcagcccaccgaauccaucgugcgguuccccaauaucaccaaucugugccccuucggcgagguguucaaugccaccagauucgccucuguguacgccuggaaccggaagcggaucagcaauugcguggccgacuacuccgugcuguacaacuccgccagcuucagcaccuucaagugcuacggcguguccccuaccaagcugaacgaccugugcuucacaaacguguacgccgacagcuucgugauccggggagaugaagugcggcagauugccccuggacagacaggcaagaucgccgacuacaacuacaagcugcccgacgacuucaccggcugugugauugccuggaacagcaacaaccuggacuccaaagucggcggcaacuacaauuaccuguaccggcuguuccggaaguccaaucugaagcccuucgagcgggacaucagcaccgaaaucuaucaggccggcagcaccccuugcaacggcguggaaggcuucaacugcuacuucccacugcaguccuacggcuuucagcccacaaauggcgugggcuaucagcccuacagagugguggugcugagcuucgaacugcugcaugcuccugccacagugugcggcccuaagaaaagcaccaaucucgugaagaacaaaugcgugaacuucaacuucaacggccugaccggcaccggcgugcugacagagagcaacaagaaguuccugccauuccagcaguuuggccgggauaucgccgauaccacagacgccguuagagauccccagacacuggaaauccuggacaucaccccaugcagcuucggcggagugucugugaucaccccuggcaccaacaccagcaaucagguggcagugcuguaccagggcgugaacuguaccgaagugcccguggccauucacgccgaucagcugacaccuacauggcggguguacuccaccggcagcaauguguuucagaccagagccggcugucugaucggagccgagcacgugaacaauagcuacgagugcgacauccccaucggcgcuggcaucugugccagcuaccagacacagacaaacagccccagacgggcuagaagcguggccagccagagcaucauugccuacacaaugucucugggcgccgagaacagcguggccuacuccaacaacucuaucgcuauccccaccaacuucaccaucagcgugaccaccgagauccugccuguguccaugaccaagaccagcguggacugcaccauguacaucugcggcgauuccaccgagugcuccaaccugcugcugcaguacggcagcuucugcacccagcugaauagagcccugacagggaucgccguggaacaggacaagaacacccaagagguguucgcccaagugaagcaaaucuacaagaccccuccuaucaaggacuucggcggcuucaauuucagccagauucugcccgauccuagcaagcccagcaagcggagcuucaucgaggaccugcuguucaacaaagugacacuggccgacgccggcuucaucaagcaguauggcgauugucugggcgacauugccgccagggaucugauuugcgcccagaaguuuaacggacugacagugcugccuccucugcugaccgaugagaugaucgcccaguacacaucugcccugcuggccggcacaaucacaagcggcuggacauuuggagcuggcgccgcucugcagauccccuuugcuaugcagauggccuaccgguucaacggcaucggagugacccagaaugugcuguacgagaaccagaagcugaucgccaaccaguucaacagcgccaucggcaagauccaggacagccugagcagcacagcaagcgcccugggaaagcugcaggacguggucaaccagaaugcccaggcacugaacacccuggucaagcagcuguccuccaacuucggcgccaucagcucugugcugaacgauauccugagcagacuggacaaggucgaggccgaggugcagaucgacagacugaucacaggcagacugcagagccuccagacauacgugacccagcagcugaucagagccgccgagauuagagccucugccaaucuggccgccaccaagaugucugagugugugcugggccagagcaagagaguggacuuuugcggcaagggcuaccaccugaugagcuucccucagucugccccucacggcgugguguuucugcacgugacauaugugcccgcucaagagaagaauuucaccaccgcuccagccaucugccacgacggcaaagcccacuuuccuagagaaggcguguucguguccaacggcacccauugguucgugacacagcggaacuucuacgagccccagaucaucaccaccgacaacaccuucgugucuggcaacugcgacguugugaucggcauugugaacaauaccguguacgacccucugcagcccgagcuggacagcuucaaagaggaacuggacaaguacuuuaagaaccacacaagccccgacguggaccugggcgauaucagcggaaucaaugccagcgucgugaacauccagaaagagaucgaccggcugaacgagguggccaagaaucugaacgagagccugaucgaccugcaagaacuggggaaguacgagcaguacaucaaguggcccugguacaucuggcugggcuuuaucgccggacugauugccaucgugaucgucacaaucaugcuguguugcaugaccagcugcuguagcugccugaagggcuguuguagcuguggcagcugcugcaaguucgacgaggacgauucugagcccgugcugaagggcgugaaacugcacuacaccugaugacucgagcugguacugcaugcacgcaaugcuagcugccccuuucccguccuggguaccccgagucucccccgaccucgggucccagguaugcucccaccuccaccugccccacucaccaccucugcuaguuccagacaccucccaagcacgcagcaaugcagcucaaaacgcuuagccuagccacacccccacgggaaacagcagugauuaaccuuuagcaauaaacgaaaguuuaacuaagcuauacuaaccccaggguuggucaauuucgugccagccacacccuggagcuagcaaaaaaaaaaaaaaaaaaaaaaaaaaaaaaaaaaaaaaaaaaaaaaaaaaaaaaaaaaaaaaaaaaaaaaaaaaaaaaaaaaaaaaaaaaaaaaaaaaaa

SEQ ID NO: 26351 - RNA, 4267 nt, Artificial Sequence
  SARS-CoV-2/Wuhan/WIV05/2019__EPI_ISL_402128 spike protein mRNA gc mod (1-1273)(H69del_V70del_A222V_Y453F_S477N_D614G_I692V)
agaauaaacuaguauucuucugguccccacagacucagagagaacccgccaccauguucguguuucuggugcugcugccccugguguccagccagugugugaaccugaccaccagaacacagcugccuccagccuacaccaacagcuucaccagaggcguguacuaccccgacaagguguucagauccagcgugcugcacucuacccaggaccuguuccugccuuucuucagcaacgugaccugguuccacgccaucuccggcaccaauggcaccaagagauucgacaaccccgugcugcccuucaacgacgggguguacuuugccagcaccgagaaguccaacaucaucagaggcuggaucuucggcaccacacuggacagcaagacccagagccugcugaucgugaacaacgccaccaacguggucaucaaagugugcgaguuccaguucugcaacgaccccuuccugggcgucuacuaccacaagaacaacaagagcuggauggaaagcgaguuccggguguacagcagcgccaacaacugcaccuucgaguacgugucccagccuuuccugauggaccuggaaggcaagcagggcaacuucaagaaccugcgcgaguucguguucaagaacaucgacggcuacuucaaaaucuacagcaagcacaccccuaucaaccucgugcgggaucugccucagggcuucucugugcuggaaccccugguggaucugcccaucggcaucaacaucacccgguuucagacacugcuggcccugcacagaagcuaccugacaccuggcgauagcagcagcggauggacagcuggugccgccgcuuacuaugugggcuaccugcagccuagaaccuuccugcugaaguacaacgagaacggcaccaucaccgacgccguggauugugcucuggauccucugagcgagacaaagugcacccugaaguccuucaccguggaaaagggcaucuaccagaccagcaacuuccgggugcagcccaccgaauccaucgugcgguuccccaauaucaccaaucugugccccuucggcgagguguucaaugccaccagauucgccucuguguacgccuggaaccggaagcggaucagcaauugcguggccgacuacuccgugcuguacaacuccgccagcuucagcaccuucaagugcuacggcguguccccuaccaagcugaacgaccugugcuucacaaacguguacgccgacagcuucgugauccggggagaugaagugcggcagauugccccuggacagacaggcaagaucgccgacuacaacuacaagcugcccgacgacuucaccggcugugugauugccuggaacagcaacaaccuggacuccaaagucggcggcaacuacaauuaccuguuccggcuguuccggaaguccaaucugaagcccuucgagcgggacaucagcaccgaaaucuaucaggccggcaacaccccuugcaacggcguggaaggcuucaacugcuacuucccacugcaguccuacggcuuucagcccacaaauggcgugggcuaucagcccuacagagugguggugcugagcuucgaacugcugcaugcuccugccacagugugcggcccuaagaaaagcaccaaucucgugaagaacaaaugcgugaacuucaacuucaacggccugaccggcaccggcgugcugacagagagcaacaagaaguuccugccauuccagcaguuuggccgggauaucgccgauaccacagacgccguuagagauccccagacacuggaaauccuggacaucaccccaugcagcuucggcggagugucugugaucaccccuggcaccaacaccagcaaucagguggcagugcuguaccagggcgugaacuguaccgaagugcccguggccauucacgccgaucagcugacaccuacauggcggguguacuccaccggcagcaauguguuucagaccagagccggcugucugaucggagccgagcacgugaacaauagcuacgagugcgacauccccaucggcgcuggcaucugugccagcuaccagacacagacaaacagccccagacgggcuagaagcguggccagccagagcgugauugccuacacaaugucucugggcgccgagaacagcguggccuacuccaacaacucuaucgcuauccccaccaacuucaccaucagcgugaccaccgagauccugccuguguccaugaccaagaccagcguggacugcaccauguacaucugcggcgauuccaccgagugcuccaaccugcugcugcaguacggcagcuucugcacccagcugaauagagcccugacagggaucgccguggaacaggacaagaacacccaagagguguucgcccaagugaagcaaaucuacaagaccccuccuaucaaggacuucggcggcuucaauuucagccagauucugcccgauccuagcaagcccagcaagcggagcuucaucgaggaccugcuguucaacaaagugacacuggccgacgccggcuucaucaagcaguauggcgauugucugggcgacauugccgccagggaucugauuugcgcccagaaguuuaacggacugacagugcugccuccucugcugaccgaugagaugaucgcccaguacacaucugcccugcuggccggcacaaucacaagcggcuggacauuuggagcuggcgccgcucugcagauccccuuugcuaugcagauggccuaccgguucaacggcaucggagugacccagaaugugcuguacgagaaccagaagcugaucgccaaccaguucaacagcgccaucggcaagauccaggacagccugagcagcacagcaagcgcccugggaaagcugcaggacguggucaaccagaaugcccaggcacugaacacccuggucaagcagcuguccuccaacuucggcgccaucagcucugugcugaacgauauccugagcagacuggacaaggucgaggccgaggugcagaucgacagacugaucacaggcagacugcagagccuccagacauacgugacccagcagcugaucagagccgccgagauuagagccucugccaaucuggccgccaccaagaugucugagugugugcugggccagagcaagagaguggacuuuugcggcaagggcuaccaccugaugagcuucccucagucugccccucacggcgugguguuucugcacgugacauaugugcccgcucaagagaagaauuucaccaccgcuccagccaucugccacgacggcaaagcccacuuuccuagagaaggcguguucguguccaacggcacccauugguucgugacacagcggaacuucuacgagccccagaucaucaccaccgacaacaccuucgugucuggcaacugcgacguugugaucggcauugugaacaauaccguguacgacccucugcagcccgagcuggacagcuucaaagaggaacuggacaaguacuuuaagaaccacacaagccccgacguggaccugggcgauaucagcggaaucaaugccagcgucgugaacauccagaaagagaucgaccggcugaacgagguggccaagaaucugaacgagagccugaucgaccugcaagaacuggggaaguacgagcaguacaucaaguggcccugguacaucuggcugggcuuuaucgccggacugauugccaucgugauggucacaaucaugcuguguugcaugaccagcugcuguagcugccugaagggcuguuguagcuguggcagcugcugcaaguucgacgaggacgauucugagcccgugcugaagggcgugaaacugcacuacaccugaugacucgagcugguacugcaugcacgcaaugcuagcugccccuuucccguccuggguaccccgagucucccccgaccucgggucccagguaugcucccaccuccaccugccccacucaccaccucugcuaguuccagacaccucccaagcacgcagcaaugcagcucaaaacgcuuagccuagccacacccccacgggaaacagcagugauuaaccuuuagcaauaaacgaaaguuuaacuaagcuauacuaaccccaggguuggucaauuucgugccagccacacccuggagcuagcaaaaaaaaaaaaaaaaaaaaaaaaaaaaaaaaaaaaaaaaaaaaaaaaaaaaaaaaaaaaaaaaaaaaaaaaaaaaaaaaaaaaaaaaaaaaaaaaaaaa

SEQ ID NO: 26352 - RNA, 4267 nt, Artificial Sequence
  SARS-CoV-2/Wuhan/WIV05/2019__EPI_ISL_402128 spike protein mRNA gc mod (1-1273)(H69del_V70del_Y453F_D614G_I692V_M1229I)
agaauaaacuaguauucuucugguccccacagacucagagagaacccgccaccauguucguguuucuggugcugcugccccugguguccagccagugugugaaccugaccaccagaacacagcugccuccagccuacaccaacagcuucaccagaggcguguacuaccccgacaagguguucagauccagcgugcugcacucuacccaggaccuguuccugccuuucuucagcaacgugaccugguuccacgccaucuccggcaccaauggcaccaagagauucgacaaccccgugcugcccuucaacgacgggguguacuuugccagcaccgagaaguccaacaucaucagaggcuggaucuucggcaccacacuggacagcaagacccagagccugcugaucgugaacaacgccaccaacguggucaucaaagugugcgaguuccaguucugcaacgaccccuuccugggcgucuacuaccacaagaacaacaagagcuggauggaaagcgaguuccggguguacagcagcgccaacaacugcaccuucgaguacgugucccagccuuuccugauggaccuggaaggcaagcagggcaacuucaagaaccugcgcgaguucguguucaagaacaucgacggcuacuucaaaaucuacagcaagcacaccccuaucaaccucgugcgggaucugccucagggcuucucugcucuggaaccccugguggaucugcccaucggcaucaacaucacccgguuucagacacugcuggcccugcacagaagcuaccugacaccuggcgauagcagcagcggauggacagcuggugccgccgcuuacuaugugggcuaccugcagccuagaaccuuccugcugaaguacaacgagaacggcaccaucaccgacgccguggauugugcucuggauccucugagcgagacaaagugcacccugaaguccuucaccguggaaaagggcaucuaccagaccagcaacuuccgggugcagcccaccgaauccaucgugcgguuccccaauaucaccaaucugugccccuucggcgagguguucaaugccaccagauucgccucuguguacgccuggaaccggaagcggaucagcaauugcguggccgacuacuccgugcuguacaacuccgccagcuucagcaccuucaagugcuacggcguguccccuaccaagcugaacgaccugugcuucacaaacguguacgccgacagcuucgugauccggggagaugaagugcggcagauugccccuggacagacaggcaagaucgccgacuacaacuacaagcugcccgacgacuucaccggcugugugauugccuggaacagcaacaaccuggacuccaaagucggcggcaacuacaauuaccuguuccggcuguuccggaaguccaaucugaagcccuucgagcgggacaucagcaccgaaaucuaucaggccggcagcaccccuugcaacggcguggaaggcuucaacugcuacuucccacugcaguccuacggcuuucagcccacaaauggcgugggcuaucagcccuacagagugguggugcugagcuucgaacugcugcaugcuccugccacagugugcggcccuaagaaaagcaccaaucucgugaagaacaaaugcgugaacuucaacuucaacggccugaccggcaccggcgugcugacagagagcaacaagaaguuccugccauuccagcaguuuggccgggauaucgccgauaccacagacgccguuagagauccccagacacuggaaauccuggacaucaccccaugcagcuucggcggagugucugugaucaccccuggcaccaacaccagcaaucagguggcagugcuguaccagggcgugaacuguaccgaagugcccguggccauucacgccgaucagcugacaccuacauggcggguguacuccaccggcagcaauguguuucagaccagagccggcugucugaucggagccgagcacgugaacaauagcuacgagugcgacauccccaucggcgcuggcaucugugccagcuaccagacacagacaaacagccccagacgggcuagaagcguggccagccagagcgugauugccuacacaaugucucugggcgccgagaacagcguggccuacuccaacaacucuaucgcuauccccaccaacuucaccaucagcgugaccaccgagauccugccuguguccaugaccaagaccagcguggacugcaccauguacaucugcggcgauuccaccgagugcuccaaccugcugcugcaguacggcagcuucugcacccagcugaauagagcccugacagggaucgccguggaacaggacaagaacacccaagagguguucgcccaagugaagcaaaucuacaagaccccuccuaucaaggacuucggcggcuucaauuucagccagauucugcccgauccuagcaagcccagcaagcggagcuucaucgaggaccugcuguucaacaaagugacacuggccgacgccggcuucaucaagcaguauggcgauugucugggcgacauugccgccagggaucugauuugcgcccagaaguuuaacggacugacagugcugccuccucugcugaccgaugagaugaucgcccaguacacaucugcccugcuggccggcacaaucacaagcggcuggacauuuggagcuggcgccgcucugcagauccccuuugcuaugcagauggccuaccgguucaacggcaucggagugacccagaaugugcuguacgagaaccagaagcugaucgccaaccaguucaacagcgccaucggcaagauccaggacagccugagcagcacagcaagcgcccugggaaagcugcaggacguggucaaccagaaugcccaggcacugaacacccuggucaagcagcuguccuccaacuucggcgccaucagcucugugcugaacgauauccugagcagacuggacaaggucgaggccgaggugcagaucgacagacugaucacaggcagacugcagagccuccagacauacgugacccagcagcugaucagagccgccgagauuagagccucugccaaucuggccgccaccaagaugucugagugugugcugggccagagcaagagaguggacuuuugcggcaagggcuaccaccugaugagcuucccucagucugccccucacggcgugguguuucugcacgugacauaugugcccgcucaagagaagaauuucaccaccgcuccagccaucugccacgacggcaaagcccacuuuccuagagaaggcguguucguguccaacggcacccauugguucgugacacagcggaacuucuacgagccccagaucaucaccaccgacaacaccuucgugucuggcaacugcgacguugugaucggcauugugaacaauaccguguacgacccucugcagcccgagcuggacagcuucaaagaggaacuggacaaguacuuuaagaaccacacaagccccgacguggaccugggcgauaucagcggaaucaaugccagcgucgugaacauccagaaagagaucgaccggcugaacgagguggccaagaaucugaacgagagccugaucgaccugcaagaacuggggaaguacgagcaguacaucaaguggcccugguacaucuggcugggcuuuaucgccggacugauugccaucgugaucgucacaaucaugcuguguugcaugaccagcugcuguagcugccugaagggcuguuguagcuguggcagcugcugcaaguucgacgaggacgauucugagcccgugcugaagggcgugaaacugcacuacaccugaugacucgagcugguacugcaugcacgcaaugcuagcugccccuuucccguccuggguaccccgagucucccccgaccucgggucccagguaugcucccaccuccaccugccccacucaccaccucugcuaguuccagacaccucccaagcacgcagcaaugcagcucaaaacgcuuagccuagccacacccccacgggaaacagcagugauuaaccuuuagcaauaaacgaaaguuuaacuaagcuauacuaaccccaggguuggucaauuucgugccagccacacccuggagcuagcaaaaaaaaaaaaaaaaaaaaaaaaaaaaaaaaaaaaaaaaaaaaaaaaaaaaaaaaaaaaaaaaaaaaaaaaaaaaaaaaaaaaaaaaaaaaaaaaaaaa

SEQ ID NO: 26353 - RNA, 4264 nt, Artificial Sequence
  SARS-CoV-2/Wuhan/WIV05/2019__EPI_ISL_402128 spike protein mRNA gc mod (1-1273)(H69del_V70del_Y144del_N501Y_A570D_D614G_P681H_T716I_S982 A_D1118H)
agaauaaacuaguauucuucugguccccacagacucagagagaacccgccaccauguucguguuucuggugcugcugccccugguguccagccagugugugaaccugaccaccagaacacagcugccuccagccuacaccaacagcuucaccagaggcguguacuaccccgacaagguguucagauccagcgugcugcacucuacccaggaccuguuccugccuuucuucagcaacgugaccugguuccacgccaucuccggcaccaauggcaccaagagauucgacaaccccgugcugcccuucaacgacgggguguacuuugccagcaccgagaaguccaacaucaucagaggcuggaucuucggcaccacacuggacagcaagacccagagccugcugaucgugaacaacgccaccaacguggucaucaaagugugcgaguuccaguucugcaacgaccccuuccugggcgucuaccacaagaacaacaagagcuggauggaaagcgaguuccggguguacagcagcgccaacaacugcaccuucgaguacgugucccagccuuuccugauggaccuggaaggcaagcagggcaacuucaagaaccugcgcgaguucguguucaagaacaucgacggcuacuucaaaaucuacagcaagcacaccccuaucaaccucgugcgggaucugccucagggcuucucugcucuggaaccccugguggaucugcccaucggcaucaacaucacccgguuucagacacugcuggcccugcacagaagcuaccugacaccuggcgauagcagcagcggauggacagcuggugccgccgcuuacuaugugggcuaccugcagccuagaaccuuccugcugaaguacaacgagaacggcaccaucaccgacgccguggauugugcucuggauccucugagcgagacaaagugcacccugaaguccuucaccguggaaaagggcaucuaccagaccagcaacuuccgggugcagcccaccgaauccaucgugcgguuccccaauaucaccaaucugugccccuucggcgagguguucaaugccaccagauucgccucuguguacgccuggaaccggaagcggaucagcaauugcguggccgacuacuccgugcuguacaacuccgccagcuucagcaccuucaagugcuacggcguguccccuaccaagcugaacgaccugugcuucacaaacguguacgccgacagcuucgugauccggggagaugaagugcggcagauugccccuggacagacaggcaagaucgccgacuacaacuacaagcugcccgacgacuucaccggcugugugauugccuggaacagcaacaaccuggacuccaaagucggcggcaacuacaauuaccuguaccggcuguuccggaaguccaaucugaagcccuucgagcgggacaucagcaccgaaaucuaucaggccggcagcaccccuugcaacggcguggaaggcuucaacugcuacuucccacugcaguccuacggcuuucagcccacauacggcgugggcuaucagcccuacagagugguggugcugagcuucgaacugcugcaugcuccugccacagugugcggcccuaagaaaagcaccaaucucgugaagaacaaaugcgugaacuucaacuucaacggccugaccggcaccggcgugcugacagagagcaacaagaaguuccugccauuccagcaguuuggccgggauaucgacgauaccacagacgccguuagagauccccagacacuggaaauccuggacaucaccccaugcagcuucggcggagugucugugaucaccccuggcaccaacaccagcaaucagguggcagugcuguaccagggcgugaacuguaccgaagugcccguggccauucacgccgaucagcugacaccuacauggcggguguacuccaccggcagcaauguguuucagaccagagccggcugucugaucggagccgagcacgugaacaauagcuacgagugcgacauccccaucggcgcuggcaucugugccagcuaccagacacagacaaacagccacagacgggcuagaagcguggccagccagagcaucauugccuacacaaugucucugggcgccgagaacagcguggccuacuccaacaacucuaucgcuauccccaucaacuucaccaucagcgugaccaccgagauccugccuguguccaugaccaagaccagcguggacugcaccauguacaucugcggcgauuccaccgagugcuccaaccugcugcugcaguacggcagcuucugcacccagcugaauagagcccugacagggaucgccguggaacaggacaagaacacccaagagguguucgcccaagugaagcaaaucuacaagaccccuccuaucaaggacuucggcggcuucaauuucagccagauucugcccgauccuagcaagcccagcaagcggagcuucaucgaggaccugcuguucaacaaagugacacuggccgacgccggcuucaucaagcaguauggcgauugucugggcgacauugccgccagggaucugauuugcgcccagaaguuuaacggacugacagugcugccuccucugcugaccgaugagaugaucgcccaguacacaucugcccugcuggccggcacaaucacaagcggcuggacauuuggagcuggcgccgcucugcagauccccuuugcuaugcagauggccuaccgguucaacggcaucggagugacccagaaugugcuguacgagaaccagaagcugaucgccaaccaguucaacagcgccaucggcaagauccaggacagccugagcagcacagcaagcgcccugggaaagcugcaggacguggucaaccagaaugcccaggcacugaacacccuggucaagcagcuguccuccaacuucggcgccaucagcucugugcugaacgauauccuggccagacuggacaaggucgaggccgaggugcagaucgacagacugaucacaggcagacugcagagccuccagacauacgugacccagcagcugaucagagccgccgagauuagagccucugccaaucuggccgccaccaagaugucugagugugugcugggccagagcaagagaguggacuuuugcggcaagggcuaccaccugaugagcuucccucagucugccccucacggcgugguguuucugcacgugacauaugugcccgcucaagagaagaauuucaccaccgcuccagccaucugccacgacggcaaagcccacuuuccuagagaaggcguguucguguccaacggcacccauugguucgugacacagcggaacuucuacgagccccagaucaucaccacccacaacaccuucgugucuggcaacugcgacguugugaucggcauugugaacaauaccguguacgacccucugcagcccgagcuggacagcuucaaagaggaacuggacaaguacuuuaagaaccacacaagccccgacguggaccugggcgauaucagcggaaucaaugccagcgucgugaacauccagaaagagaucgaccggcugaacgagguggccaagaaucugaacgagagccugaucgaccugcaagaacuggggaaguacgagcaguacaucaaguggcccugguacaucuggcugggcuuuaucgccggacugauugccaucgugauggucacaaucaugcuguguugcaugaccagcugcuguagcugccugaagggcuguuguagcuguggcagcugcugcaaguucgacgaggacgauucugagcccgugcugaagggcgugaaacugcacuacaccugaugacucgagcugguacugcaugcacgcaaugcuagcugccccuuucccguccuggguaccccgagucucccccgaccucgggucccagguaugcucccaccuccaccugccccacucaccaccucugcuaguuccagacaccucccaagcacgcagcaaugcagcucaaaacgcuuagccuagccacacccccacgggaaacagcagugauuaaccuuuagcaauaaacgaaaguuuaacuaagcuauacuaaccccaggguuggucaauuucgugccagccacacccuggagcuagcaaaaaaaaaaaaaaaaaaaaaaaaaaaaaaaaaaaaaaaaaaaaaaaaaaaaaaaaaaaaaaaaaaaaaaaaaaaaaaaaaaaaaaaaaaaaaaaaaaaa

SEQ ID NO: 26354 - RNA, 4273 nt, Artificial Sequence
  SARS-CoV-2/Wuhan/WIV05/2019__EPI_ISL_402128 spike protein mRNA gc mod (1-1273)(K417N_E484K_N501Y_D614G)
agaauaaacuaguauucuucugguccccacagacucagagagaacccgccaccauguucguguuucuggugcugcugccccugguguccagccagugugugaaccugaccaccagaacacagcugccuccagccuacaccaacagcuucaccagaggcguguacuaccccgacaagguguucagauccagcgugcugcacucuacccaggaccuguuccugccuuucuucagcaacgugaccugguuccacgccauccacguguccggcaccaauggcaccaagagauucgacaaccccgugcugcccuucaacgacgggguguacuuugccagcaccgagaaguccaacaucaucagaggcuggaucuucggcaccacacuggacagcaagacccagagccugcugaucgugaacaacgccaccaacguggucaucaaagugugcgaguuccaguucugcaacgaccccuuccugggcgucuacuaccacaagaacaacaagagcuggauggaaagcgaguuccggguguacagcagcgccaacaacugcaccuucgaguacgugucccagccuuuccugauggaccuggaaggcaagcagggcaacuucaagaaccugcgcgaguucguguucaagaacaucgacggcuacuucaaaaucuacagcaagcacaccccuaucaaccucgugcgggaucugccucagggcuucucugcucuggaaccccugguggaucugcccaucggcaucaacaucacccgguuucagacacugcuggcccugcacagaagcuaccugacaccuggcgauagcagcagcggauggacagcuggugccgccgcuuacuaugugggcuaccugcagccuagaaccuuccugcugaaguacaacgagaacggcaccaucaccgacgccguggauugugcucuggauccucugagcgagacaaagugcacccugaaguccuucaccguggaaaagggcaucuaccagaccagcaacuuccgggugcagcccaccgaauccaucgugcgguuccccaauaucaccaaucugugccccuucggcgagguguucaaugccaccagauucgccucuguguacgccuggaaccggaagcggaucagcaauugcguggccgacuacuccgugcuguacaacuccgccagcuucagcaccuucaagugcuacggcguguccccuaccaagcugaacgaccugugcuucacaaacguguacgccgacagcuucgugauccggggagaugaagugcggcagauugccccuggacagacaggcaacaucgccgacuacaacuacaagcugcccgacgacuucaccggcugugugauugccuggaacagcaacaaccuggacuccaaagucggcggcaacuacaauuaccuguaccggcuguuccggaaguccaaucugaagcccuucgagcgggacaucagcaccgaaaucuaucaggccggcagcaccccuugcaacggcgugaagggcuucaacugcuacuucccacugcaguccuacggcuuucagcccacauacggcgugggcuaucagcccuacagagugguggugcugagcuucgaacugcugcaugcuccugccacagugugcggcccuaagaaaagcaccaaucucgugaagaacaaaugcgugaacuucaacuucaacggccugaccggcaccggcgugcugacagagagcaacaagaaguuccugccauuccagcaguuuggccgggauaucgccgauaccacagacgccguuagagauccccagacacuggaaauccuggacaucaccccaugcagcuucggcggagugucugugaucaccccuggcaccaacaccagcaaucagguggcagugcuguaccagggcgugaacuguaccgaagugcccguggccauucacgccgaucagcugacaccuacauggcggguguacuccaccggcagcaauguguuucagaccagagccggcugucugaucggagccgagcacgugaacaauagcuacgagugcgacauccccaucggcgcuggcaucugugccagcuaccagacacagacaaacagccccagacgggcuagaagcguggccagccagagcaucauugccuacacaaugucucugggcgccgagaacagcguggccuacuccaacaacucuaucgcuauccccaccaacuucaccaucagcgugaccaccgagauccugccuguguccaugaccaagaccagcguggacugcaccauguacaucugcggcgauuccaccgagugcuccaaccugcugcugcaguacggcagcuucugcacccagcugaauagagcccugacagggaucgccguggaacaggacaagaacacccaagagguguucgcccaagugaagcaaaucuacaagaccccuccuaucaaggacuucggcggcuucaauuucagccagauucugcccgauccuagcaagcccagcaagcggagcuucaucgaggaccugcuguucaacaaagugacacuggccgacgccggcuucaucaagcaguauggcgauugucugggcgacauugccgccagggaucugauuugcgcccagaaguuuaacggacugacagugcugccuccucugcugaccgaugagaugaucgcccaguacacaucugcccugcuggccggcacaaucacaagcggcuggacauuuggagcuggcgccgcucugcagauccccuuugcuaugcagauggccuaccgguucaacggcaucggagugacccagaaugugcuguacgagaaccagaagcugaucgccaaccaguucaacagcgccaucggcaagauccaggacagccugagcagcacagcaagcgcccugggaaagcugcaggacguggucaaccagaaugcccaggcacugaacacccuggucaagcagcuguccuccaacuucggcgccaucagcucugugcugaacgauauccugagcagacuggacaaggucgaggccgaggugcagaucgacagacugaucacaggcagacugcagagccuccagacauacgugacccagcagcugaucagagccgccgagauuagagccucugccaaucuggccgccaccaagaugucugagugugugcugggccagagcaagagaguggacuuuugcggcaagggcuaccaccugaugagcuucccucagucugccccucacggcgugguguuucugcacgugacauaugugcccgcucaagagaagaauuucaccaccgcuccagccaucugccacgacggcaaagcccacuuuccuagagaaggcguguucguguccaacggcacccauugguucgugacacagcggaacuucuacgagccccagaucaucaccaccgacaacaccuucgugucuggcaacugcgacguugugaucggcauugugaacaauaccguguacgacccucugcagcccgagcuggacagcuucaaagaggaacuggacaaguacuuuaagaaccacacaagccccgacguggaccugggcgauaucagcggaaucaaugccagcgucgugaacauccagaaagagaucgaccggcugaacgagguggccaagaaucugaacgagagccugaucgaccugcaagaacuggggaaguacgagcaguacaucaaguggcccugguacaucuggcugggcuuuaucgccggacugauugccaucgugauggucacaaucaugcuguguugcaugaccagcugcuguagcugccugaagggcuguuguagcuguggcagcugcugcaaguucgacgaggacgauucugagcccgugcugaagggcgugaaacugcacuacaccugaugacucgagcugguacugcaugcacgcaaugcuagcugccccuuucccguccuggguaccccgagucucccccgaccucgggucccagguaugcucccaccuccaccugccccacucaccaccucugcuaguuccagacaccucccaagcacgcagcaaugcagcucaaaacgcuuagccuagccacacccccacgggaaacagcagugauuaaccuuuagcaauaaacgaaaguuuaacuaagcuauacuaaccccaggguuggucaauuucgugccagccacacccuggagcuagcaaaaaaaaaaaaaaaaaaaaaaaaaaaaaaaaaaaaaaaaaaaaaaaaaaaaaaaaaaaaaaaaaaaaaaaaaaaaaaaaaaaaaaaaaaaaaaaaaaaa

SEQ ID NO: 26355 - RNA, 4264 nt, Artificial Sequence
  SARS-CoV-2/Wuhan/WIV05/2019__EPI_ISL_402128 spike protein mRNA gc mod (1-1273)(L18F_D80A_D215G_L242del_A243del_L244del_R246I_K417N_E484 K_N501Y_D614G_A701V)
agaauaaacuaguauucuucugguccccacagacucagagagaacccgccaccauguucguguuucuggugcugcugccccugguguccagccagugugugaacuucaccaccagaacacagcugccuccagccuacaccaacagcuucaccagaggcguguacuaccccgacaagguguucagauccagcgugcugcacucuacccaggaccuguuccugccuuucuucagcaacgugaccugguuccacgccauccacguguccggcaccaauggcaccaagagauucgccaaccccgugcugcccuucaacgacgggguguacuuugccagcaccgagaaguccaacaucaucagaggcuggaucuucggcaccacacuggacagcaagacccagagccugcugaucgugaacaacgccaccaacguggucaucaaagugugcgaguuccaguucugcaacgaccccuuccugggcgucuacuaccacaagaacaacaagagcuggauggaaagcgaguuccggguguacagcagcgccaacaacugcaccuucgaguacgugucccagccuuuccugauggaccuggaaggcaagcagggcaacuucaagaaccugcgcgaguucguguucaagaacaucgacggcuacuucaaaaucuacagcaagcacaccccuaucaaccucgugcggggccugccucagggcuucucugcucuggaaccccugguggaucugcccaucggcaucaacaucacccgguuucagacacugcacaucagcuaccugacaccuggcgauagcagcagcggauggacagcuggugccgccgcuuacuaugugggcuaccugcagccuagaaccuuccugcugaaguacaacgagaacggcaccaucaccgacgccguggauugugcucuggauccucugagcgagacaaagugcacccugaaguccuucaccguggaaaagggcaucuaccagaccagcaacuuccgggugcagcccaccgaauccaucgugcgguuccccaauaucaccaaucugugccccuucggcgagguguucaaugccaccagauucgccucuguguacgccuggaaccggaagcggaucagcaauugcguggccgacuacuccgugcuguacaacuccgccagcuucagcaccuucaagugcuacggcguguccccuaccaagcugaacgaccugugcuucacaaacguguacgccgacagcuucgugauccggggagaugaagugcggcagauugccccuggacagacaggcaacaucgccgacuacaacuacaagcugcccgacgacuucaccggcugugugauugccuggaacagcaacaaccuggacuccaaagucggcggcaacuacaauuaccuguaccggcuguuccggaaguccaaucugaagcccuucgagcgggacaucagcaccgaaaucuaucaggccggcagcaccccuugcaacggcgugaagggcuucaacugcuacuucccacugcaguccuacggcuuucagcccacauacggcgugggcuaucagcccuacagagugguggugcugagcuucgaacugcugcaugcuccugccacagugugcggcccuaagaaaagcaccaaucucgugaagaacaaaugcgugaacuucaacuucaacggccugaccggcaccggcgugcugacagagagcaacaagaaguuccugccauuccagcaguuuggccgggauaucgccgauaccacagacgccguuagagauccccagacacuggaaauccuggacaucaccccaugcagcuucggcggagugucugugaucaccccuggcaccaacaccagcaaucagguggcagugcuguaccagggcgugaacuguaccgaagugcccguggccauucacgccgaucagcugacaccuacauggcggguguacuccaccggcagcaauguguuucagaccagagccggcugucugaucggagccgagcacgugaacaauagcuacgagugcgacauccccaucggcgcuggcaucugugccagcuaccagacacagacaaacagccccagacgggcuagaagcguggccagccagagcaucauugccuacacaaugucucugggcguggagaacagcguggccuacuccaacaacucuaucgcuauccccaccaacuucaccaucagcgugaccaccgagauccugccuguguccaugaccaagaccagcguggacugcaccauguacaucugcggcgauuccaccgagugcuccaaccugcugcugcaguacggcagcuucugcacccagcugaauagagcccugacagggaucgccguggaacaggacaagaacacccaagagguguucgcccaagugaagcaaaucuacaagaccccuccuaucaaggacuucggcggcuucaauuucagccagauucugcccgauccuagcaagcccagcaagcggagcuucaucgaggaccugcuguucaacaaagugacacuggccgacgccggcuucaucaagcaguauggcgauugucugggcgacauugccgccagggaucugauuugcgcccagaaguuuaacggacugacagugcugccuccucugcugaccgaugagaugaucgcccaguacacaucugcccugcuggccggcacaaucacaagcggcuggacauuuggagcuggcgccgcucugcagauccccuuugcuaugcagauggccuaccgguucaacggcaucggagugacccagaaugugcuguacgagaaccagaagcugaucgccaaccaguucaacagcgccaucggcaagauccaggacagccugagcagcacagcaagcgcccugggaaagcugcaggacguggucaaccagaaugcccaggcacugaacacccuggucaagcagcuguccuccaacuucggcgccaucagcucugugcugaacgauauccugagcagacuggacaaggucgaggccgaggugcagaucgacagacugaucacaggcagacugcagagccuccagacauacgugacccagcagcugaucagagccgccgagauuagagccucugccaaucuggccgccaccaagaugucugagugugugcugggccagagcaagagaguggacuuuugcggcaagggcuaccaccugaugagcuucccucagucugccccucacggcgugguguuucugcacgugacauaugugcccgcucaagagaagaauuucaccaccgcuccagccaucugccacgacggcaaagcccacuuuccuagagaaggcguguucguguccaacggcacccauugguucgugacacagcggaacuucuacgagccccagaucaucaccaccgacaacaccuucgugucuggcaacugcgacguugugaucggcauugugaacaauaccguguacgacccucugcagcccgagcuggacagcuucaaagaggaacuggacaaguacuuuaagaaccacacaagccccgacguggaccugggcgauaucagcggaaucaaugccagcgucgugaacauccagaaagagaucgaccggcugaacgagguggccaagaaucugaacgagagccugaucgaccugcaagaacuggggaaguacgagcaguacaucaaguggcccugguacaucuggcugggcuuuaucgccggacugauugccaucgugauggucacaaucaugcuguguugcaugaccagcugcuguagcugccugaagggcuguuguagcuguggcagcugcugcaaguucgacgaggacgauucugagcccgugcugaagggcgugaaacugcacuacaccugaugacucgagcugguacugcaugcacgcaaugcuagcugccccuuucccguccuggguaccccgagucucccccgaccucgggucccagguaugcucccaccuccaccugccccacucaccaccucugcuaguuccagacaccucccaagcacgcagcaaugcagcucaaaacgcuuagccuagccacacccccacgggaaacagcagugauuaaccuuuagcaauaaacgaaaguuuaacuaagcuauacuaaccccaggguuggucaauuucgugccagccacacccuggagcuagcaaaaaaaaaaaaaaaaaaaaaaaaaaaaaaaaaaaaaaaaaaaaaaaaaaaaaaaaaaaaaaaaaaaaaaaaaaaaaaaaaaaaaaaaaaaaaaaaaaaa

SEQ ID NO: 26356 - RNA, 4273 nt, Artificial Sequence
  SARS-CoV-2/Wuhan/WIV05/2019__EPI_ISL_402128 spike protein mRNA gc mod (1-1273)(E484K_D614G)
agaauaaacuaguauucuucugguccccacagacucagagagaacccgccaccauguucguguuucuggugcugcugccccugguguccagccagugugugaaccugaccaccagaacacagcugccuccagccuacaccaacagcuucaccagaggcguguacuaccccgacaagguguucagauccagcgugcugcacucuacccaggaccuguuccugccuuucuucagcaacgugaccugguuccacgccauccacguguccggcaccaauggcaccaagagauucgacaaccccgugcugcccuucaacgacgggguguacuuugccagcaccgagaaguccaacaucaucagaggcuggaucuucggcaccacacuggacagcaagacccagagccugcugaucgugaacaacgccaccaacguggucaucaaagugugcgaguuccaguucugcaacgaccccuuccugggcgucuacuaccacaagaacaacaagagcuggauggaaagcgaguuccggguguacagcagcgccaacaacugcaccuucgaguacgugucccagccuuuccugauggaccuggaaggcaagcagggcaacuucaagaaccugcgcgaguucguguucaagaacaucgacggcuacuucaaaaucuacagcaagcacaccccuaucaaccucgugcgggaucugccucagggcuucucugcucuggaaccccugguggaucugcccaucggcaucaacaucacccgguuucagacacugcuggcccugcacagaagcuaccugacaccuggcgauagcagcagcggauggacagcuggugccgccgcuuacuaugugggcuaccugcagccuagaaccuuccugcugaaguacaacgagaacggcaccaucaccgacgccguggauugugcucuggauccucugagcgagacaaagugcacccugaaguccuucaccguggaaaagggcaucuaccagaccagcaacuuccgggugcagcccaccgaauccaucgugcgguuccccaauaucaccaaucugugccccuucggcgagguguucaaugccaccagauucgccucuguguacgccuggaaccggaagcggaucagcaauugcguggccgacuacuccgugcuguacaacuccgccagcuucagcaccuucaagugcuacggcguguccccuaccaagcugaacgaccugugcuucacaaacguguacgccgacagcuucgugauccggggagaugaagugcggcagauugccccuggacagacaggcaagaucgccgacuacaacuacaagcugcccgacgacuucaccggcugugugauugccuggaacagcaacaaccuggacuccaaagucggcggcaacuacaauuaccuguaccggcuguuccggaaguccaaucugaagcccuucgagcgggacaucagcaccgaaaucuaucaggccggcagcaccccuugcaacggcgugaagggcuucaacugcuacuucccacugcaguccuacggcuuucagcccacaaauggcgugggcuaucagcccuacagagugguggugcugagcuucgaacugcugcaugcuccugccacagugugcggcccuaagaaaagcaccaaucucgugaagaacaaaugcgugaacuucaacuucaacggccugaccggcaccggcgugcugacagagagcaacaagaaguuccugccauuccagcaguuuggccgggauaucgccgauaccacagacgccguuagagauccccagacacuggaaauccuggacaucaccccaugcagcuucggcggagugucugugaucaccccuggcaccaacaccagcaaucagguggcagugcuguaccagggcgugaacuguaccgaagugcccguggccauucacgccgaucagcugacaccuacauggcggguguacuccaccggcagcaauguguuucagaccagagccggcugucugaucggagccgagcacgugaacaauagcuacgagugcgacauccccaucggcgcuggcaucugugccagcuaccagacacagacaaacagccccagacgggcuagaagcguggccagccagagcaucauugccuacacaaugucucugggcgccgagaacagcguggccuacuccaacaacucuaucgcuauccccaccaacuucaccaucagcgugaccaccgagauccugccuguguccaugaccaagaccagcguggacugcaccauguacaucugcggcgauuccaccgagugcuccaaccugcugcugcaguacggcagcuucugcacccagcugaauagagcccugacagggaucgccguggaacaggacaagaacacccaagagguguucgcccaagugaagcaaaucuacaagaccccuccuaucaaggacuucggcggcuucaauuucagccagauucugcccgauccuagcaagcccagcaagcggagcuucaucgaggaccugcuguucaacaaagugacacuggccgacgccggcuucaucaagcaguauggcgauugucugggcgacauugccgccagggaucugauuugcgcccagaaguuuaacggacugacagugcugccuccucugcugaccgaugagaugaucgcccaguacacaucugcccugcuggccggcacaaucacaagcggcuggacauuuggagcuggcgccgcucugcagauccccuuugcuaugcagauggccuaccgguucaacggcaucggagugacccagaaugugcuguacgagaaccagaagcugaucgccaaccaguucaacagcgccaucggcaagauccaggacagccugagcagcacagcaagcgcccugggaaagcugcaggacguggucaaccagaaugcccaggcacugaacacccuggucaagcagcuguccuccaacuucggcgccaucagcucugugcugaacgauauccugagcagacuggacaaggucgaggccgaggugcagaucgacagacugaucacaggcagacugcagagccuccagacauacgugacccagcagcugaucagagccgccgagauuagagccucugccaaucuggccgccaccaagaugucugagugugugcugggccagagcaagagaguggacuuuugcggcaagggcuaccaccugaugagcuucccucagucugccccucacggcgugguguuucugcacgugacauaugugcccgcucaagagaagaauuucaccaccgcuccagccaucugccacgacggcaaagcccacuuuccuagagaaggcguguucguguccaacggcacccauugguucgugacacagcggaacuucuacgagccccagaucaucaccaccgacaacaccuucgugucuggcaacugcgacguugugaucggcauugugaacaauaccguguacgacccucugcagcccgagcuggacagcuucaaagaggaacuggacaaguacuuuaagaaccacacaagccccgacguggaccugggcgauaucagcggaaucaaugccagcgucgugaacauccagaaagagaucgaccggcugaacgagguggccaagaaucugaacgagagccugaucgaccugcaagaacuggggaaguacgagcaguacaucaaguggcccugguacaucuggcugggcuuuaucgccggacugauugccaucgugauggucacaaucaugcuguguugcaugaccagcugcuguagcugccugaagggcuguuguagcuguggcagcugcugcaaguucgacgaggacgauucugagcccgugcugaagggcgugaaacugcacuacaccugaugacucgagcugguacugcaugcacgcaaugcuagcugccccuuucccguccuggguaccccgagucucccccgaccucgggucccagguaugcucccaccuccaccugccccacucaccaccucugcuaguuccagacaccucccaagcacgcagcaaugcagcucaaaacgcuuagccuagccacacccccacgggaaacagcagugauuaaccuuuagcaauaaacgaaaguuuaacuaagcuauacuaaccccaggguuggucaauuucgugccagccacacccuggagcuagcaaaaaaaaaaaaaaaaaaaaaaaaaaaaaaaaaaaaaaaaaaaaaaaaaaaaaaaaaaaaaaaaaaaaaaaaaaaaaaaaaaaaaaaaaaaaaaaaaaaa

SEQ ID NO: 26357 - RNA, 4273 nt, Artificial Sequence
  SARS-CoV-2/Wuhan/WIV05/2019__EPI_ISL_402128 spike protein mRNA gc mod (1-1273)(L18F_T20N_P26S_D138Y_R190S_K417T_E484K_N501Y_D614G_H655Y _T1027I)
agaauaaacuaguauucuucugguccccacagacucagagagaacccgccaccauguucguguuucuggugcugcugccccugguguccagccagugugugaacuucaccaacagaacacagcugccuagcgccuacaccaacagcuucaccagaggcguguacuaccccgacaagguguucagauccagcgugcugcacucuacccaggaccuguuccugccuuucuucagcaacgugaccugguuccacgccauccacguguccggcaccaauggcaccaagagauucgacaaccccgugcugcccuucaacgacgggguguacuuugccagcaccgagaaguccaacaucaucagaggcuggaucuucggcaccacacuggacagcaagacccagagccugcugaucgugaacaacgccaccaacguggucaucaaagugugcgaguuccaguucugcaacuaccccuuccugggcgucuacuaccacaagaacaacaagagcuggauggaaagcgaguuccggguguacagcagcgccaacaacugcaccuucgaguacgugucccagccuuuccugauggaccuggaaggcaagcagggcaacuucaagaaccugagcgaguucguguucaagaacaucgacggcuacuucaaaaucuacagcaagcacaccccuaucaaccucgugcgggaucugccucagggcuucucugcucuggaaccccugguggaucugcccaucggcaucaacaucacccgguuucagacacugcuggcccugcacagaagcuaccugacaccuggcgauagcagcagcggauggacagcuggugccgccgcuuacuaugugggcuaccugcagccuagaaccuuccugcugaaguacaacgagaacggcaccaucaccgacgccguggauugugcucuggauccucugagcgagacaaagugcacccugaaguccuucaccguggaaaagggcaucuaccagaccagcaacuuccgggugcagcccaccgaauccaucgugcgguuccccaauaucaccaaucugugccccuucggcgagguguucaaugccaccagauucgccucuguguacgccuggaaccggaagcggaucagcaauugcguggccgacuacuccgugcuguacaacuccgccagcuucagcaccuucaagugcuacggcguguccccuaccaagcugaacgaccugugcuucacaaacguguacgccgacagcuucgugauccggggagaugaagugcggcagauugccccuggacagacaggcaccaucgccgacuacaacuacaagcugcccgacgacuucaccggcugugugauugccuggaacagcaacaaccuggacuccaaagucggcggcaacuacaauuaccuguaccggcuguuccggaaguccaaucugaagcccuucgagcgggacaucagcaccgaaaucuaucaggccggcagcaccccuugcaacggcgugaagggcuucaacugcuacuucccacugcaguccuacggcuuucagcccacauacggcgugggcuaucagcccuacagagugguggugcugagcuucgaacugcugcaugcuccugccacagugugcggcccuaagaaaagcaccaaucucgugaagaacaaaugcgugaacuucaacuucaacggccugaccggcaccggcgugcugacagagagcaacaagaaguuccugccauuccagcaguuuggccgggauaucgccgauaccacagacgccguuagagauccccagacacuggaaauccuggacaucaccccaugcagcuucggcggagugucugugaucaccccuggcaccaacaccagcaaucagguggcagugcuguaccagggcgugaacuguaccgaagugcccguggccauucacgccgaucagcugacaccuacauggcggguguacuccaccggcagcaauguguuucagaccagagccggcugucugaucggagccgaguacgugaacaauagcuacgagugcgacauccccaucggcgcuggcaucugugccagcuaccagacacagacaaacagccccagacgggcuagaagcguggccagccagagcaucauugccuacacaaugucucugggcgccgagaacagcguggccuacuccaacaacucuaucgcuauccccaccaacuucaccaucagcgugaccaccgagauccugccuguguccaugaccaagaccagcguggacugcaccauguacaucugcggcgauuccaccgagugcuccaaccugcugcugcaguacggcagcuucugcacccagcugaauagagcccugacagggaucgccguggaacaggacaagaacacccaagagguguucgcccaagugaagcaaaucuacaagaccccuccuaucaaggacuucggcggcuucaauuucagccagauucugcccgauccuagcaagcccagcaagcggagcuucaucgaggaccugcuguucaacaaagugacacuggccgacgccggcuucaucaagcaguauggcgauugucugggcgacauugccgccagggaucugauuugcgcccagaaguuuaacggacugacagugcugccuccucugcugaccgaugagaugaucgcccaguacacaucugcccugcuggccggcacaaucacaagcggcuggacauuuggagcuggcgccgcucugcagauccccuuugcuaugcagauggccuaccgguucaacggcaucggagugacccagaaugugcuguacgagaaccagaagcugaucgccaaccaguucaacagcgccaucggcaagauccaggacagccugagcagcacagcaagcgcccugggaaagcugcaggacguggucaaccagaaugcccaggcacugaacacccuggucaagcagcuguccuccaacuucggcgccaucagcucugugcugaacgauauccugagcagacuggacaaggucgaggccgaggugcagaucgacagacugaucacaggcagacugcagagccuccagacauacgugacccagcagcugaucagagccgccgagauuagagccucugccaaucuggccgccaucaagaugucugagugugugcugggccagagcaagagaguggacuuuugcggcaagggcuaccaccugaugagcuucccucagucugccccucacggcgugguguuucugcacgugacauaugugcccgcucaagagaagaauuucaccaccgcuccagccaucugccacgacggcaaagcccacuuuccuagagaaggcguguucguguccaacggcacccauugguucgugacacagcggaacuucuacgagccccagaucaucaccaccgacaacaccuucgugucuggcaacugcgacguugugaucggcauugugaacaauaccguguacgacccucugcagcccgagcuggacagcuucaaagaggaacuggacaaguacuuuaagaaccacacaagccccgacguggaccugggcgauaucagcggaaucaaugccagcgucgugaacauccagaaagagaucgaccggcugaacgagguggccaagaaucugaacgagagccugaucgaccugcaagaacuggggaaguacgagcaguacaucaaguggcccugguacaucuggcugggcuuuaucgccggacugauugccaucgugauggucacaaucaugcuguguugcaugaccagcugcuguagcugccugaagggcuguuguagcuguggcagcugcugcaaguucgacgaggacgauucugagcccgugcugaagggcgugaaacugcacuacaccugaugacucgagcugguacugcaugcacgcaaugcuagcugccccuuucccguccuggguaccccgagucucccccgaccucgggucccagguaugcucccaccuccaccugccccacucaccaccucugcuaguuccagacaccucccaagcacgcagcaaugcagcucaaaacgcuuagccuagccacacccccacgggaaacagcagugauuaaccuuuagcaauaaacgaaaguuuaacuaagcuauacuaaccccaggguuggucaauuucgugccagccacacccuggagcuagcaaaaaaaaaaaaaaaaaaaaaaaaaaaaaaaaaaaaaaaaaaaaaaaaaaaaaaaaaaaaaaaaaaaaaaaaaaaaaaaaaaaaaaaaaaaaaaaaaaaa

SEQ ID NO: 26358 - RNA, 4273 nt, Artificial Sequence
  SARS-CoV-2/Wuhan/WIV05/2019__EPI_ISL_402128 spike protein mRNA gc mod (1-1273)(S13I_W152C_L452R_D614G)
agaauaaacuaguauucuucugguccccacagacucagagagaacccgccaccauguucguguuucuggugcugcugccccugguguccauccagugugugaaccugaccaccagaacacagcugccuccagccuacaccaacagcuucaccagaggcguguacuaccccgacaagguguucagauccagcgugcugcacucuacccaggaccuguuccugccuuucuucagcaacgugaccugguuccacgccauccacguguccggcaccaauggcaccaagagauucgacaaccccgugcugcccuucaacgacgggguguacuuugccagcaccgagaaguccaacaucaucagaggcuggaucuucggcaccacacuggacagcaagacccagagccugcugaucgugaacaacgccaccaacguggucaucaaagugugcgaguuccaguucugcaacgaccccuuccugggcgucuacuaccacaagaacaacaagagcugcauggaaagcgaguuccggguguacagcagcgccaacaacugcaccuucgaguacgugucccagccuuuccugauggaccuggaaggcaagcagggcaacuucaagaaccugcgcgaguucguguucaagaacaucgacggcuacuucaaaaucuacagcaagcacaccccuaucaaccucgugcgggaucugccucagggcuucucugcucuggaaccccugguggaucugcccaucggcaucaacaucacccgguuucagacacugcuggcccugcacagaagcuaccugacaccuggcgauagcagcagcggauggacagcuggugccgccgcuuacuaugugggcuaccugcagccuagaaccuuccugcugaaguacaacgagaacggcaccaucaccgacgccguggauugugcucuggauccucugagcgagacaaagugcacccugaaguccuucaccguggaaaagggcaucuaccagaccagcaacuuccgggugcagcccaccgaauccaucgugcgguuccccaauaucaccaaucugugccccuucggcgagguguucaaugccaccagauucgccucuguguacgccuggaaccggaagcggaucagcaauugcguggccgacuacuccgugcuguacaacuccgccagcuucagcaccuucaagugcuacggcguguccccuaccaagcugaacgaccugugcuucacaaacguguacgccgacagcuucgugauccggggagaugaagugcggcagauugccccuggacagacaggcaagaucgccgacuacaacuacaagcugcccgacgacuucaccggcugugugauugccuggaacagcaacaaccuggacuccaaagucggcggcaacuacaauuaccgcuaccggcuguuccggaaguccaaucugaagcccuucgagcgggacaucagcaccgaaaucuaucaggccggcagcaccccuugcaacggcguggaaggcuucaacugcuacuucccacugcaguccuacggcuuucagcccacaaauggcgugggcuaucagcccuacagagugguggugcugagcuucgaacugcugcaugcuccugccacagugugcggcccuaagaaaagcaccaaucucgugaagaacaaaugcgugaacuucaacuucaacggccugaccggcaccggcgugcugacagagagcaacaagaaguuccugccauuccagcaguuuggccgggauaucgccgauaccacagacgccguuagagauccccagacacuggaaauccuggacaucaccccaugcagcuucggcggagugucugugaucaccccuggcaccaacaccagcaaucagguggcagugcuguaccagggcgugaacuguaccgaagugcccguggccauucacgccgaucagcugacaccuacauggcggguguacuccaccggcagcaauguguuucagaccagagccggcugucugaucggagccgagcacgugaacaauagcuacgagugcgacauccccaucggcgcuggcaucugugccagcuaccagacacagacaaacagccccagacgggcuagaagcguggccagccagagcaucauugccuacacaaugucucugggcgccgagaacagcguggccuacuccaacaacucuaucgcuauccccaccaacuucaccaucagcgugaccaccgagauccugccuguguccaugaccaagaccagcguggacugcaccauguacaucugcggcgauuccaccgagugcuccaaccugcugcugcaguacggcagcuucugcacccagcugaauagagcccugacagggaucgccguggaacaggacaagaacacccaagagguguucgcccaagugaagcaaaucuacaagaccccuccuaucaaggacuucggcggcuucaauuucagccagauucugcccgauccuagcaagcccagcaagcggagcuucaucgaggaccugcuguucaacaaagugacacuggccgacgccggcuucaucaagcaguauggcgauugucugggcgacauugccgccagggaucugauuugcgcccagaaguuuaacggacugacagugcugccuccucugcugaccgaugagaugaucgcccaguacacaucugcccugcuggccggcacaaucacaagcggcuggacauuuggagcuggcgccgcucugcagauccccuuugcuaugcagauggccuaccgguucaacggcaucggagugacccagaaugugcuguacgagaaccagaagcugaucgccaaccaguucaacagcgccaucggcaagauccaggacagccugagcagcacagcaagcgcccugggaaagcugcaggacguggucaaccagaaugcccaggcacugaacacccuggucaagcagcuguccuccaacuucggcgccaucagcucugugcugaacgauauccugagcagacuggacaaggucgaggccgaggugcagaucgacagacugaucacaggcagacugcagagccuccagacauacgugacccagcagcugaucagagccgccgagauuagagccucugccaaucuggccgccaccaagaugucugagugugugcugggccagagcaagagaguggacuuuugcggcaagggcuaccaccugaugagcuucccucagucugccccucacggcgugguguuucugcacgugacauaugugcccgcucaagagaagaauuucaccaccgcuccagccaucugccacgacggcaaagcccacuuuccuagagaaggcguguucguguccaacggcacccauugguucgugacacagcggaacuucuacgagccccagaucaucaccaccgacaacaccuucgugucuggcaacugcgacguugugaucggcauugugaacaauaccguguacgacccucugcagcccgagcuggacagcuucaaagaggaacuggacaaguacuuuaagaaccacacaagccccgacguggaccugggcgauaucagcggaaucaaugccagcgucgugaacauccagaaagagaucgaccggcugaacgagguggccaagaaucugaacgagagccugaucgaccugcaagaacuggggaaguacgagcaguacaucaaguggcccugguacaucuggcugggcuuuaucgccggacugauugccaucgugauggucacaaucaugcuguguugcaugaccagcugcuguagcugccugaagggcuguuguagcuguggcagcugcugcaaguucgacgaggacgauucugagcccgugcugaagggcgugaaacugcacuacaccugaugacucgagcugguacugcaugcacgcaaugcuagcugccccuuucccguccuggguaccccgagucucccccgaccucgggucccagguaugcucccaccuccaccugccccacucaccaccucugcuaguuccagacaccucccaagcacgcagcaaugcagcucaaaacgcuuagccuagccacacccccacgggaaacagcagugauuaaccuuuagcaauaaacgaaaguuuaacuaagcuauacuaaccccaggguuggucaauuucgugccagccacacccuggagcuagcaaaaaaaaaaaaaaaaaaaaaaaaaaaaaaaaaaaaaaaaaaaaaaaaaaaaaaaaaaaaaaaaaaaaaaaaaaaaaaaaaaaaaaaaaaaaaaaaaaaa

SEQ ID NO: 26359 - RNA, 4273 nt, Artificial Sequence
  SARS-CoV-2/Wuhan/WIV05/2019__EPI_ISL_402128 spike protein mRNA gc mod (1-1273)
agaauaaacuaguauucuucugguccccacagacucagagagaacccgccaccauguucguguuccuggugcugcugccucugguguccagccagugugugaaccugaccaccagaacacagcugccuccagccuacaccaacagcuuuaccagaggcguguacuaccccgacaagguguucagauccagcgugcugcacucuacccaggaccuguuccugccuuucuucagcaacgugaccugguuccacgccauccacguguccggcaccaauggcaccaagagauucgacaaccccgugcugcccuucaacgacgggguguacuuugccagcaccgagaaguccaacaucaucagaggcuggaucuucggcaccacacuggacagcaagacccagagccugcugaucgugaacaacgccaccaacguggucaucaaagugugcgaguuccaguucugcaacgaccccuuccugggcgucuacuaccacaagaacaacaagagcuggauggaaagcgaguuccggguguacagcagcgccaacaacugcaccuucgaguacgugucccagccuuuccugauggaccuggaaggcaagcagggcaacuucaagaaccugcgcgaguucguguuuaagaacaucgacggcuacuucaagaucuacagcaagcacaccccuaucaaccucgugcgggaucugccucagggcuucucugcucuggaaccccugguggaucugcccaucggcaucaacaucacccgguuucagacacugcuggcccugcacagaagcuaccugacaccuggcgauagcagcagcggauggacagcuggugccgccgcuuacuaugugggcuaccugcagccuagaaccuuccugcugaaguacaacgagaacggcaccaucaccgacgccguggauugugcucuggauccucugagcgagacaaagugcacccugaaguccuucaccguggaaaagggcaucuaccagaccagcaacuuccgggugcagcccaccgaauccaucgugcgguuccccaauaucaccaaucugugccccuucggcgagguguucaaugccaccagauucgccucuguguacgccuggaaccggaagcggaucagcaauugcguggccgacuacuccgugcuguacaacuccgccagcuucagcaccuucaagugcuacggcguguccccuaccaagcugaacgaccugugcuucacaaacguguacgccgacagcuucgugauccggggagaugaagugcggcagauugccccuggacagacaggcaagaucgccgacuacaacuacaagcugcccgacgacuucaccggcugugugauugccuggaacagcaacaaccuggacuccaaagucggcggcaacuacaauuaccuguaccggcuguuccggaaguccaaucugaagcccuucgagcgggacaucuccaccgagaucuaucaggccggcagcaccccuuguaacggcguggaaggcuucaacugcuacuucccacugcaguccuacggcuuucagcccacaaauggcgugggcuaucagcccuacagagugguggugcugagcuucgaacugcugcaugccccugccacagugugcggcccuaagaaaagcaccaaucucgugaagaacaaaugcgugaacuucaacuucaacggccugaccggcaccggcgugcugacagagagcaacaagaaguuccugccauuccagcaguuuggccgggauaucgccgauaccacagacgccguuagagauccccagacacuggaaauccuggacaucaccccuugcagcuucggcggagugucugugaucaccccuggcaccaacaccagcaaucagguggcagugcuguaccaggacgugaacuguaccgaagugcccguggccauucacgccgaucagcugacaccuacauggcggguguacuccaccggcagcaauguguuucagaccagagccggcugucugaucggagccgagcacgugaacaauagcuacgagugcgacauccccaucggcgcuggaaucugcgccagcuaccagacacagacaaacagcccucggagagccagaagcguggccagccagagcaucauugccuacacaaugucucugggcgccgagaacagcguggccuacuccaacaacucuaucgcuauccccaccaacuucaccaucagcgugaccacagagauccugccuguguccaugaccaagaccagcguggacugcaccauguacaucugcggcgauuccaccgagugcuccaaccugcugcugcaguacggcagcuucugcacccagcugaauagagcccugacagggaucgccguggaacaggacaagaacacccaagagguguucgcccaagugaagcagaucuacaagaccccuccuaucaaggacuucggcggcuucaauuucagccagauucugcccgauccuagcaagcccagcaagcggagcuucaucgaggaccugcuguucaacaaagugacacuggccgacgccggcuucaucaagcaguauggcgauugucugggcgacauugccgccagggaucugauuugcgcccagaaguuuaacggacugacagugcugccuccucugcugaccgaugagaugaucgcccaguacacaucugcccugcuggccggcacaaucacaagcggcuggacauuuggagcaggcgccgcucugcagauccccuuugcuaugcagauggccuaccgguucaacggcaucggagugacccagaaugugcuguacgagaaccagaagcugaucgccaaccaguucaacagcgccaucggcaagauccaggacagccugagcagcacagcaagcgcccugggaaagcugcaggacguggucaaccagaaugcccaggcacugaacacccuggucaagcagcuguccuccaacuucggcgccaucagcucugugcugaacgauauccugagcagacuggacaaggucgaggccgaggugcagaucgacagacugaucacaggcagacugcagagccuccagacauacgugacccagcagcugaucagagccgccgagauuagagccucugccaaucuggccgccaccaagaugucugagugugugcugggccagagcaagagaguggacuuuugcggcaagggcuaccaccugaugagcuucccucagucugccccucacggcgugguguuucugcacgugacauaugugcccgcucaagagaagaauuucaccaccgcuccagccaucugccacgacggcaaagcccacuuuccuagagaaggcguguucguguccaacggcacccauugguucgugacacagcggaacuucuacgagccccagaucaucaccaccgacaacaccuucgugucuggcaacugcgacgucgugaucggcauugugaacaauaccguguacgacccucugcagcccgagcuggacagcuucaaagaggaacuggacaaguacuuuaagaaccacacaagccccgacguggaccugggcgauaucagcggaaucaaugccagcgucgugaacauccagaaagagaucgaccggcugaacgagguggccaagaaucugaacgagagccugaucgaccugcaagaacuggggaaguacgagcaguacaucaaguggcccugguacaucuggcugggcuuuaucgccggacugauugccaucgugauggucacaaucaugcuguguugcaugaccagcugcuguagcugccugaagggcuguuguagcuguggcagcugcugcaaguucgacgaggacgauucugagcccgugcugaagggcgugaaacugcacuacacaugaugacucgagcugguacugcaugcacgcaaugcuagcugccccuuucccguccuggguaccccgagucucccccgaccucgggucccagguaugcucccaccuccaccugccccacucaccaccucugcuaguuccagacaccucccaagcacgcagcaaugcagcucaaaacgcuuagccuagccacacccccacgggaaacagcagugauuaaccuuuagcaauaaacgaaaguuuaacuaagcuauacuaaccccaggguuggucaauuucgugccagccacacccuggagcuagcaaaaaaaaaaaaaaaaaaaaaaaaaaaaaaaaaaaaaaaaaaaaaaaaaaaaaaaaaaaaaaaaaaaaaaaaaaaaaaaaaaaaaaaaaaaaaaaaaaaa

SEQ ID NO: 26360 - RNA, 4273 nt, Artificial Sequence
  SARS-CoV-2/Wuhan/WIV05/2019__EPI_ISL_402128 spike protein mRNA gc mod (1-1273)(D614G)
agaauaaacuaguauucuucugguccccacagacucagagagaacccgccaccauguucguguuccuggugcugcugccucugguguccagccagugugugaaccugaccaccagaacacagcugccuccagccuacaccaacagcuuuaccagaggcguguacuaccccgacaagguguucagauccagcgugcugcacucuacccaggaccuguuccugccuuucuucagcaacgugaccugguuccacgccauccacguguccggcaccaauggcaccaagagauucgacaaccccgugcugcccuucaacgacgggguguacuuugccagcaccgagaaguccaacaucaucagaggcuggaucuucggcaccacacuggacagcaagacccagagccugcugaucgugaacaacgccaccaacguggucaucaaagugugcgaguuccaguucugcaacgaccccuuccugggcgucuacuaccacaagaacaacaagagcuggauggaaagcgaguuccggguguacagcagcgccaacaacugcaccuucgaguacgugucccagccuuuccugauggaccuggaaggcaagcagggcaacuucaagaaccugcgcgaguucguguuuaagaacaucgacggcuacuucaagaucuacagcaagcacaccccuaucaaccucgugcgggaucugccucagggcuucucugcucuggaaccccugguggaucugcccaucggcaucaacaucacccgguuucagacacugcuggcccugcacagaagcuaccugacaccuggcgauagcagcagcggauggacagcuggugccgccgcuuacuaugugggcuaccugcagccuagaaccuuccugcugaaguacaacgagaacggcaccaucaccgacgccguggauugugcucuggauccucugagcgagacaaagugcacccugaaguccuucaccguggaaaagggcaucuaccagaccagcaacuuccgggugcagcccaccgaauccaucgugcgguuccccaauaucaccaaucugugccccuucggcgagguguucaaugccaccagauucgccucuguguacgccuggaaccggaagcggaucagcaauugcguggccgacuacuccgugcuguacaacuccgccagcuucagcaccuucaagugcuacggcguguccccuaccaagcugaacgaccugugcuucacaaacguguacgccgacagcuucgugauccggggagaugaagugcggcagauugccccuggacagacaggcaagaucgccgacuacaacuacaagcugcccgacgacuucaccggcugugugauugccuggaacagcaacaaccuggacuccaaagucggcggcaacuacaauuaccuguaccggcuguuccggaaguccaaucugaagcccuucgagcgggacaucuccaccgagaucuaucaggccggcagcaccccuuguaacggcguggaaggcuucaacugcuacuucccacugcaguccuacggcuuucagcccacaaauggcgugggcuaucagcccuacagagugguggugcugagcuucgaacugcugcaugccccugccacagugugcggcccuaagaaaagcaccaaucucgugaagaacaaaugcgugaacuucaacuucaacggccugaccggcaccggcgugcugacagagagcaacaagaaguuccugccauuccagcaguuuggccgggauaucgccgauaccacagacgccguuagagauccccagacacuggaaauccuggacaucaccccuugcagcuucggcggagugucugugaucaccccuggcaccaacaccagcaaucagguggcagugcuguaccagggcgugaacuguaccgaagugcccguggccauucacgccgaucagcugacaccuacauggcggguguacuccaccggcagcaauguguuucagaccagagccggcugucugaucggagccgagcacgugaacaauagcuacgagugcgacauccccaucggcgcuggaaucugcgccagcuaccagacacagacaaacagcccucggagagccagaagcguggccagccagagcaucauugccuacacaaugucucugggcgccgagaacagcguggccuacuccaacaacucuaucgcuauccccaccaacuucaccaucagcgugaccacagagauccugccuguguccaugaccaagaccagcguggacugcaccauguacaucugcggcgauuccaccgagugcuccaaccugcugcugcaguacggcagcuucugcacccagcugaauagagcccugacagggaucgccguggaacaggacaagaacacccaagagguguucgcccaagugaagcagaucuacaagaccccuccuaucaaggacuucggcggcuucaauuucagccagauucugcccgauccuagcaagcccagcaagcggagcuucaucgaggaccugcuguucaacaaagugacacuggccgacgccggcuucaucaagcaguauggcgauugucugggcgacauugccgccagggaucugauuugcgcccagaaguuuaacggacugacagugcugccuccucugcugaccgaugagaugaucgcccaguacacaucugcccugcuggccggcacaaucacaagcggcuggacauuuggagcaggcgccgcucugcagauccccuuugcuaugcagauggccuaccgguucaacggcaucggagugacccagaaugugcuguacgagaaccagaagcugaucgccaaccaguucaacagcgccaucggcaagauccaggacagccugagcagcacagcaagcgcccugggaaagcugcaggacguggucaaccagaaugcccaggcacugaacacccuggucaagcagcuguccuccaacuucggcgccaucagcucugugcugaacgauauccugagcagacuggacaaggucgaggccgaggugcagaucgacagacugaucacaggcagacugcagagccuccagacauacgugacccagcagcugaucagagccgccgagauuagagccucugccaaucuggccgccaccaagaugucugagugugugcugggccagagcaagagaguggacuuuugcggcaagggcuaccaccugaugagcuucccucagucugccccucacggcgugguguuucugcacgugacauaugugcccgcucaagagaagaauuucaccaccgcuccagccaucugccacgacggcaaagcccacuuuccuagagaaggcguguucguguccaacggcacccauugguucgugacacagcggaacuucuacgagccccagaucaucaccaccgacaacaccuucgugucuggcaacugcgacgucgugaucggcauugugaacaauaccguguacgacccucugcagcccgagcuggacagcuucaaagaggaacuggacaaguacuuuaagaaccacacaagccccgacguggaccugggcgauaucagcggaaucaaugccagcgucgugaacauccagaaagagaucgaccggcugaacgagguggccaagaaucugaacgagagccugaucgaccugcaagaacuggggaaguacgagcaguacaucaaguggcccugguacaucuggcugggcuuuaucgccggacugauugccaucgugauggucacaaucaugcuguguugcaugaccagcugcuguagcugccugaagggcuguuguagcuguggcagcugcugcaaguucgacgaggacgauucugagcccgugcugaagggcgugaaacugcacuacacaugaugacucgagcugguacugcaugcacgcaaugcuagcugccccuuucccguccuggguaccccgagucucccccgaccucgggucccagguaugcucccaccuccaccugccccacucaccaccucugcuaguuccagacaccucccaagcacgcagcaaugcagcucaaaacgcuuagccuagccacacccccacgggaaacagcagugauuaaccuuuagcaauaaacgaaaguuuaacuaagcuauacuaaccccaggguuggucaauuucgugccagccacacccuggagcuagcaaaaaaaaaaaaaaaaaaaaaaaaaaaaaaaaaaaaaaaaaaaaaaaaaaaaaaaaaaaaaaaaaaaaaaaaaaaaaaaaaaaaaaaaaaaaaaaaaaaa

SEQ ID NO: 26361 - RNA, 4273 nt, Artificial Sequence
  SARS-CoV-2/Wuhan/WIV05/2019__EPI_ISL_402128 spike protein mRNA gc mod (1-1273)(A222V_D614G)
agaauaaacuaguauucuucugguccccacagacucagagagaacccgccaccauguucguguuccuggugcugcugccucugguguccagccagugugugaaccugaccaccagaacacagcugccuccagccuacaccaacagcuuuaccagaggcguguacuaccccgacaagguguucagauccagcgugcugcacucuacccaggaccuguuccugccuuucuucagcaacgugaccugguuccacgccauccacguguccggcaccaauggcaccaagagauucgacaaccccgugcugcccuucaacgacgggguguacuuugccagcaccgagaaguccaacaucaucagaggcuggaucuucggcaccacacuggacagcaagacccagagccugcugaucgugaacaacgccaccaacguggucaucaaagugugcgaguuccaguucugcaacgaccccuuccugggcgucuacuaccacaagaacaacaagagcuggauggaaagcgaguuccggguguacagcagcgccaacaacugcaccuucgaguacgugucccagccuuuccugauggaccuggaaggcaagcagggcaacuucaagaaccugcgcgaguucguguuuaagaacaucgacggcuacuucaagaucuacagcaagcacaccccuaucaaccucgugcgggaucugccucagggcuucucugugcuggaaccccugguggaucugcccaucggcaucaacaucacccgguuucagacacugcuggcccugcacagaagcuaccugacaccuggcgauagcagcagcggauggacagcuggugccgccgcuuacuaugugggcuaccugcagccuagaaccuuccugcugaaguacaacgagaacggcaccaucaccgacgccguggauugugcucuggauccucugagcgagacaaagugcacccugaaguccuucaccguggaaaagggcaucuaccagaccagcaacuuccgggugcagcccaccgaauccaucgugcgguuccccaauaucaccaaucugugccccuucggcgagguguucaaugccaccagauucgccucuguguacgccuggaaccggaagcggaucagcaauugcguggccgacuacuccgugcuguacaacuccgccagcuucagcaccuucaagugcuacggcguguccccuaccaagcugaacgaccugugcuucacaaacguguacgccgacagcuucgugauccggggagaugaagugcggcagauugccccuggacagacaggcaagaucgccgacuacaacuacaagcugcccgacgacuucaccggcugugugauugccuggaacagcaacaaccuggacuccaaagucggcggcaacuacaauuaccuguaccggcuguuccggaaguccaaucugaagcccuucgagcgggacaucuccaccgagaucuaucaggccggcagcaccccuuguaacggcguggaaggcuucaacugcuacuucccacugcaguccuacggcuuucagcccacaaauggcgugggcuaucagcccuacagagugguggugcugagcuucgaacugcugcaugccccugccacagugugcggcccuaagaaaagcaccaaucucgugaagaacaaaugcgugaacuucaacuucaacggccugaccggcaccggcgugcugacagagagcaacaagaaguuccugccauuccagcaguuuggccgggauaucgccgauaccacagacgccguuagagauccccagacacuggaaauccuggacaucaccccuugcagcuucggcggagugucugugaucaccccuggcaccaacaccagcaaucagguggcagugcuguaccagggcgugaacuguaccgaagugcccguggccauucacgccgaucagcugacaccuacauggcggguguacuccaccggcagcaauguguuucagaccagagccggcugucugaucggagccgagcacgugaacaauagcuacgagugcgacauccccaucggcgcuggaaucugcgccagcuaccagacacagacaaacagcccucggagagccagaagcguggccagccagagcaucauugccuacacaaugucucugggcgccgagaacagcguggccuacuccaacaacucuaucgcuauccccaccaacuucaccaucagcgugaccacagagauccugccuguguccaugaccaagaccagcguggacugcaccauguacaucugcggcgauuccaccgagugcuccaaccugcugcugcaguacggcagcuucugcacccagcugaauagagcccugacagggaucgccguggaacaggacaagaacacccaagagguguucgcccaagugaagcagaucuacaagaccccuccuaucaaggacuucggcggcuucaauuucagccagauucugcccgauccuagcaagcccagcaagcggagcuucaucgaggaccugcuguucaacaaagugacacuggccgacgccggcuucaucaagcaguauggcgauugucugggcgacauugccgccagggaucugauuugcgcccagaaguuuaacggacugacagugcugccuccucugcugaccgaugagaugaucgcccaguacacaucugcccugcuggccggcacaaucacaagcggcuggacauuuggagcaggcgccgcucugcagauccccuuugcuaugcagauggccuaccgguucaacggcaucggagugacccagaaugugcuguacgagaaccagaagcugaucgccaaccaguucaacagcgccaucggcaagauccaggacagccugagcagcacagcaagcgcccugggaaagcugcaggacguggucaaccagaaugcccaggcacugaacacccuggucaagcagcuguccuccaacuucggcgccaucagcucugugcugaacgauauccugagcagacuggacaaggucgaggccgaggugcagaucgacagacugaucacaggcagacugcagagccuccagacauacgugacccagcagcugaucagagccgccgagauuagagccucugccaaucuggccgccaccaagaugucugagugugugcugggccagagcaagagaguggacuuuugcggcaagggcuaccaccugaugagcuucccucagucugccccucacggcgugguguuucugcacgugacauaugugcccgcucaagagaagaauuucaccaccgcuccagccaucugccacgacggcaaagcccacuuuccuagagaaggcguguucguguccaacggcacccauugguucgugacacagcggaacuucuacgagccccagaucaucaccaccgacaacaccuucgugucuggcaacugcgacgucgugaucggcauugugaacaauaccguguacgacccucugcagcccgagcuggacagcuucaaagaggaacuggacaaguacuuuaagaaccacacaagccccgacguggaccugggcgauaucagcggaaucaaugccagcgucgugaacauccagaaagagaucgaccggcugaacgagguggccaagaaucugaacgagagccugaucgaccugcaagaacuggggaaguacgagcaguacaucaaguggcccugguacaucuggcugggcuuuaucgccggacugauugccaucgugauggucacaaucaugcuguguugcaugaccagcugcuguagcugccugaagggcuguuguagcuguggcagcugcugcaaguucgacgaggacgauucugagcccgugcugaagggcgugaaacugcacuacacaugaugacucgagcugguacugcaugcacgcaaugcuagcugccccuuucccguccuggguaccccgagucucccccgaccucgggucccagguaugcucccaccuccaccugccccacucaccaccucugcuaguuccagacaccucccaagcacgcagcaaugcagcucaaaacgcuuagccuagccacacccccacgggaaacagcagugauuaaccuuuagcaauaaacgaaaguuuaacuaagcuauacuaaccccaggguuggucaauuucgugccagccacacccuggagcuagcaaaaaaaaaaaaaaaaaaaaaaaaaaaaaaaaaaaaaaaaaaaaaaaaaaaaaaaaaaaaaaaaaaaaaaaaaaaaaaaaaaaaaaaaaaaaaaaaaaaa

SEQ ID NO: 26362 - RNA, 4273 nt, Artificial Sequence
  SARS-CoV-2/Wuhan/WIV05/2019__EPI_ISL_402128 spike protein mRNA gc mod (1-1273)(N439K_D614G)
agaauaaacuaguauucuucugguccccacagacucagagagaacccgccaccauguucguguuccuggugcugcugccucugguguccagccagugugugaaccugaccaccagaacacagcugccuccagccuacaccaacagcuuuaccagaggcguguacuaccccgacaagguguucagauccagcgugcugcacucuacccaggaccuguuccugccuuucuucagcaacgugaccugguuccacgccauccacguguccggcaccaauggcaccaagagauucgacaaccccgugcugcccuucaacgacgggguguacuuugccagcaccgagaaguccaacaucaucagaggcuggaucuucggcaccacacuggacagcaagacccagagccugcugaucgugaacaacgccaccaacguggucaucaaagugugcgaguuccaguucugcaacgaccccuuccugggcgucuacuaccacaagaacaacaagagcuggauggaaagcgaguuccggguguacagcagcgccaacaacugcaccuucgaguacgugucccagccuuuccugauggaccuggaaggcaagcagggcaacuucaagaaccugcgcgaguucguguuuaagaacaucgacggcuacuucaagaucuacagcaagcacaccccuaucaaccucgugcgggaucugccucagggcuucucugcucuggaaccccugguggaucugcccaucggcaucaacaucacccgguuucagacacugcuggcccugcacagaagcuaccugacaccuggcgauagcagcagcggauggacagcuggugccgccgcuuacuaugugggcuaccugcagccuagaaccuuccugcugaaguacaacgagaacggcaccaucaccgacgccguggauugugcucuggauccucugagcgagacaaagugcacccugaaguccuucaccguggaaaagggcaucuaccagaccagcaacuuccgggugcagcccaccgaauccaucgugcgguuccccaauaucaccaaucugugccccuucggcgagguguucaaugccaccagauucgccucuguguacgccuggaaccggaagcggaucagcaauugcguggccgacuacuccgugcuguacaacuccgccagcuucagcaccuucaagugcuacggcguguccccuaccaagcugaacgaccugugcuucacaaacguguacgccgacagcuucgugauccggggagaugaagugcggcagauugccccuggacagacaggcaagaucgccgacuacaacuacaagcugcccgacgacuucaccggcugugugauugccuggaacagcaagaaccuggacuccaaagucggcggcaacuacaauuaccuguaccggcuguuccggaaguccaaucugaagcccuucgagcgggacaucuccaccgagaucuaucaggccggcagcaccccuuguaacggcguggaaggcuucaacugcuacuucccacugcaguccuacggcuuucagcccacaaauggcgugggcuaucagcccuacagagugguggugcugagcuucgaacugcugcaugccccugccacagugugcggcccuaagaaaagcaccaaucucgugaagaacaaaugcgugaacuucaacuucaacggccugaccggcaccggcgugcugacagagagcaacaagaaguuccugccauuccagcaguuuggccgggauaucgccgauaccacagacgccguuagagauccccagacacuggaaauccuggacaucaccccuugcagcuucggcggagugucugugaucaccccuggcaccaacaccagcaaucagguggcagugcuguaccagggcgugaacuguaccgaagugcccguggccauucacgccgaucagcugacaccuacauggcggguguacuccaccggcagcaauguguuucagaccagagccggcugucugaucggagccgagcacgugaacaauagcuacgagugcgacauccccaucggcgcuggaaucugcgccagcuaccagacacagacaaacagcccucggagagccagaagcguggccagccagagcaucauugccuacacaaugucucugggcgccgagaacagcguggccuacuccaacaacucuaucgcuauccccaccaacuucaccaucagcgugaccacagagauccugccuguguccaugaccaagaccagcguggacugcaccauguacaucugcggcgauuccaccgagugcuccaaccugcugcugcaguacggcagcuucugcacccagcugaauagagcccugacagggaucgccguggaacaggacaagaacacccaagagguguucgcccaagugaagcagaucuacaagaccccuccuaucaaggacuucggcggcuucaauuucagccagauucugcccgauccuagcaagcccagcaagcggagcuucaucgaggaccugcuguucaacaaagugacacuggccgacgccggcuucaucaagcaguauggcgauugucugggcgacauugccgccagggaucugauuugcgcccagaaguuuaacggacugacagugcugccuccucugcugaccgaugagaugaucgcccaguacacaucugcccugcuggccggcacaaucacaagcggcuggacauuuggagcaggcgccgcucugcagauccccuuugcuaugcagauggccuaccgguucaacggcaucggagugacccagaaugugcuguacgagaaccagaagcugaucgccaaccaguucaacagcgccaucggcaagauccaggacagccugagcagcacagcaagcgcccugggaaagcugcaggacguggucaaccagaaugcccaggcacugaacacccuggucaagcagcuguccuccaacuucggcgccaucagcucugugcugaacgauauccugagcagacuggacaaggucgaggccgaggugcagaucgacagacugaucacaggcagacugcagagccuccagacauacgugacccagcagcugaucagagccgccgagauuagagccucugccaaucuggccgccaccaagaugucugagugugugcugggccagagcaagagaguggacuuuugcggcaagggcuaccaccugaugagcuucccucagucugccccucacggcgugguguuucugcacgugacauaugugcccgcucaagagaagaauuucaccaccgcuccagccaucugccacgacggcaaagcccacuuuccuagagaaggcguguucguguccaacggcacccauugguucgugacacagcggaacuucuacgagccccagaucaucaccaccgacaacaccuucgugucuggcaacugcgacgucgugaucggcauugugaacaauaccguguacgacccucugcagcccgagcuggacagcuucaaagaggaacuggacaaguacuuuaagaaccacacaagccccgacguggaccugggcgauaucagcggaaucaaugccagcgucgugaacauccagaaagagaucgaccggcugaacgagguggccaagaaucugaacgagagccugaucgaccugcaagaacuggggaaguacgagcaguacaucaaguggcccugguacaucuggcugggcuuuaucgccggacugauugccaucgugauggucacaaucaugcuguguugcaugaccagcugcuguagcugccugaagggcuguuguagcuguggcagcugcugcaaguucgacgaggacgauucugagcccgugcugaagggcgugaaacugcacuacacaugaugacucgagcugguacugcaugcacgcaaugcuagcugccccuuucccguccuggguaccccgagucucccccgaccucgggucccagguaugcucccaccuccaccugccccacucaccaccucugcuaguuccagacaccucccaagcacgcagcaaugcagcucaaaacgcuuagccuagccacacccccacgggaaacagcagugauuaaccuuuagcaauaaacgaaaguuuaacuaagcuauacuaaccccaggguuggucaauuucgugccagccacacccuggagcuagcaaaaaaaaaaaaaaaaaaaaaaaaaaaaaaaaaaaaaaaaaaaaaaaaaaaaaaaaaaaaaaaaaaaaaaaaaaaaaaaaaaaaaaaaaaaaaaaaaaaa

SEQ ID NO: 26363 - RNA, 4273 nt, Artificial Sequence
  SARS-CoV-2/Wuhan/WIV05/2019__EPI_ISL_402128 spike protein mRNA gc mod (1-1273)(S477N_D614G)
agaauaaacuaguauucuucugguccccacagacucagagagaacccgccaccauguucguguuccuggugcugcugccucugguguccagccagugugugaaccugaccaccagaacacagcugccuccagccuacaccaacagcuuuaccagaggcguguacuaccccgacaagguguucagauccagcgugcugcacucuacccaggaccuguuccugccuuucuucagcaacgugaccugguuccacgccauccacguguccggcaccaauggcaccaagagauucgacaaccccgugcugcccuucaacgacgggguguacuuugccagcaccgagaaguccaacaucaucagaggcuggaucuucggcaccacacuggacagcaagacccagagccugcugaucgugaacaacgccaccaacguggucaucaaagugugcgaguuccaguucugcaacgaccccuuccugggcgucuacuaccacaagaacaacaagagcuggauggaaagcgaguuccggguguacagcagcgccaacaacugcaccuucgaguacgugucccagccuuuccugauggaccuggaaggcaagcagggcaacuucaagaaccugcgcgaguucguguuuaagaacaucgacggcuacuucaagaucuacagcaagcacaccccuaucaaccucgugcgggaucugccucagggcuucucugcucuggaaccccugguggaucugcccaucggcaucaacaucacccgguuucagacacugcuggcccugcacagaagcuaccugacaccuggcgauagcagcagcggauggacagcuggugccgccgcuuacuaugugggcuaccugcagccuagaaccuuccugcugaaguacaacgagaacggcaccaucaccgacgccguggauugugcucuggauccucugagcgagacaaagugcacccugaaguccuucaccguggaaaagggcaucuaccagaccagcaacuuccgggugcagcccaccgaauccaucgugcgguuccccaauaucaccaaucugugccccuucggcgagguguucaaugccaccagauucgccucuguguacgccuggaaccggaagcggaucagcaauugcguggccgacuacuccgugcuguacaacuccgccagcuucagcaccuucaagugcuacggcguguccccuaccaagcugaacgaccugugcuucacaaacguguacgccgacagcuucgugauccggggagaugaagugcggcagauugccccuggacagacaggcaagaucgccgacuacaacuacaagcugcccgacgacuucaccggcugugugauugccuggaacagcaacaaccuggacuccaaagucggcggcaacuacaauuaccuguaccggcuguuccggaaguccaaucugaagcccuucgagcgggacaucuccaccgagaucuaucaggccggcaacaccccuuguaacggcguggaaggcuucaacugcuacuucccacugcaguccuacggcuuucagcccacaaauggcgugggcuaucagcccuacagagugguggugcugagcuucgaacugcugcaugccccugccacagugugcggcccuaagaaaagcaccaaucucgugaagaacaaaugcgugaacuucaacuucaacggccugaccggcaccggcgugcugacagagagcaacaagaaguuccugccauuccagcaguuuggccgggauaucgccgauaccacagacgccguuagagauccccagacacuggaaauccuggacaucaccccuugcagcuucggcggagugucugugaucaccccuggcaccaacaccagcaaucagguggcagugcuguaccagggcgugaacuguaccgaagugcccguggccauucacgccgaucagcugacaccuacauggcggguguacuccaccggcagcaauguguuucagaccagagccggcugucugaucggagccgagcacgugaacaauagcuacgagugcgacauccccaucggcgcuggaaucugcgccagcuaccagacacagacaaacagcccucggagagccagaagcguggccagccagagcaucauugccuacacaaugucucugggcgccgagaacagcguggccuacuccaacaacucuaucgcuauccccaccaacuucaccaucagcgugaccacagagauccugccuguguccaugaccaagaccagcguggacugcaccauguacaucugcggcgauuccaccgagugcuccaaccugcugcugcaguacggcagcuucugcacccagcugaauagagcccugacagggaucgccguggaacaggacaagaacacccaagagguguucgcccaagugaagcagaucuacaagaccccuccuaucaaggacuucggcggcuucaauuucagccagauucugcccgauccuagcaagcccagcaagcggagcuucaucgaggaccugcuguucaacaaagugacacuggccgacgccggcuucaucaagcaguauggcgauugucugggcgacauugccgccagggaucugauuugcgcccagaaguuuaacggacugacagugcugccuccucugcugaccgaugagaugaucgcccaguacacaucugcccugcuggccggcacaaucacaagcggcuggacauuuggagcaggcgccgcucugcagauccccuuugcuaugcagauggccuaccgguucaacggcaucggagugacccagaaugugcuguacgagaaccagaagcugaucgccaaccaguucaacagcgccaucggcaagauccaggacagccugagcagcacagcaagcgcccugggaaagcugcaggacguggucaaccagaaugcccaggcacugaacacccuggucaagcagcuguccuccaacuucggcgccaucagcucugugcugaacgauauccugagcagacuggacaaggucgaggccgaggugcagaucgacagacugaucacaggcagacugcagagccuccagacauacgugacccagcagcugaucagagccgccgagauuagagccucugccaaucuggccgccaccaagaugucugagugugugcugggccagagcaagagaguggacuuuugcggcaagggcuaccaccugaugagcuucccucagucugccccucacggcgugguguuucugcacgugacauaugugcccgcucaagagaagaauuucaccaccgcuccagccaucugccacgacggcaaagcccacuuuccuagagaaggcguguucguguccaacggcacccauugguucgugacacagcggaacuucuacgagccccagaucaucaccaccgacaacaccuucgugucuggcaacugcgacgucgugaucggcauugugaacaauaccguguacgacccucugcagcccgagcuggacagcuucaaagaggaacuggacaaguacuuuaagaaccacacaagccccgacguggaccugggcgauaucagcggaaucaaugccagcgucgugaacauccagaaagagaucgaccggcugaacgagguggccaagaaucugaacgagagccugaucgaccugcaagaacuggggaaguacgagcaguacaucaaguggcccugguacaucuggcugggcuuuaucgccggacugauugccaucgugauggucacaaucaugcuguguugcaugaccagcugcuguagcugccugaagggcuguuguagcuguggcagcugcugcaaguucgacgaggacgauucugagcccgugcugaagggcgugaaacugcacuacacaugaugacucgagcugguacugcaugcacgcaaugcuagcugccccuuucccguccuggguaccccgagucucccccgaccucgggucccagguaugcucccaccuccaccugccccacucaccaccucugcuaguuccagacaccucccaagcacgcagcaaugcagcucaaaacgcuuagccuagccacacccccacgggaaacagcagugauuaaccuuuagcaauaaacgaaaguuuaacuaagcuauacuaaccccaggguuggucaauuucgugccagccacacccuggagcuagcaaaaaaaaaaaaaaaaaaaaaaaaaaaaaaaaaaaaaaaaaaaaaaaaaaaaaaaaaaaaaaaaaaaaaaaaaaaaaaaaaaaaaaaaaaaaaaaaaaaa

SEQ ID NO: 26364 - RNA, 4273 nt, Artificial Sequence
  SARS-CoV-2/Wuhan/WIV05/2019__EPI_ISL_402128 spike protein mRNA gc mod (1-1273)(N501Y_D614G)
agaauaaacuaguauucuucugguccccacagacucagagagaacccgccaccauguucguguuccuggugcugcugccucugguguccagccagugugugaaccugaccaccagaacacagcugccuccagccuacaccaacagcuuuaccagaggcguguacuaccccgacaagguguucagauccagcgugcugcacucuacccaggaccuguuccugccuuucuucagcaacgugaccugguuccacgccauccacguguccggcaccaauggcaccaagagauucgacaaccccgugcugcccuucaacgacgggguguacuuugccagcaccgagaaguccaacaucaucagaggcuggaucuucggcaccacacuggacagcaagacccagagccugcugaucgugaacaacgccaccaacguggucaucaaagugugcgaguuccaguucugcaacgaccccuuccugggcgucuacuaccacaagaacaacaagagcuggauggaaagcgaguuccggguguacagcagcgccaacaacugcaccuucgaguacgugucccagccuuuccugauggaccuggaaggcaagcagggcaacuucaagaaccugcgcgaguucguguuuaagaacaucgacggcuacuucaagaucuacagcaagcacaccccuaucaaccucgugcgggaucugccucagggcuucucugcucuggaaccccugguggaucugcccaucggcaucaacaucacccgguuucagacacugcuggcccugcacagaagcuaccugacaccuggcgauagcagcagcggauggacagcuggugccgccgcuuacuaugugggcuaccugcagccuagaaccuuccugcugaaguacaacgagaacggcaccaucaccgacgccguggauugugcucuggauccucugagcgagacaaagugcacccugaaguccuucaccguggaaaagggcaucuaccagaccagcaacuuccgggugcagcccaccgaauccaucgugcgguuccccaauaucaccaaucugugccccuucggcgagguguucaaugccaccagauucgccucuguguacgccuggaaccggaagcggaucagcaauugcguggccgacuacuccgugcuguacaacuccgccagcuucagcaccuucaagugcuacggcguguccccuaccaagcugaacgaccugugcuucacaaacguguacgccgacagcuucgugauccggggagaugaagugcggcagauugccccuggacagacaggcaagaucgccgacuacaacuacaagcugcccgacgacuucaccggcugugugauugccuggaacagcaacaaccuggacuccaaagucggcggcaacuacaauuaccuguaccggcuguuccggaaguccaaucugaagcccuucgagcgggacaucuccaccgagaucuaucaggccggcagcaccccuuguaacggcguggaaggcuucaacugcuacuucccacugcaguccuacggcuuucagcccacauacggcgugggcuaucagcccuacagagugguggugcugagcuucgaacugcugcaugccccugccacagugugcggcccuaagaaaagcaccaaucucgugaagaacaaaugcgugaacuucaacuucaacggccugaccggcaccggcgugcugacagagagcaacaagaaguuccugccauuccagcaguuuggccgggauaucgccgauaccacagacgccguuagagauccccagacacuggaaauccuggacaucaccccuugcagcuucggcggagugucugugaucaccccuggcaccaacaccagcaaucagguggcagugcuguaccagggcgugaacuguaccgaagugcccguggccauucacgccgaucagcugacaccuacauggcggguguacuccaccggcagcaauguguuucagaccagagccggcugucugaucggagccgagcacgugaacaauagcuacgagugcgacauccccaucggcgcuggaaucugcgccagcuaccagacacagacaaacagcccucggagagccagaagcguggccagccagagcaucauugccuacacaaugucucugggcgccgagaacagcguggccuacuccaacaacucuaucgcuauccccaccaacuucaccaucagcgugaccacagagauccugccuguguccaugaccaagaccagcguggacugcaccauguacaucugcggcgauuccaccgagugcuccaaccugcugcugcaguacggcagcuucugcacccagcugaauagagcccugacagggaucgccguggaacaggacaagaacacccaagagguguucgcccaagugaagcagaucuacaagaccccuccuaucaaggacuucggcggcuucaauuucagccagauucugcccgauccuagcaagcccagcaagcggagcuucaucgaggaccugcuguucaacaaagugacacuggccgacgccggcuucaucaagcaguauggcgauugucugggcgacauugccgccagggaucugauuugcgcccagaaguuuaacggacugacagugcugccuccucugcugaccgaugagaugaucgcccaguacacaucugcccugcuggccggcacaaucacaagcggcuggacauuuggagcaggcgccgcucugcagauccccuuugcuaugcagauggccuaccgguucaacggcaucggagugacccagaaugugcuguacgagaaccagaagcugaucgccaaccaguucaacagcgccaucggcaagauccaggacagccugagcagcacagcaagcgcccugggaaagcugcaggacguggucaaccagaaugcccaggcacugaacacccuggucaagcagcuguccuccaacuucggcgccaucagcucugugcugaacgauauccugagcagacuggacaaggucgaggccgaggugcagaucgacagacugaucacaggcagacugcagagccuccagacauacgugacccagcagcugaucagagccgccgagauuagagccucugccaaucuggccgccaccaagaugucugagugugugcugggccagagcaagagaguggacuuuugcggcaagggcuaccaccugaugagcuucccucagucugccccucacggcgugguguuucugcacgugacauaugugcccgcucaagagaagaauuucaccaccgcuccagccaucugccacgacggcaaagcccacuuuccuagagaaggcguguucguguccaacggcacccauugguucgugacacagcggaacuucuacgagccccagaucaucaccaccgacaacaccuucgugucuggcaacugcgacgucgugaucggcauugugaacaauaccguguacgacccucugcagcccgagcuggacagcuucaaagaggaacuggacaaguacuuuaagaaccacacaagccccgacguggaccugggcgauaucagcggaaucaaugccagcgucgugaacauccagaaagagaucgaccggcugaacgagguggccaagaaucugaacgagagccugaucgaccugcaagaacuggggaaguacgagcaguacaucaaguggcccugguacaucuggcugggcuuuaucgccggacugauugccaucgugauggucacaaucaugcuguguugcaugaccagcugcuguagcugccugaagggcuguuguagcuguggcagcugcugcaaguucgacgaggacgauucugagcccgugcugaagggcgugaaacugcacuacacaugaugacucgagcugguacugcaugcacgcaaugcuagcugccccuuucccguccuggguaccccgagucucccccgaccucgggucccagguaugcucccaccuccaccugccccacucaccaccucugcuaguuccagacaccucccaagcacgcagcaaugcagcucaaaacgcuuagccuagccacacccccacgggaaacagcagugauuaaccuuuagcaauaaacgaaaguuuaacuaagcuauacuaaccccaggguuggucaauuucgugccagccacacccuggagcuagcaaaaaaaaaaaaaaaaaaaaaaaaaaaaaaaaaaaaaaaaaaaaaaaaaaaaaaaaaaaaaaaaaaaaaaaaaaaaaaaaaaaaaaaaaaaaaaaaaaaa

SEQ ID NO: 26365 - RNA, 4267 nt, Artificial Sequence
  SARS-CoV-2/Wuhan/WIV05/2019__EPI_ISL_402128 spike protein mRNA gc mod (1-1273)(H69del_V70del_D614G)
agaauaaacuaguauucuucugguccccacagacucagagagaacccgccaccauguucguguuccuggugcugcugccucugguguccagccagugugugaaccugaccaccagaacacagcugccuccagccuacaccaacagcuuuaccagaggcguguacuaccccgacaagguguucagauccagcgugcugcacucuacccaggaccuguuccugccuuucuucagcaacgugaccugguuccacgccaucuccggcaccaauggcaccaagagauucgacaaccccgugcugcccuucaacgacgggguguacuuugccagcaccgagaaguccaacaucaucagaggcuggaucuucggcaccacacuggacagcaagacccagagccugcugaucgugaacaacgccaccaacguggucaucaaagugugcgaguuccaguucugcaacgaccccuuccugggcgucuacuaccacaagaacaacaagagcuggauggaaagcgaguuccggguguacagcagcgccaacaacugcaccuucgaguacgugucccagccuuuccugauggaccuggaaggcaagcagggcaacuucaagaaccugcgcgaguucguguuuaagaacaucgacggcuacuucaagaucuacagcaagcacaccccuaucaaccucgugcgggaucugccucagggcuucucugcucuggaaccccugguggaucugcccaucggcaucaacaucacccgguuucagacacugcuggcccugcacagaagcuaccugacaccuggcgauagcagcagcggauggacagcuggugccgccgcuuacuaugugggcuaccugcagccuagaaccuuccugcugaaguacaacgagaacggcaccaucaccgacgccguggauugugcucuggauccucugagcgagacaaagugcacccugaaguccuucaccguggaaaagggcaucuaccagaccagcaacuuccgggugcagcccaccgaauccaucgugcgguuccccaauaucaccaaucugugccccuucggcgagguguucaaugccaccagauucgccucuguguacgccuggaaccggaagcggaucagcaauugcguggccgacuacuccgugcuguacaacuccgccagcuucagcaccuucaagugcuacggcguguccccuaccaagcugaacgaccugugcuucacaaacguguacgccgacagcuucgugauccggggagaugaagugcggcagauugccccuggacagacaggcaagaucgccgacuacaacuacaagcugcccgacgacuucaccggcugugugauugccuggaacagcaacaaccuggacuccaaagucggcggcaacuacaauuaccuguaccggcuguuccggaaguccaaucugaagcccuucgagcgggacaucuccaccgagaucuaucaggccggcagcaccccuuguaacggcguggaaggcuucaacugcuacuucccacugcaguccuacggcuuucagcccacaaauggcgugggcuaucagcccuacagagugguggugcugagcuucgaacugcugcaugccccugccacagugugcggcccuaagaaaagcaccaaucucgugaagaacaaaugcgugaacuucaacuucaacggccugaccggcaccggcgugcugacagagagcaacaagaaguuccugccauuccagcaguuuggccgggauaucgccgauaccacagacgccguuagagauccccagacacuggaaauccuggacaucaccccuugcagcuucggcggagugucugugaucaccccuggcaccaacaccagcaaucagguggcagugcuguaccagggcgugaacuguaccgaagugcccguggccauucacgccgaucagcugacaccuacauggcggguguacuccaccggcagcaauguguuucagaccagagccggcugucugaucggagccgagcacgugaacaauagcuacgagugcgacauccccaucggcgcuggaaucugcgccagcuaccagacacagacaaacagcccucggagagccagaagcguggccagccagagcaucauugccuacacaaugucucugggcgccgagaacagcguggccuacuccaacaacucuaucgcuauccccaccaacuucaccaucagcgugaccacagagauccugccuguguccaugaccaagaccagcguggacugcaccauguacaucugcggcgauuccaccgagugcuccaaccugcugcugcaguacggcagcuucugcacccagcugaauagagcccugacagggaucgccguggaacaggacaagaacacccaagagguguucgcccaagugaagcagaucuacaagaccccuccuaucaaggacuucggcggcuucaauuucagccagauucugcccgauccuagcaagcccagcaagcggagcuucaucgaggaccugcuguucaacaaagugacacuggccgacgccggcuucaucaagcaguauggcgauugucugggcgacauugccgccagggaucugauuugcgcccagaaguuuaacggacugacagugcugccuccucugcugaccgaugagaugaucgcccaguacacaucugcccugcuggccggcacaaucacaagcggcuggacauuuggagcaggcgccgcucugcagauccccuuugcuaugcagauggccuaccgguucaacggcaucggagugacccagaaugugcuguacgagaaccagaagcugaucgccaaccaguucaacagcgccaucggcaagauccaggacagccugagcagcacagcaagcgcccugggaaagcugcaggacguggucaaccagaaugcccaggcacugaacacccuggucaagcagcuguccuccaacuucggcgccaucagcucugugcugaacgauauccugagcagacuggacaaggucgaggccgaggugcagaucgacagacugaucacaggcagacugcagagccuccagacauacgugacccagcagcugaucagagccgccgagauuagagccucugccaaucuggccgccaccaagaugucugagugugugcugggccagagcaagagaguggacuuuugcggcaagggcuaccaccugaugagcuucccucagucugccccucacggcgugguguuucugcacgugacauaugugcccgcucaagagaagaauuucaccaccgcuccagccaucugccacgacggcaaagcccacuuuccuagagaaggcguguucguguccaacggcacccauugguucgugacacagcggaacuucuacgagccccagaucaucaccaccgacaacaccuucgugucuggcaacugcgacgucgugaucggcauugugaacaauaccguguacgacccucugcagcccgagcuggacagcuucaaagaggaacuggacaaguacuuuaagaaccacacaagccccgacguggaccugggcgauaucagcggaaucaaugccagcgucgugaacauccagaaagagaucgaccggcugaacgagguggccaagaaucugaacgagagccugaucgaccugcaagaacuggggaaguacgagcaguacaucaaguggcccugguacaucuggcugggcuuuaucgccggacugauugccaucgugauggucacaaucaugcuguguugcaugaccagcugcuguagcugccugaagggcuguuguagcuguggcagcugcugcaaguucgacgaggacgauucugagcccgugcugaagggcgugaaacugcacuacacaugaugacucgagcugguacugcaugcacgcaaugcuagcugccccuuucccguccuggguaccccgagucucccccgaccucgggucccagguaugcucccaccuccaccugccccacucaccaccucugcuaguuccagacaccucccaagcacgcagcaaugcagcucaaaacgcuuagccuagccacacccccacgggaaacagcagugauuaaccuuuagcaauaaacgaaaguuuaacuaagcuauacuaaccccaggguuggucaauuucgugccagccacacccuggagcuagcaaaaaaaaaaaaaaaaaaaaaaaaaaaaaaaaaaaaaaaaaaaaaaaaaaaaaaaaaaaaaaaaaaaaaaaaaaaaaaaaaaaaaaaaaaaaaaaaaaaa

SEQ ID NO: 26366 - RNA, 4273 nt, Artificial Sequence
  SARS-CoV-2/Wuhan/WIV05/2019__EPI_ISL_402128 spike protein mRNA gc mod (1-1273)(Y453F_D614G)
agaauaaacuaguauucuucugguccccacagacucagagagaacccgccaccauguucguguuccuggugcugcugccucugguguccagccagugugugaaccugaccaccagaacacagcugccuccagccuacaccaacagcuuuaccagaggcguguacuaccccgacaagguguucagauccagcgugcugcacucuacccaggaccuguuccugccuuucuucagcaacgugaccugguuccacgccauccacguguccggcaccaauggcaccaagagauucgacaaccccgugcugcccuucaacgacgggguguacuuugccagcaccgagaaguccaacaucaucagaggcuggaucuucggcaccacacuggacagcaagacccagagccugcugaucgugaacaacgccaccaacguggucaucaaagugugcgaguuccaguucugcaacgaccccuuccugggcgucuacuaccacaagaacaacaagagcuggauggaaagcgaguuccggguguacagcagcgccaacaacugcaccuucgaguacgugucccagccuuuccugauggaccuggaaggcaagcagggcaacuucaagaaccugcgcgaguucguguuuaagaacaucgacggcuacuucaagaucuacagcaagcacaccccuaucaaccucgugcgggaucugccucagggcuucucugcucuggaaccccugguggaucugcccaucggcaucaacaucacccgguuucagacacugcuggcccugcacagaagcuaccugacaccuggcgauagcagcagcggauggacagcuggugccgccgcuuacuaugugggcuaccugcagccuagaaccuuccugcugaaguacaacgagaacggcaccaucaccgacgccguggauugugcucuggauccucugagcgagacaaagugcacccugaaguccuucaccguggaaaagggcaucuaccagaccagcaacuuccgggugcagcccaccgaauccaucgugcgguuccccaauaucaccaaucugugccccuucggcgagguguucaaugccaccagauucgccucuguguacgccuggaaccggaagcggaucagcaauugcguggccgacuacuccgugcuguacaacuccgccagcuucagcaccuucaagugcuacggcguguccccuaccaagcugaacgaccugugcuucacaaacguguacgccgacagcuucgugauccggggagaugaagugcggcagauugccccuggacagacaggcaagaucgccgacuacaacuacaagcugcccgacgacuucaccggcugugugauugccuggaacagcaacaaccuggacuccaaagucggcggcaacuacaauuaccuguuccggcuguuccggaaguccaaucugaagcccuucgagcgggacaucuccaccgagaucuaucaggccggcagcaccccuuguaacggcguggaaggcuucaacugcuacuucccacugcaguccuacggcuuucagcccacaaauggcgugggcuaucagcccuacagagugguggugcugagcuucgaacugcugcaugccccugccacagugugcggcccuaagaaaagcaccaaucucgugaagaacaaaugcgugaacuucaacuucaacggccugaccggcaccggcgugcugacagagagcaacaagaaguuccugccauuccagcaguuuggccgggauaucgccgauaccacagacgccguuagagauccccagacacuggaaauccuggacaucaccccuugcagcuucggcggagugucugugaucaccccuggcaccaacaccagcaaucagguggcagugcuguaccagggcgugaacuguaccgaagugcccguggccauucacgccgaucagcugacaccuacauggcggguguacuccaccggcagcaauguguuucagaccagagccggcugucugaucggagccgagcacgugaacaauagcuacgagugcgacauccccaucggcgcuggaaucugcgccagcuaccagacacagacaaacagcccucggagagccagaagcguggccagccagagcaucauugccuacacaaugucucugggcgccgagaacagcguggccuacuccaacaacucuaucgcuauccccaccaacuucaccaucagcgugaccacagagauccugccuguguccaugaccaagaccagcguggacugcaccauguacaucugcggcgauuccaccgagugcuccaaccugcugcugcaguacggcagcuucugcacccagcugaauagagcccugacagggaucgccguggaacaggacaagaacacccaagagguguucgcccaagugaagcagaucuacaagaccccuccuaucaaggacuucggcggcuucaauuucagccagauucugcccgauccuagcaagcccagcaagcggagcuucaucgaggaccugcuguucaacaaagugacacuggccgacgccggcuucaucaagcaguauggcgauugucugggcgacauugccgccagggaucugauuugcgcccagaaguuuaacggacugacagugcugccuccucugcugaccgaugagaugaucgcccaguacacaucugcccugcuggccggcacaaucacaagcggcuggacauuuggagcaggcgccgcucugcagauccccuuugcuaugcagauggccuaccgguucaacggcaucggagugacccagaaugugcuguacgagaaccagaagcugaucgccaaccaguucaacagcgccaucggcaagauccaggacagccugagcagcacagcaagcgcccugggaaagcugcaggacguggucaaccagaaugcccaggcacugaacacccuggucaagcagcuguccuccaacuucggcgccaucagcucugugcugaacgauauccugagcagacuggacaaggucgaggccgaggugcagaucgacagacugaucacaggcagacugcagagccuccagacauacgugacccagcagcugaucagagccgccgagauuagagccucugccaaucuggccgccaccaagaugucugagugugugcugggccagagcaagagaguggacuuuugcggcaagggcuaccaccugaugagcuucccucagucugccccucacggcgugguguuucugcacgugacauaugugcccgcucaagagaagaauuucaccaccgcuccagccaucugccacgacggcaaagcccacuuuccuagagaaggcguguucguguccaacggcacccauugguucgugacacagcggaacuucuacgagccccagaucaucaccaccgacaacaccuucgugucuggcaacugcgacgucgugaucggcauugugaacaauaccguguacgacccucugcagcccgagcuggacagcuucaaagaggaacuggacaaguacuuuaagaaccacacaagccccgacguggaccugggcgauaucagcggaaucaaugccagcgucgugaacauccagaaagagaucgaccggcugaacgagguggccaagaaucugaacgagagccugaucgaccugcaagaacuggggaaguacgagcaguacaucaaguggcccugguacaucuggcugggcuuuaucgccggacugauugccaucgugauggucacaaucaugcuguguugcaugaccagcugcuguagcugccugaagggcuguuguagcuguggcagcugcugcaaguucgacgaggacgauucugagcccgugcugaagggcgugaaacugcacuacacaugaugacucgagcugguacugcaugcacgcaaugcuagcugccccuuucccguccuggguaccccgagucucccccgaccucgggucccagguaugcucccaccuccaccugccccacucaccaccucugcuaguuccagacaccucccaagcacgcagcaaugcagcucaaaacgcuuagccuagccacacccccacgggaaacagcagugauuaaccuuuagcaauaaacgaaaguuuaacuaagcuauacuaaccccaggguuggucaauuucgugccagccacacccuggagcuagcaaaaaaaaaaaaaaaaaaaaaaaaaaaaaaaaaaaaaaaaaaaaaaaaaaaaaaaaaaaaaaaaaaaaaaaaaaaaaaaaaaaaaaaaaaaaaaaaaaaa

SEQ ID NO: 26367 - RNA, 4273 nt, Artificial Sequence
  SARS-CoV-2/Wuhan/WIV05/2019__EPI_ISL_402128 spike protein mRNA gc mod (1-1273)(D614G_I692V)
agaauaaacuaguauucuucugguccccacagacucagagagaacccgccaccauguucguguuccuggugcugcugccucugguguccagccagugugugaaccugaccaccagaacacagcugccuccagccuacaccaacagcuuuaccagaggcguguacuaccccgacaagguguucagauccagcgugcugcacucuacccaggaccuguuccugccuuucuucagcaacgugaccugguuccacgccauccacguguccggcaccaauggcaccaagagauucgacaaccccgugcugcccuucaacgacgggguguacuuugccagcaccgagaaguccaacaucaucagaggcuggaucuucggcaccacacuggacagcaagacccagagccugcugaucgugaacaacgccaccaacguggucaucaaagugugcgaguuccaguucugcaacgaccccuuccugggcgucuacuaccacaagaacaacaagagcuggauggaaagcgaguuccggguguacagcagcgccaacaacugcaccuucgaguacgugucccagccuuuccugauggaccuggaaggcaagcagggcaacuucaagaaccugcgcgaguucguguuuaagaacaucgacggcuacuucaagaucuacagcaagcacaccccuaucaaccucgugcgggaucugccucagggcuucucugcucuggaaccccugguggaucugcccaucggcaucaacaucacccgguuucagacacugcuggcccugcacagaagcuaccugacaccuggcgauagcagcagcggauggacagcuggugccgccgcuuacuaugugggcuaccugcagccuagaaccuuccugcugaaguacaacgagaacggcaccaucaccgacgccguggauugugcucuggauccucugagcgagacaaagugcacccugaaguccuucaccguggaaaagggcaucuaccagaccagcaacuuccgggugcagcccaccgaauccaucgugcgguuccccaauaucaccaaucugugccccuucggcgagguguucaaugccaccagauucgccucuguguacgccuggaaccggaagcggaucagcaauugcguggccgacuacuccgugcuguacaacuccgccagcuucagcaccuucaagugcuacggcguguccccuaccaagcugaacgaccugugcuucacaaacguguacgccgacagcuucgugauccggggagaugaagugcggcagauugccccuggacagacaggcaagaucgccgacuacaacuacaagcugcccgacgacuucaccggcugugugauugccuggaacagcaacaaccuggacuccaaagucggcggcaacuacaauuaccuguaccggcuguuccggaaguccaaucugaagcccuucgagcgggacaucuccaccgagaucuaucaggccggcagcaccccuuguaacggcguggaaggcuucaacugcuacuucccacugcaguccuacggcuuucagcccacaaauggcgugggcuaucagcccuacagagugguggugcugagcuucgaacugcugcaugccccugccacagugugcggcccuaagaaaagcaccaaucucgugaagaacaaaugcgugaacuucaacuucaacggccugaccggcaccggcgugcugacagagagcaacaagaaguuccugccauuccagcaguuuggccgggauaucgccgauaccacagacgccguuagagauccccagacacuggaaauccuggacaucaccccuugcagcuucggcggagugucugugaucaccccuggcaccaacaccagcaaucagguggcagugcuguaccagggcgugaacuguaccgaagugcccguggccauucacgccgaucagcugacaccuacauggcggguguacuccaccggcagcaauguguuucagaccagagccggcugucugaucggagccgagcacgugaacaauagcuacgagugcgacauccccaucggcgcuggaaucugcgccagcuaccagacacagacaaacagcccucggagagccagaagcguggccagccagagcgugauugccuacacaaugucucugggcgccgagaacagcguggccuacuccaacaacucuaucgcuauccccaccaacuucaccaucagcgugaccacagagauccugccuguguccaugaccaagaccagcguggacugcaccauguacaucugcggcgauuccaccgagugcuccaaccugcugcugcaguacggcagcuucugcacccagcugaauagagcccugacagggaucgccguggaacaggacaagaacacccaagagguguucgcccaagugaagcagaucuacaagaccccuccuaucaaggacuucggcggcuucaauuucagccagauucugcccgauccuagcaagcccagcaagcggagcuucaucgaggaccugcuguucaacaaagugacacuggccgacgccggcuucaucaagcaguauggcgauugucugggcgacauugccgccagggaucugauuugcgcccagaaguuuaacggacugacagugcugccuccucugcugaccgaugagaugaucgcccaguacacaucugcccugcuggccggcacaaucacaagcggcuggacauuuggagcaggcgccgcucugcagauccccuuugcuaugcagauggccuaccgguucaacggcaucggagugacccagaaugugcuguacgagaaccagaagcugaucgccaaccaguucaacagcgccaucggcaagauccaggacagccugagcagcacagcaagcgcccugggaaagcugcaggacguggucaaccagaaugcccaggcacugaacacccuggucaagcagcuguccuccaacuucggcgccaucagcucugugcugaacgauauccugagcagacuggacaaggucgaggccgaggugcagaucgacagacugaucacaggcagacugcagagccuccagacauacgugacccagcagcugaucagagccgccgagauuagagccucugccaaucuggccgccaccaagaugucugagugugugcugggccagagcaagagaguggacuuuugcggcaagggcuaccaccugaugagcuucccucagucugccccucacggcgugguguuucugcacgugacauaugugcccgcucaagagaagaauuucaccaccgcuccagccaucugccacgacggcaaagcccacuuuccuagagaaggcguguucguguccaacggcacccauugguucgugacacagcggaacuucuacgagccccagaucaucaccaccgacaacaccuucgugucuggcaacugcgacgucgugaucggcauugugaacaauaccguguacgacccucugcagcccgagcuggacagcuucaaagaggaacuggacaaguacuuuaagaaccacacaagccccgacguggaccugggcgauaucagcggaaucaaugccagcgucgugaacauccagaaagagaucgaccggcugaacgagguggccaagaaucugaacgagagccugaucgaccugcaagaacuggggaaguacgagcaguacaucaaguggcccugguacaucuggcugggcuuuaucgccggacugauugccaucgugauggucacaaucaugcuguguugcaugaccagcugcuguagcugccugaagggcuguuguagcuguggcagcugcugcaaguucgacgaggacgauucugagcccgugcugaagggcgugaaacugcacuacacaugaugacucgagcugguacugcaugcacgcaaugcuagcugccccuuucccguccuggguaccccgagucucccccgaccucgggucccagguaugcucccaccuccaccugccccacucaccaccucugcuaguuccagacaccucccaagcacgcagcaaugcagcucaaaacgcuuagccuagccacacccccacgggaaacagcagugauuaaccuuuagcaauaaacgaaaguuuaacuaagcuauacuaaccccaggguuggucaauuucgugccagccacacccuggagcuagcaaaaaaaaaaaaaaaaaaaaaaaaaaaaaaaaaaaaaaaaaaaaaaaaaaaaaaaaaaaaaaaaaaaaaaaaaaaaaaaaaaaaaaaaaaaaaaaaaaaa

SEQ ID NO: 26368 - RNA, 4273 nt, Artificial Sequence
  SARS-CoV-2/Wuhan/WIV05/2019__EPI_ISL_402128 spike protein mRNA gc mod (1-1273)(D614G_M1229I)
agaauaaacuaguauucuucugguccccacagacucagagagaacccgccaccauguucguguuccuggugcugcugccucugguguccagccagugugugaaccugaccaccagaacacagcugccuccagccuacaccaacagcuuuaccagaggcguguacuaccccgacaagguguucagauccagcgugcugcacucuacccaggaccuguuccugccuuucuucagcaacgugaccugguuccacgccauccacguguccggcaccaauggcaccaagagauucgacaaccccgugcugcccuucaacgacgggguguacuuugccagcaccgagaaguccaacaucaucagaggcuggaucuucggcaccacacuggacagcaagacccagagccugcugaucgugaacaacgccaccaacguggucaucaaagugugcgaguuccaguucugcaacgaccccuuccugggcgucuacuaccacaagaacaacaagagcuggauggaaagcgaguuccggguguacagcagcgccaacaacugcaccuucgaguacgugucccagccuuuccugauggaccuggaaggcaagcagggcaacuucaagaaccugcgcgaguucguguuuaagaacaucgacggcuacuucaagaucuacagcaagcacaccccuaucaaccucgugcgggaucugccucagggcuucucugcucuggaaccccugguggaucugcccaucggcaucaacaucacccgguuucagacacugcuggcccugcacagaagcuaccugacaccuggcgauagcagcagcggauggacagcuggugccgccgcuuacuaugugggcuaccugcagccuagaaccuuccugcugaaguacaacgagaacggcaccaucaccgacgccguggauugugcucuggauccucugagcgagacaaagugcacccugaaguccuucaccguggaaaagggcaucuaccagaccagcaacuuccgggugcagcccaccgaauccaucgugcgguuccccaauaucaccaaucugugccccuucggcgagguguucaaugccaccagauucgccucuguguacgccuggaaccggaagcggaucagcaauugcguggccgacuacuccgugcuguacaacuccgccagcuucagcaccuucaagugcuacggcguguccccuaccaagcugaacgaccugugcuucacaaacguguacgccgacagcuucgugauccggggagaugaagugcggcagauugccccuggacagacaggcaagaucgccgacuacaacuacaagcugcccgacgacuucaccggcugugugauugccuggaacagcaacaaccuggacuccaaagucggcggcaacuacaauuaccuguaccggcuguuccggaaguccaaucugaagcccuucgagcgggacaucuccaccgagaucuaucaggccggcagcaccccuuguaacggcguggaaggcuucaacugcuacuucccacugcaguccuacggcuuucagcccacaaauggcgugggcuaucagcccuacagagugguggugcugagcuucgaacugcugcaugccccugccacagugugcggcccuaagaaaagcaccaaucucgugaagaacaaaugcgugaacuucaacuucaacggccugaccggcaccggcgugcugacagagagcaacaagaaguuccugccauuccagcaguuuggccgggauaucgccgauaccacagacgccguuagagauccccagacacuggaaauccuggacaucaccccuugcagcuucggcggagugucugugaucaccccuggcaccaacaccagcaaucagguggcagugcuguaccagggcgugaacuguaccgaagugcccguggccauucacgccgaucagcugacaccuacauggcggguguacuccaccggcagcaauguguuucagaccagagccggcugucugaucggagccgagcacgugaacaauagcuacgagugcgacauccccaucggcgcuggaaucugcgccagcuaccagacacagacaaacagcccucggagagccagaagcguggccagccagagcaucauugccuacacaaugucucugggcgccgagaacagcguggccuacuccaacaacucuaucgcuauccccaccaacuucaccaucagcgugaccacagagauccugccuguguccaugaccaagaccagcguggacugcaccauguacaucugcggcgauuccaccgagugcuccaaccugcugcugcaguacggcagcuucugcacccagcugaauagagcccugacagggaucgccguggaacaggacaagaacacccaagagguguucgcccaagugaagcagaucuacaagaccccuccuaucaaggacuucggcggcuucaauuucagccagauucugcccgauccuagcaagcccagcaagcggagcuucaucgaggaccugcuguucaacaaagugacacuggccgacgccggcuucaucaagcaguauggcgauugucugggcgacauugccgccagggaucugauuugcgcccagaaguuuaacggacugacagugcugccuccucugcugaccgaugagaugaucgcccaguacacaucugcccugcuggccggcacaaucacaagcggcuggacauuuggagcaggcgccgcucugcagauccccuuugcuaugcagauggccuaccgguucaacggcaucggagugacccagaaugugcuguacgagaaccagaagcugaucgccaaccaguucaacagcgccaucggcaagauccaggacagccugagcagcacagcaagcgcccugggaaagcugcaggacguggucaaccagaaugcccaggcacugaacacccuggucaagcagcuguccuccaacuucggcgccaucagcucugugcugaacgauauccugagcagacuggacaaggucgaggccgaggugcagaucgacagacugaucacaggcagacugcagagccuccagacauacgugacccagcagcugaucagagccgccgagauuagagccucugccaaucuggccgccaccaagaugucugagugugugcugggccagagcaagagaguggacuuuugcggcaagggcuaccaccugaugagcuucccucagucugccccucacggcgugguguuucugcacgugacauaugugcccgcucaagagaagaauuucaccaccgcuccagccaucugccacgacggcaaagcccacuuuccuagagaaggcguguucguguccaacggcacccauugguucgugacacagcggaacuucuacgagccccagaucaucaccaccgacaacaccuucgugucuggcaacugcgacgucgugaucggcauugugaacaauaccguguacgacccucugcagcccgagcuggacagcuucaaagaggaacuggacaaguacuuuaagaaccacacaagccccgacguggaccugggcgauaucagcggaaucaaugccagcgucgugaacauccagaaagagaucgaccggcugaacgagguggccaagaaucugaacgagagccugaucgaccugcaagaacuggggaaguacgagcaguacaucaaguggcccugguacaucuggcugggcuuuaucgccggacugauugccaucgugaucgucacaaucaugcuguguugcaugaccagcugcuguagcugccugaagggcuguuguagcuguggcagcugcugcaaguucgacgaggacgauucugagcccgugcugaagggcgugaaacugcacuacacaugaugacucgagcugguacugcaugcacgcaaugcuagcugccccuuucccguccuggguaccccgagucucccccgaccucgggucccagguaugcucccaccuccaccugccccacucaccaccucugcuaguuccagacaccucccaagcacgcagcaaugcagcucaaaacgcuuagccuagccacacccccacgggaaacagcagugauuaaccuuuagcaauaaacgaaaguuuaacuaagcuauacuaaccccaggguuggucaauuucgugccagccacacccuggagcuagcaaaaaaaaaaaaaaaaaaaaaaaaaaaaaaaaaaaaaaaaaaaaaaaaaaaaaaaaaaaaaaaaaaaaaaaaaaaaaaaaaaaaaaaaaaaaaaaaaaaa

SEQ ID NO: 26369 - RNA, 4267 nt, Artificial Sequence
  SARS-CoV-2/Wuhan/WIV05/2019__EPI_ISL_402128 spike protein mRNA gc mod (1-1273)(H69del_V70del_A222V_Y453F_S477N_D614G_I692V)
agaauaaacuaguauucuucugguccccacagacucagagagaacccgccaccauguucguguuccuggugcugcugccucugguguccagccagugugugaaccugaccaccagaacacagcugccuccagccuacaccaacagcuuuaccagaggcguguacuaccccgacaagguguucagauccagcgugcugcacucuacccaggaccuguuccugccuuucuucagcaacgugaccugguuccacgccaucuccggcaccaauggcaccaagagauucgacaaccccgugcugcccuucaacgacgggguguacuuugccagcaccgagaaguccaacaucaucagaggcuggaucuucggcaccacacuggacagcaagacccagagccugcugaucgugaacaacgccaccaacguggucaucaaagugugcgaguuccaguucugcaacgaccccuuccugggcgucuacuaccacaagaacaacaagagcuggauggaaagcgaguuccggguguacagcagcgccaacaacugcaccuucgaguacgugucccagccuuuccugauggaccuggaaggcaagcagggcaacuucaagaaccugcgcgaguucguguuuaagaacaucgacggcuacuucaagaucuacagcaagcacaccccuaucaaccucgugcgggaucugccucagggcuucucugugcuggaaccccugguggaucugcccaucggcaucaacaucacccgguuucagacacugcuggcccugcacagaagcuaccugacaccuggcgauagcagcagcggauggacagcuggugccgccgcuuacuaugugggcuaccugcagccuagaaccuuccugcugaaguacaacgagaacggcaccaucaccgacgccguggauugugcucuggauccucugagcgagacaaagugcacccugaaguccuucaccguggaaaagggcaucuaccagaccagcaacuuccgggugcagcccaccgaauccaucgugcgguuccccaauaucaccaaucugugccccuucggcgagguguucaaugccaccagauucgccucuguguacgccuggaaccggaagcggaucagcaauugcguggccgacuacuccgugcuguacaacuccgccagcuucagcaccuucaagugcuacggcguguccccuaccaagcugaacgaccugugcuucacaaacguguacgccgacagcuucgugauccggggagaugaagugcggcagauugccccuggacagacaggcaagaucgccgacuacaacuacaagcugcccgacgacuucaccggcugugugauugccuggaacagcaacaaccuggacuccaaagucggcggcaacuacaauuaccuguuccggcuguuccggaaguccaaucugaagcccuucgagcgggacaucuccaccgagaucuaucaggccggcaacaccccuuguaacggcguggaaggcuucaacugcuacuucccacugcaguccuacggcuuucagcccacaaauggcgugggcuaucagcccuacagagugguggugcugagcuucgaacugcugcaugccccugccacagugugcggcccuaagaaaagcaccaaucucgugaagaacaaaugcgugaacuucaacuucaacggccugaccggcaccggcgugcugacagagagcaacaagaaguuccugccauuccagcaguuuggccgggauaucgccgauaccacagacgccguuagagauccccagacacuggaaauccuggacaucaccccuugcagcuucggcggagugucugugaucaccccuggcaccaacaccagcaaucagguggcagugcuguaccagggcgugaacuguaccgaagugcccguggccauucacgccgaucagcugacaccuacauggcggguguacuccaccggcagcaauguguuucagaccagagccggcugucugaucggagccgagcacgugaacaauagcuacgagugcgacauccccaucggcgcuggaaucugcgccagcuaccagacacagacaaacagcccucggagagccagaagcguggccagccagagcgugauugccuacacaaugucucugggcgccgagaacagcguggccuacuccaacaacucuaucgcuauccccaccaacuucaccaucagcgugaccacagagauccugccuguguccaugaccaagaccagcguggacugcaccauguacaucugcggcgauuccaccgagugcuccaaccugcugcugcaguacggcagcuucugcacccagcugaauagagcccugacagggaucgccguggaacaggacaagaacacccaagagguguucgcccaagugaagcagaucuacaagaccccuccuaucaaggacuucggcggcuucaauuucagccagauucugcccgauccuagcaagcccagcaagcggagcuucaucgaggaccugcuguucaacaaagugacacuggccgacgccggcuucaucaagcaguauggcgauugucugggcgacauugccgccagggaucugauuugcgcccagaaguuuaacggacugacagugcugccuccucugcugaccgaugagaugaucgcccaguacacaucugcccugcuggccggcacaaucacaagcggcuggacauuuggagcaggcgccgcucugcagauccccuuugcuaugcagauggccuaccgguucaacggcaucggagugacccagaaugugcuguacgagaaccagaagcugaucgccaaccaguucaacagcgccaucggcaagauccaggacagccugagcagcacagcaagcgcccugggaaagcugcaggacguggucaaccagaaugcccaggcacugaacacccuggucaagcagcuguccuccaacuucggcgccaucagcucugugcugaacgauauccugagcagacuggacaaggucgaggccgaggugcagaucgacagacugaucacaggcagacugcagagccuccagacauacgugacccagcagcugaucagagccgccgagauuagagccucugccaaucuggccgccaccaagaugucugagugugugcugggccagagcaagagaguggacuuuugcggcaagggcuaccaccugaugagcuucccucagucugccccucacggcgugguguuucugcacgugacauaugugcccgcucaagagaagaauuucaccaccgcuccagccaucugccacgacggcaaagcccacuuuccuagagaaggcguguucguguccaacggcacccauugguucgugacacagcggaacuucuacgagccccagaucaucaccaccgacaacaccuucgugucuggcaacugcgacgucgugaucggcauugugaacaauaccguguacgacccucugcagcccgagcuggacagcuucaaagaggaacuggacaaguacuuuaagaaccacacaagccccgacguggaccugggcgauaucagcggaaucaaugccagcgucgugaacauccagaaagagaucgaccggcugaacgagguggccaagaaucugaacgagagccugaucgaccugcaagaacuggggaaguacgagcaguacaucaaguggcccugguacaucuggcugggcuuuaucgccggacugauugccaucgugauggucacaaucaugcuguguugcaugaccagcugcuguagcugccugaagggcuguuguagcuguggcagcugcugcaaguucgacgaggacgauucugagcccgugcugaagggcgugaaacugcacuacacaugaugacucgagcugguacugcaugcacgcaaugcuagcugccccuuucccguccuggguaccccgagucucccccgaccucgggucccagguaugcucccaccuccaccugccccacucaccaccucugcuaguuccagacaccucccaagcacgcagcaaugcagcucaaaacgcuuagccuagccacacccccacgggaaacagcagugauuaaccuuuagcaauaaacgaaaguuuaacuaagcuauacuaaccccaggguuggucaauuucgugccagccacacccuggagcuagcaaaaaaaaaaaaaaaaaaaaaaaaaaaaaaaaaaaaaaaaaaaaaaaaaaaaaaaaaaaaaaaaaaaaaaaaaaaaaaaaaaaaaaaaaaaaaaaaaaaa

SEQ ID NO: 26370 - RNA, 4267 nt, Artificial Sequence
  SARS-CoV-2/Wuhan/WIV05/2019__EPI_ISL_402128 spike protein mRNA gc mod (1-1273)(H69del_V70del_Y453F_D614G_I692V_M1229I)
agaauaaacuaguauucuucugguccccacagacucagagagaacccgccaccauguucguguuccuggugcugcugccucugguguccagccagugugugaaccugaccaccagaacacagcugccuccagccuacaccaacagcuuuaccagaggcguguacuaccccgacaagguguucagauccagcgugcugcacucuacccaggaccuguuccugccuuucuucagcaacgugaccugguuccacgccaucuccggcaccaauggcaccaagagauucgacaaccccgugcugcccuucaacgacgggguguacuuugccagcaccgagaaguccaacaucaucagaggcuggaucuucggcaccacacuggacagcaagacccagagccugcugaucgugaacaacgccaccaacguggucaucaaagugugcgaguuccaguucugcaacgaccccuuccugggcgucuacuaccacaagaacaacaagagcuggauggaaagcgaguuccggguguacagcagcgccaacaacugcaccuucgaguacgugucccagccuuuccugauggaccuggaaggcaagcagggcaacuucaagaaccugcgcgaguucguguuuaagaacaucgacggcuacuucaagaucuacagcaagcacaccccuaucaaccucgugcgggaucugccucagggcuucucugcucuggaaccccugguggaucugcccaucggcaucaacaucacccgguuucagacacugcuggcccugcacagaagcuaccugacaccuggcgauagcagcagcggauggacagcuggugccgccgcuuacuaugugggcuaccugcagccuagaaccuuccugcugaaguacaacgagaacggcaccaucaccgacgccguggauugugcucuggauccucugagcgagacaaagugcacccugaaguccuucaccguggaaaagggcaucuaccagaccagcaacuuccgggugcagcccaccgaauccaucgugcgguuccccaauaucaccaaucugugccccuucggcgagguguucaaugccaccagauucgccucuguguacgccuggaaccggaagcggaucagcaauugcguggccgacuacuccgugcuguacaacuccgccagcuucagcaccuucaagugcuacggcguguccccuaccaagcugaacgaccugugcuucacaaacguguacgccgacagcuucgugauccggggagaugaagugcggcagauugccccuggacagacaggcaagaucgccgacuacaacuacaagcugcccgacgacuucaccggcugugugauugccuggaacagcaacaaccuggacuccaaagucggcggcaacuacaauuaccuguuccggcuguuccggaaguccaaucugaagcccuucgagcgggacaucuccaccgagaucuaucaggccggcagcaccccuuguaacggcguggaaggcuucaacugcuacuucccacugcaguccuacggcuuucagcccacaaauggcgugggcuaucagcccuacagagugguggugcugagcuucgaacugcugcaugccccugccacagugugcggcccuaagaaaagcaccaaucucgugaagaacaaaugcgugaacuucaacuucaacggccugaccggcaccggcgugcugacagagagcaacaagaaguuccugccauuccagcaguuuggccgggauaucgccgauaccacagacgccguuagagauccccagacacuggaaauccuggacaucaccccuugcagcuucggcggagugucugugaucaccccuggcaccaacaccagcaaucagguggcagugcuguaccagggcgugaacuguaccgaagugcccguggccauucacgccgaucagcugacaccuacauggcggguguacuccaccggcagcaauguguuucagaccagagccggcugucugaucggagccgagcacgugaacaauagcuacgagugcgacauccccaucggcgcuggaaucugcgccagcuaccagacacagacaaacagcccucggagagccagaagcguggccagccagagcgugauugccuacacaaugucucugggcgccgagaacagcguggccuacuccaacaacucuaucgcuauccccaccaacuucaccaucagcgugaccacagagauccugccuguguccaugaccaagaccagcguggacugcaccauguacaucugcggcgauuccaccgagugcuccaaccugcugcugcaguacggcagcuucugcacccagcugaauagagcccugacagggaucgccguggaacaggacaagaacacccaagagguguucgcccaagugaagcagaucuacaagaccccuccuaucaaggacuucggcggcuucaauuucagccagauucugcccgauccuagcaagcccagcaagcggagcuucaucgaggaccugcuguucaacaaagugacacuggccgacgccggcuucaucaagcaguauggcgauugucugggcgacauugccgccagggaucugauuugcgcccagaaguuuaacggacugacagugcugccuccucugcugaccgaugagaugaucgcccaguacacaucugcccugcuggccggcacaaucacaagcggcuggacauuuggagcaggcgccgcucugcagauccccuuugcuaugcagauggccuaccgguucaacggcaucggagugacccagaaugugcuguacgagaaccagaagcugaucgccaaccaguucaacagcgccaucggcaagauccaggacagccugagcagcacagcaagcgcccugggaaagcugcaggacguggucaaccagaaugcccaggcacugaacacccuggucaagcagcuguccuccaacuucggcgccaucagcucugugcugaacgauauccugagcagacuggacaaggucgaggccgaggugcagaucgacagacugaucacaggcagacugcagagccuccagacauacgugacccagcagcugaucagagccgccgagauuagagccucugccaaucuggccgccaccaagaugucugagugugugcugggccagagcaagagaguggacuuuugcggcaagggcuaccaccugaugagcuucccucagucugccccucacggcgugguguuucugcacgugacauaugugcccgcucaagagaagaauuucaccaccgcuccagccaucugccacgacggcaaagcccacuuuccuagagaaggcguguucguguccaacggcacccauugguucgugacacagcggaacuucuacgagccccagaucaucaccaccgacaacaccuucgugucuggcaacugcgacgucgugaucggcauugugaacaauaccguguacgacccucugcagcccgagcuggacagcuucaaagaggaacuggacaaguacuuuaagaaccacacaagccccgacguggaccugggcgauaucagcggaaucaaugccagcgucgugaacauccagaaagagaucgaccggcugaacgagguggccaagaaucugaacgagagccugaucgaccugcaagaacuggggaaguacgagcaguacaucaaguggcccugguacaucuggcugggcuuuaucgccggacugauugccaucgugaucgucacaaucaugcuguguugcaugaccagcugcuguagcugccugaagggcuguuguagcuguggcagcugcugcaaguucgacgaggacgauucugagcccgugcugaagggcgugaaacugcacuacacaugaugacucgagcugguacugcaugcacgcaaugcuagcugccccuuucccguccuggguaccccgagucucccccgaccucgggucccagguaugcucccaccuccaccugccccacucaccaccucugcuaguuccagacaccucccaagcacgcagcaaugcagcucaaaacgcuuagccuagccacacccccacgggaaacagcagugauuaaccuuuagcaauaaacgaaaguuuaacuaagcuauacuaaccccaggguuggucaauuucgugccagccacacccuggagcuagcaaaaaaaaaaaaaaaaaaaaaaaaaaaaaaaaaaaaaaaaaaaaaaaaaaaaaaaaaaaaaaaaaaaaaaaaaaaaaaaaaaaaaaaaaaaaaaaaaaaa

SEQ ID NO: 26371 - RNA, 4264 nt, Artificial Sequence
  SARS-CoV-2/Wuhan/WIV05/2019__EPI_ISL_402128 spike protein mRNA gc mod (1-1273)(H69del_V70del_Y144del_N501Y_A570D_D614G_P681H_T716I_S982 A_D1118H)
agaauaaacuaguauucuucugguccccacagacucagagagaacccgccaccauguucguguuccuggugcugcugccucugguguccagccagugugugaaccugaccaccagaacacagcugccuccagccuacaccaacagcuuuaccagaggcguguacuaccccgacaagguguucagauccagcgugcugcacucuacccaggaccuguuccugccuuucuucagcaacgugaccugguuccacgccaucuccggcaccaauggcaccaagagauucgacaaccccgugcugcccuucaacgacgggguguacuuugccagcaccgagaaguccaacaucaucagaggcuggaucuucggcaccacacuggacagcaagacccagagccugcugaucgugaacaacgccaccaacguggucaucaaagugugcgaguuccaguucugcaacgaccccuuccugggcgucuaccacaagaacaacaagagcuggauggaaagcgaguuccggguguacagcagcgccaacaacugcaccuucgaguacgugucccagccuuuccugauggaccuggaaggcaagcagggcaacuucaagaaccugcgcgaguucguguuuaagaacaucgacggcuacuucaagaucuacagcaagcacaccccuaucaaccucgugcgggaucugccucagggcuucucugcucuggaaccccugguggaucugcccaucggcaucaacaucacccgguuucagacacugcuggcccugcacagaagcuaccugacaccuggcgauagcagcagcggauggacagcuggugccgccgcuuacuaugugggcuaccugcagccuagaaccuuccugcugaaguacaacgagaacggcaccaucaccgacgccguggauugugcucuggauccucugagcgagacaaagugcacccugaaguccuucaccguggaaaagggcaucuaccagaccagcaacuuccgggugcagcccaccgaauccaucgugcgguuccccaauaucaccaaucugugccccuucggcgagguguucaaugccaccagauucgccucuguguacgccuggaaccggaagcggaucagcaauugcguggccgacuacuccgugcuguacaacuccgccagcuucagcaccuucaagugcuacggcguguccccuaccaagcugaacgaccugugcuucacaaacguguacgccgacagcuucgugauccggggagaugaagugcggcagauugccccuggacagacaggcaagaucgccgacuacaacuacaagcugcccgacgacuucaccggcugugugauugccuggaacagcaacaaccuggacuccaaagucggcggcaacuacaauuaccuguaccggcuguuccggaaguccaaucugaagcccuucgagcgggacaucuccaccgagaucuaucaggccggcagcaccccuuguaacggcguggaaggcuucaacugcuacuucccacugcaguccuacggcuuucagcccacauacggcgugggcuaucagcccuacagagugguggugcugagcuucgaacugcugcaugccccugccacagugugcggcccuaagaaaagcaccaaucucgugaagaacaaaugcgugaacuucaacuucaacggccugaccggcaccggcgugcugacagagagcaacaagaaguuccugccauuccagcaguuuggccgggauaucgacgauaccacagacgccguuagagauccccagacacuggaaauccuggacaucaccccuugcagcuucggcggagugucugugaucaccccuggcaccaacaccagcaaucagguggcagugcuguaccagggcgugaacuguaccgaagugcccguggccauucacgccgaucagcugacaccuacauggcggguguacuccaccggcagcaauguguuucagaccagagccggcugucugaucggagccgagcacgugaacaauagcuacgagugcgacauccccaucggcgcuggaaucugcgccagcuaccagacacagacaaacagccaccggagagccagaagcguggccagccagagcaucauugccuacacaaugucucugggcgccgagaacagcguggccuacuccaacaacucuaucgcuauccccaucaacuucaccaucagcgugaccacagagauccugccuguguccaugaccaagaccagcguggacugcaccauguacaucugcggcgauuccaccgagugcuccaaccugcugcugcaguacggcagcuucugcacccagcugaauagagcccugacagggaucgccguggaacaggacaagaacacccaagagguguucgcccaagugaagcagaucuacaagaccccuccuaucaaggacuucggcggcuucaauuucagccagauucugcccgauccuagcaagcccagcaagcggagcuucaucgaggaccugcuguucaacaaagugacacuggccgacgccggcuucaucaagcaguauggcgauugucugggcgacauugccgccagggaucugauuugcgcccagaaguuuaacggacugacagugcugccuccucugcugaccgaugagaugaucgcccaguacacaucugcccugcuggccggcacaaucacaagcggcuggacauuuggagcaggcgccgcucugcagauccccuuugcuaugcagauggccuaccgguucaacggcaucggagugacccagaaugugcuguacgagaaccagaagcugaucgccaaccaguucaacagcgccaucggcaagauccaggacagccugagcagcacagcaagcgcccugggaaagcugcaggacguggucaaccagaaugcccaggcacugaacacccuggucaagcagcuguccuccaacuucggcgccaucagcucugugcugaacgauauccuggccagacuggacaaggucgaggccgaggugcagaucgacagacugaucacaggcagacugcagagccuccagacauacgugacccagcagcugaucagagccgccgagauuagagccucugccaaucuggccgccaccaagaugucugagugugugcugggccagagcaagagaguggacuuuugcggcaagggcuaccaccugaugagcuucccucagucugccccucacggcgugguguuucugcacgugacauaugugcccgcucaagagaagaauuucaccaccgcuccagccaucugccacgacggcaaagcccacuuuccuagagaaggcguguucguguccaacggcacccauugguucgugacacagcggaacuucuacgagccccagaucaucaccacccacaacaccuucgugucuggcaacugcgacgucgugaucggcauugugaacaauaccguguacgacccucugcagcccgagcuggacagcuucaaagaggaacuggacaaguacuuuaagaaccacacaagccccgacguggaccugggcgauaucagcggaaucaaugccagcgucgugaacauccagaaagagaucgaccggcugaacgagguggccaagaaucugaacgagagccugaucgaccugcaagaacuggggaaguacgagcaguacaucaaguggcccugguacaucuggcugggcuuuaucgccggacugauugccaucgugauggucacaaucaugcuguguugcaugaccagcugcuguagcugccugaagggcuguuguagcuguggcagcugcugcaaguucgacgaggacgauucugagcccgugcugaagggcgugaaacugcacuacacaugaugacucgagcugguacugcaugcacgcaaugcuagcugccccuuucccguccuggguaccccgagucucccccgaccucgggucccagguaugcucccaccuccaccugccccacucaccaccucugcuaguuccagacaccucccaagcacgcagcaaugcagcucaaaacgcuuagccuagccacacccccacgggaaacagcagugauuaaccuuuagcaauaaacgaaaguuuaacuaagcuauacuaaccccaggguuggucaauuucgugccagccacacccuggagcuagcaaaaaaaaaaaaaaaaaaaaaaaaaaaaaaaaaaaaaaaaaaaaaaaaaaaaaaaaaaaaaaaaaaaaaaaaaaaaaaaaaaaaaaaaaaaaaaaaaaaa

SEQ ID NO: 26372 - RNA, 4273 nt, Artificial Sequence
  SARS-CoV-2/Wuhan/WIV05/2019__EPI_ISL_402128 spike protein mRNA gc mod (1-1273)(K417N_E484K_N501Y_D614G)
agaauaaacuaguauucuucugguccccacagacucagagagaacccgccaccauguucguguuccuggugcugcugccucugguguccagccagugugugaaccugaccaccagaacacagcugccuccagccuacaccaacagcuuuaccagaggcguguacuaccccgacaagguguucagauccagcgugcugcacucuacccaggaccuguuccugccuuucuucagcaacgugaccugguuccacgccauccacguguccggcaccaauggcaccaagagauucgacaaccccgugcugcccuucaacgacgggguguacuuugccagcaccgagaaguccaacaucaucagaggcuggaucuucggcaccacacuggacagcaagacccagagccugcugaucgugaacaacgccaccaacguggucaucaaagugugcgaguuccaguucugcaacgaccccuuccugggcgucuacuaccacaagaacaacaagagcuggauggaaagcgaguuccggguguacagcagcgccaacaacugcaccuucgaguacgugucccagccuuuccugauggaccuggaaggcaagcagggcaacuucaagaaccugcgcgaguucguguuuaagaacaucgacggcuacuucaagaucuacagcaagcacaccccuaucaaccucgugcgggaucugccucagggcuucucugcucuggaaccccugguggaucugcccaucggcaucaacaucacccgguuucagacacugcuggcccugcacagaagcuaccugacaccuggcgauagcagcagcggauggacagcuggugccgccgcuuacuaugugggcuaccugcagccuagaaccuuccugcugaaguacaacgagaacggcaccaucaccgacgccguggauugugcucuggauccucugagcgagacaaagugcacccugaaguccuucaccguggaaaagggcaucuaccagaccagcaacuuccgggugcagcccaccgaauccaucgugcgguuccccaauaucaccaaucugugccccuucggcgagguguucaaugccaccagauucgccucuguguacgccuggaaccggaagcggaucagcaauugcguggccgacuacuccgugcuguacaacuccgccagcuucagcaccuucaagugcuacggcguguccccuaccaagcugaacgaccugugcuucacaaacguguacgccgacagcuucgugauccggggagaugaagugcggcagauugccccuggacagacaggcaacaucgccgacuacaacuacaagcugcccgacgacuucaccggcugugugauugccuggaacagcaacaaccuggacuccaaagucggcggcaacuacaauuaccuguaccggcuguuccggaaguccaaucugaagcccuucgagcgggacaucuccaccgagaucuaucaggccggcagcaccccuuguaacggcgugaagggcuucaacugcuacuucccacugcaguccuacggcuuucagcccacauacggcgugggcuaucagcccuacagagugguggugcugagcuucgaacugcugcaugccccugccacagugugcggcccuaagaaaagcaccaaucucgugaagaacaaaugcgugaacuucaacuucaacggccugaccggcaccggcgugcugacagagagcaacaagaaguuccugccauuccagcaguuuggccgggauaucgccgauaccacagacgccguuagagauccccagacacuggaaauccuggacaucaccccuugcagcuucggcggagugucugugaucaccccuggcaccaacaccagcaaucagguggcagugcuguaccagggcgugaacuguaccgaagugcccguggccauucacgccgaucagcugacaccuacauggcggguguacuccaccggcagcaauguguuucagaccagagccggcugucugaucggagccgagcacgugaacaauagcuacgagugcgacauccccaucggcgcuggaaucugcgccagcuaccagacacagacaaacagcccucggagagccagaagcguggccagccagagcaucauugccuacacaaugucucugggcgccgagaacagcguggccuacuccaacaacucuaucgcuauccccaccaacuucaccaucagcgugaccacagagauccugccuguguccaugaccaagaccagcguggacugcaccauguacaucugcggcgauuccaccgagugcuccaaccugcugcugcaguacggcagcuucugcacccagcugaauagagcccugacagggaucgccguggaacaggacaagaacacccaagagguguucgcccaagugaagcagaucuacaagaccccuccuaucaaggacuucggcggcuucaauuucagccagauucugcccgauccuagcaagcccagcaagcggagcuucaucgaggaccugcuguucaacaaagugacacuggccgacgccggcuucaucaagcaguauggcgauugucugggcgacauugccgccagggaucugauuugcgcccagaaguuuaacggacugacagugcugccuccucugcugaccgaugagaugaucgcccaguacacaucugcccugcuggccggcacaaucacaagcggcuggacauuuggagcaggcgccgcucugcagauccccuuugcuaugcagauggccuaccgguucaacggcaucggagugacccagaaugugcuguacgagaaccagaagcugaucgccaaccaguucaacagcgccaucggcaagauccaggacagccugagcagcacagcaagcgcccugggaaagcugcaggacguggucaaccagaaugcccaggcacugaacacccuggucaagcagcuguccuccaacuucggcgccaucagcucugugcugaacgauauccugagcagacuggacaaggucgaggccgaggugcagaucgacagacugaucacaggcagacugcagagccuccagacauacgugacccagcagcugaucagagccgccgagauuagagccucugccaaucuggccgccaccaagaugucugagugugugcugggccagagcaagagaguggacuuuugcggcaagggcuaccaccugaugagcuucccucagucugccccucacggcgugguguuucugcacgugacauaugugcccgcucaagagaagaauuucaccaccgcuccagccaucugccacgacggcaaagcccacuuuccuagagaaggcguguucguguccaacggcacccauugguucgugacacagcggaacuucuacgagccccagaucaucaccaccgacaacaccuucgugucuggcaacugcgacgucgugaucggcauugugaacaauaccguguacgacccucugcagcccgagcuggacagcuucaaagaggaacuggacaaguacuuuaagaaccacacaagccccgacguggaccugggcgauaucagcggaaucaaugccagcgucgugaacauccagaaagagaucgaccggcugaacgagguggccaagaaucugaacgagagccugaucgaccugcaagaacuggggaaguacgagcaguacaucaaguggcccugguacaucuggcugggcuuuaucgccggacugauugccaucgugauggucacaaucaugcuguguugcaugaccagcugcuguagcugccugaagggcuguuguagcuguggcagcugcugcaaguucgacgaggacgauucugagcccgugcugaagggcgugaaacugcacuacacaugaugacucgagcugguacugcaugcacgcaaugcuagcugccccuuucccguccuggguaccccgagucucccccgaccucgggucccagguaugcucccaccuccaccugccccacucaccaccucugcuaguuccagacaccucccaagcacgcagcaaugcagcucaaaacgcuuagccuagccacacccccacgggaaacagcagugauuaaccuuuagcaauaaacgaaaguuuaacuaagcuauacuaaccccaggguuggucaauuucgugccagccacacccuggagcuagcaaaaaaaaaaaaaaaaaaaaaaaaaaaaaaaaaaaaaaaaaaaaaaaaaaaaaaaaaaaaaaaaaaaaaaaaaaaaaaaaaaaaaaaaaaaaaaaaaaaa

SEQ ID NO: 26373 - RNA, 4264 nt, Artificial Sequence
  SARS-CoV-2/Wuhan/WIV05/2019__EPI_ISL_402128 spike protein mRNA gc mod (1-1273)(L18F_D80A_D215G_L242del_A243del_L244del_R246I_K417N_E484 K_N501Y_D614G_A701V)
agaauaaacuaguauucuucugguccccacagacucagagagaacccgccaccauguucguguuccuggugcugcugccucugguguccagccagugugugaacuucaccaccagaacacagcugccuccagccuacaccaacagcuuuaccagaggcguguacuaccccgacaagguguucagauccagcgugcugcacucuacccaggaccuguuccugccuuucuucagcaacgugaccugguuccacgccauccacguguccggcaccaauggcaccaagagauucgccaaccccgugcugcccuucaacgacgggguguacuuugccagcaccgagaaguccaacaucaucagaggcuggaucuucggcaccacacuggacagcaagacccagagccugcugaucgugaacaacgccaccaacguggucaucaaagugugcgaguuccaguucugcaacgaccccuuccugggcgucuacuaccacaagaacaacaagagcuggauggaaagcgaguuccggguguacagcagcgccaacaacugcaccuucgaguacgugucccagccuuuccugauggaccuggaaggcaagcagggcaacuucaagaaccugcgcgaguucguguuuaagaacaucgacggcuacuucaagaucuacagcaagcacaccccuaucaaccucgugcggggccugccucagggcuucucugcucuggaaccccugguggaucugcccaucggcaucaacaucacccgguuucagacacugcacaucagcuaccugacaccuggcgauagcagcagcggauggacagcuggugccgccgcuuacuaugugggcuaccugcagccuagaaccuuccugcugaaguacaacgagaacggcaccaucaccgacgccguggauugugcucuggauccucugagcgagacaaagugcacccugaaguccuucaccguggaaaagggcaucuaccagaccagcaacuuccgggugcagcccaccgaauccaucgugcgguuccccaauaucaccaaucugugccccuucggcgagguguucaaugccaccagauucgccucuguguacgccuggaaccggaagcggaucagcaauugcguggccgacuacuccgugcuguacaacuccgccagcuucagcaccuucaagugcuacggcguguccccuaccaagcugaacgaccugugcuucacaaacguguacgccgacagcuucgugauccggggagaugaagugcggcagauugccccuggacagacaggcaacaucgccgacuacaacuacaagcugcccgacgacuucaccggcugugugauugccuggaacagcaacaaccuggacuccaaagucggcggcaacuacaauuaccuguaccggcuguuccggaaguccaaucugaagcccuucgagcgggacaucuccaccgagaucuaucaggccggcagcaccccuuguaacggcgugaagggcuucaacugcuacuucccacugcaguccuacggcuuucagcccacauacggcgugggcuaucagcccuacagagugguggugcugagcuucgaacugcugcaugccccugccacagugugcggcccuaagaaaagcaccaaucucgugaagaacaaaugcgugaacuucaacuucaacggccugaccggcaccggcgugcugacagagagcaacaagaaguuccugccauuccagcaguuuggccgggauaucgccgauaccacagacgccguuagagauccccagacacuggaaauccuggacaucaccccuugcagcuucggcggagugucugugaucaccccuggcaccaacaccagcaaucagguggcagugcuguaccagggcgugaacuguaccgaagugcccguggccauucacgccgaucagcugacaccuacauggcggguguacuccaccggcagcaauguguuucagaccagagccggcugucugaucggagccgagcacgugaacaauagcuacgagugcgacauccccaucggcgcuggaaucugcgccagcuaccagacacagacaaacagcccucggagagccagaagcguggccagccagagcaucauugccuacacaaugucucugggcguggagaacagcguggccuacuccaacaacucuaucgcuauccccaccaacuucaccaucagcgugaccacagagauccugccuguguccaugaccaagaccagcguggacugcaccauguacaucugcggcgauuccaccgagugcuccaaccugcugcugcaguacggcagcuucugcacccagcugaauagagcccugacagggaucgccguggaacaggacaagaacacccaagagguguucgcccaagugaagcagaucuacaagaccccuccuaucaaggacuucggcggcuucaauuucagccagauucugcccgauccuagcaagcccagcaagcggagcuucaucgaggaccugcuguucaacaaagugacacuggccgacgccggcuucaucaagcaguauggcgauugucugggcgacauugccgccagggaucugauuugcgcccagaaguuuaacggacugacagugcugccuccucugcugaccgaugagaugaucgcccaguacacaucugcccugcuggccggcacaaucacaagcggcuggacauuuggagcaggcgccgcucugcagauccccuuugcuaugcagauggccuaccgguucaacggcaucggagugacccagaaugugcuguacgagaaccagaagcugaucgccaaccaguucaacagcgccaucggcaagauccaggacagccugagcagcacagcaagcgcccugggaaagcugcaggacguggucaaccagaaugcccaggcacugaacacccuggucaagcagcuguccuccaacuucggcgccaucagcucugugcugaacgauauccugagcagacuggacaaggucgaggccgaggugcagaucgacagacugaucacaggcagacugcagagccuccagacauacgugacccagcagcugaucagagccgccgagauuagagccucugccaaucuggccgccaccaagaugucugagugugugcugggccagagcaagagaguggacuuuugcggcaagggcuaccaccugaugagcuucccucagucugccccucacggcgugguguuucugcacgugacauaugugcccgcucaagagaagaauuucaccaccgcuccagccaucugccacgacggcaaagcccacuuuccuagagaaggcguguucguguccaacggcacccauugguucgugacacagcggaacuucuacgagccccagaucaucaccaccgacaacaccuucgugucuggcaacugcgacgucgugaucggcauugugaacaauaccguguacgacccucugcagcccgagcuggacagcuucaaagaggaacuggacaaguacuuuaagaaccacacaagccccgacguggaccugggcgauaucagcggaaucaaugccagcgucgugaacauccagaaagagaucgaccggcugaacgagguggccaagaaucugaacgagagccugaucgaccugcaagaacuggggaaguacgagcaguacaucaaguggcccugguacaucuggcugggcuuuaucgccggacugauugccaucgugauggucacaaucaugcuguguugcaugaccagcugcuguagcugccugaagggcuguuguagcuguggcagcugcugcaaguucgacgaggacgauucugagcccgugcugaagggcgugaaacugcacuacacaugaugacucgagcugguacugcaugcacgcaaugcuagcugccccuuucccguccuggguaccccgagucucccccgaccucgggucccagguaugcucccaccuccaccugccccacucaccaccucugcuaguuccagacaccucccaagcacgcagcaaugcagcucaaaacgcuuagccuagccacacccccacgggaaacagcagugauuaaccuuuagcaauaaacgaaaguuuaacuaagcuauacuaaccccaggguuggucaauuucgugccagccacacccuggagcuagcaaaaaaaaaaaaaaaaaaaaaaaaaaaaaaaaaaaaaaaaaaaaaaaaaaaaaaaaaaaaaaaaaaaaaaaaaaaaaaaaaaaaaaaaaaaaaaaaaaaa

SEQ ID NO: 26374 - RNA, 4273 nt, Artificial Sequence
  SARS-CoV-2/Wuhan/WIV05/2019__EPI_ISL_402128 spike protein mRNA gc mod (1-1273)(E484K_D614G)
agaauaaacuaguauucuucugguccccacagacucagagagaacccgccaccauguucguguuccuggugcugcugccucugguguccagccagugugugaaccugaccaccagaacacagcugccuccagccuacaccaacagcuuuaccagaggcguguacuaccccgacaagguguucagauccagcgugcugcacucuacccaggaccuguuccugccuuucuucagcaacgugaccugguuccacgccauccacguguccggcaccaauggcaccaagagauucgacaaccccgugcugcccuucaacgacgggguguacuuugccagcaccgagaaguccaacaucaucagaggcuggaucuucggcaccacacuggacagcaagacccagagccugcugaucgugaacaacgccaccaacguggucaucaaagugugcgaguuccaguucugcaacgaccccuuccugggcgucuacuaccacaagaacaacaagagcuggauggaaagcgaguuccggguguacagcagcgccaacaacugcaccuucgaguacgugucccagccuuuccugauggaccuggaaggcaagcagggcaacuucaagaaccugcgcgaguucguguuuaagaacaucgacggcuacuucaagaucuacagcaagcacaccccuaucaaccucgugcgggaucugccucagggcuucucugcucuggaaccccugguggaucugcccaucggcaucaacaucacccgguuucagacacugcuggcccugcacagaagcuaccugacaccuggcgauagcagcagcggauggacagcuggugccgccgcuuacuaugugggcuaccugcagccuagaaccuuccugcugaaguacaacgagaacggcaccaucaccgacgccguggauugugcucuggauccucugagcgagacaaagugcacccugaaguccuucaccguggaaaagggcaucuaccagaccagcaacuuccgggugcagcccaccgaauccaucgugcgguuccccaauaucaccaaucugugccccuucggcgagguguucaaugccaccagauucgccucuguguacgccuggaaccggaagcggaucagcaauugcguggccgacuacuccgugcuguacaacuccgccagcuucagcaccuucaagugcuacggcguguccccuaccaagcugaacgaccugugcuucacaaacguguacgccgacagcuucgugauccggggagaugaagugcggcagauugccccuggacagacaggcaagaucgccgacuacaacuacaagcugcccgacgacuucaccggcugugugauugccuggaacagcaacaaccuggacuccaaagucggcggcaacuacaauuaccuguaccggcuguuccggaaguccaaucugaagcccuucgagcgggacaucuccaccgagaucuaucaggccggcagcaccccuuguaacggcgugaagggcuucaacugcuacuucccacugcaguccuacggcuuucagcccacaaauggcgugggcuaucagcccuacagagugguggugcugagcuucgaacugcugcaugccccugccacagugugcggcccuaagaaaagcaccaaucucgugaagaacaaaugcgugaacuucaacuucaacggccugaccggcaccggcgugcugacagagagcaacaagaaguuccugccauuccagcaguuuggccgggauaucgccgauaccacagacgccguuagagauccccagacacuggaaauccuggacaucaccccuugcagcuucggcggagugucugugaucaccccuggcaccaacaccagcaaucagguggcagugcuguaccagggcgugaacuguaccgaagugcccguggccauucacgccgaucagcugacaccuacauggcggguguacuccaccggcagcaauguguuucagaccagagccggcugucugaucggagccgagcacgugaacaauagcuacgagugcgacauccccaucggcgcuggaaucugcgccagcuaccagacacagacaaacagcccucggagagccagaagcguggccagccagagcaucauugccuacacaaugucucugggcgccgagaacagcguggccuacuccaacaacucuaucgcuauccccaccaacuucaccaucagcgugaccacagagauccugccuguguccaugaccaagaccagcguggacugcaccauguacaucugcggcgauuccaccgagugcuccaaccugcugcugcaguacggcagcuucugcacccagcugaauagagcccugacagggaucgccguggaacaggacaagaacacccaagagguguucgcccaagugaagcagaucuacaagaccccuccuaucaaggacuucggcggcuucaauuucagccagauucugcccgauccuagcaagcccagcaagcggagcuucaucgaggaccugcuguucaacaaagugacacuggccgacgccggcuucaucaagcaguauggcgauugucugggcgacauugccgccagggaucugauuugcgcccagaaguuuaacggacugacagugcugccuccucugcugaccgaugagaugaucgcccaguacacaucugcccugcuggccggcacaaucacaagcggcuggacauuuggagcaggcgccgcucugcagauccccuuugcuaugcagauggccuaccgguucaacggcaucggagugacccagaaugugcuguacgagaaccagaagcugaucgccaaccaguucaacagcgccaucggcaagauccaggacagccugagcagcacagcaagcgcccugggaaagcugcaggacguggucaaccagaaugcccaggcacugaacacccuggucaagcagcuguccuccaacuucggcgccaucagcucugugcugaacgauauccugagcagacuggacaaggucgaggccgaggugcagaucgacagacugaucacaggcagacugcagagccuccagacauacgugacccagcagcugaucagagccgccgagauuagagccucugccaaucuggccgccaccaagaugucugagugugugcugggccagagcaagagaguggacuuuugcggcaagggcuaccaccugaugagcuucccucagucugccccucacggcgugguguuucugcacgugacauaugugcccgcucaagagaagaauuucaccaccgcuccagccaucugccacgacggcaaagcccacuuuccuagagaaggcguguucguguccaacggcacccauugguucgugacacagcggaacuucuacgagccccagaucaucaccaccgacaacaccuucgugucuggcaacugcgacgucgugaucggcauugugaacaauaccguguacgacccucugcagcccgagcuggacagcuucaaagaggaacuggacaaguacuuuaagaaccacacaagccccgacguggaccugggcgauaucagcggaaucaaugccagcgucgugaacauccagaaagagaucgaccggcugaacgagguggccaagaaucugaacgagagccugaucgaccugcaagaacuggggaaguacgagcaguacaucaaguggcccugguacaucuggcugggcuuuaucgccggacugauugccaucgugauggucacaaucaugcuguguugcaugaccagcugcuguagcugccugaagggcuguuguagcuguggcagcugcugcaaguucgacgaggacgauucugagcccgugcugaagggcgugaaacugcacuacacaugaugacucgagcugguacugcaugcacgcaaugcuagcugccccuuucccguccuggguaccccgagucucccccgaccucgggucccagguaugcucccaccuccaccugccccacucaccaccucugcuaguuccagacaccucccaagcacgcagcaaugcagcucaaaacgcuuagccuagccacacccccacgggaaacagcagugauuaaccuuuagcaauaaacgaaaguuuaacuaagcuauacuaaccccaggguuggucaauuucgugccagccacacccuggagcuagcaaaaaaaaaaaaaaaaaaaaaaaaaaaaaaaaaaaaaaaaaaaaaaaaaaaaaaaaaaaaaaaaaaaaaaaaaaaaaaaaaaaaaaaaaaaaaaaaaaaa

SEQ ID NO: 26375 - RNA, 4273 nt, Artificial Sequence
  SARS-CoV-2/Wuhan/WIV05/2019__EPI_ISL_402128 spike protein mRNA gc mod (1-1273)(L18F_T20N_P26S_D138Y_R190S_K417T_E484K_N501Y_D614G_H655Y _T1027I)
agaauaaacuaguauucuucugguccccacagacucagagagaacccgccaccauguucguguuccuggugcugcugccucugguguccagccagugugugaacuucaccaacagaacacagcugccuagcgccuacaccaacagcuuuaccagaggcguguacuaccccgacaagguguucagauccagcgugcugcacucuacccaggaccuguuccugccuuucuucagcaacgugaccugguuccacgccauccacguguccggcaccaauggcaccaagagauucgacaaccccgugcugcccuucaacgacgggguguacuuugccagcaccgagaaguccaacaucaucagaggcuggaucuucggcaccacacuggacagcaagacccagagccugcugaucgugaacaacgccaccaacguggucaucaaagugugcgaguuccaguucugcaacuaccccuuccugggcgucuacuaccacaagaacaacaagagcuggauggaaagcgaguuccggguguacagcagcgccaacaacugcaccuucgaguacgugucccagccuuuccugauggaccuggaaggcaagcagggcaacuucaagaaccugagcgaguucguguuuaagaacaucgacggcuacuucaagaucuacagcaagcacaccccuaucaaccucgugcgggaucugccucagggcuucucugcucuggaaccccugguggaucugcccaucggcaucaacaucacccgguuucagacacugcuggcccugcacagaagcuaccugacaccuggcgauagcagcagcggauggacagcuggugccgccgcuuacuaugugggcuaccugcagccuagaaccuuccugcugaaguacaacgagaacggcaccaucaccgacgccguggauugugcucuggauccucugagcgagacaaagugcacccugaaguccuucaccguggaaaagggcaucuaccagaccagcaacuuccgggugcagcccaccgaauccaucgugcgguuccccaauaucaccaaucugugccccuucggcgagguguucaaugccaccagauucgccucuguguacgccuggaaccggaagcggaucagcaauugcguggccgacuacuccgugcuguacaacuccgccagcuucagcaccuucaagugcuacggcguguccccuaccaagcugaacgaccugugcuucacaaacguguacgccgacagcuucgugauccggggagaugaagugcggcagauugccccuggacagacaggcaccaucgccgacuacaacuacaagcugcccgacgacuucaccggcugugugauugccuggaacagcaacaaccuggacuccaaagucggcggcaacuacaauuaccuguaccggcuguuccggaaguccaaucugaagcccuucgagcgggacaucuccaccgagaucuaucaggccggcagcaccccuuguaacggcgugaagggcuucaacugcuacuucccacugcaguccuacggcuuucagcccacauacggcgugggcuaucagcccuacagagugguggugcugagcuucgaacugcugcaugccccugccacagugugcggcccuaagaaaagcaccaaucucgugaagaacaaaugcgugaacuucaacuucaacggccugaccggcaccggcgugcugacagagagcaacaagaaguuccugccauuccagcaguuuggccgggauaucgccgauaccacagacgccguuagagauccccagacacuggaaauccuggacaucaccccuugcagcuucggcggagugucugugaucaccccuggcaccaacaccagcaaucagguggcagugcuguaccagggcgugaacuguaccgaagugcccguggccauucacgccgaucagcugacaccuacauggcggguguacuccaccggcagcaauguguuucagaccagagccggcugucugaucggagccgaguacgugaacaauagcuacgagugcgacauccccaucggcgcuggaaucugcgccagcuaccagacacagacaaacagcccucggagagccagaagcguggccagccagagcaucauugccuacacaaugucucugggcgccgagaacagcguggccuacuccaacaacucuaucgcuauccccaccaacuucaccaucagcgugaccacagagauccugccuguguccaugaccaagaccagcguggacugcaccauguacaucugcggcgauuccaccgagugcuccaaccugcugcugcaguacggcagcuucugcacccagcugaauagagcccugacagggaucgccguggaacaggacaagaacacccaagagguguucgcccaagugaagcagaucuacaagaccccuccuaucaaggacuucggcggcuucaauuucagccagauucugcccgauccuagcaagcccagcaagcggagcuucaucgaggaccugcuguucaacaaagugacacuggccgacgccggcuucaucaagcaguauggcgauugucugggcgacauugccgccagggaucugauuugcgcccagaaguuuaacggacugacagugcugccuccucugcugaccgaugagaugaucgcccaguacacaucugcccugcuggccggcacaaucacaagcggcuggacauuuggagcaggcgccgcucugcagauccccuuugcuaugcagauggccuaccgguucaacggcaucggagugacccagaaugugcuguacgagaaccagaagcugaucgccaaccaguucaacagcgccaucggcaagauccaggacagccugagcagcacagcaagcgcccugggaaagcugcaggacguggucaaccagaaugcccaggcacugaacacccuggucaagcagcuguccuccaacuucggcgccaucagcucugugcugaacgauauccugagcagacuggacaaggucgaggccgaggugcagaucgacagacugaucacaggcagacugcagagccuccagacauacgugacccagcagcugaucagagccgccgagauuagagccucugccaaucuggccgccaucaagaugucugagugugugcugggccagagcaagagaguggacuuuugcggcaagggcuaccaccugaugagcuucccucagucugccccucacggcgugguguuucugcacgugacauaugugcccgcucaagagaagaauuucaccaccgcuccagccaucugccacgacggcaaagcccacuuuccuagagaaggcguguucguguccaacggcacccauugguucgugacacagcggaacuucuacgagccccagaucaucaccaccgacaacaccuucgugucuggcaacugcgacgucgugaucggcauugugaacaauaccguguacgacccucugcagcccgagcuggacagcuucaaagaggaacuggacaaguacuuuaagaaccacacaagccccgacguggaccugggcgauaucagcggaaucaaugccagcgucgugaacauccagaaagagaucgaccggcugaacgagguggccaagaaucugaacgagagccugaucgaccugcaagaacuggggaaguacgagcaguacaucaaguggcccugguacaucuggcugggcuuuaucgccggacugauugccaucgugauggucacaaucaugcuguguugcaugaccagcugcuguagcugccugaagggcuguuguagcuguggcagcugcugcaaguucgacgaggacgauucugagcccgugcugaagggcgugaaacugcacuacacaugaugacucgagcugguacugcaugcacgcaaugcuagcugccccuuucccguccuggguaccccgagucucccccgaccucgggucccagguaugcucccaccuccaccugccccacucaccaccucugcuaguuccagacaccucccaagcacgcagcaaugcagcucaaaacgcuuagccuagccacacccccacgggaaacagcagugauuaaccuuuagcaauaaacgaaaguuuaacuaagcuauacuaaccccaggguuggucaauuucgugccagccacacccuggagcuagcaaaaaaaaaaaaaaaaaaaaaaaaaaaaaaaaaaaaaaaaaaaaaaaaaaaaaaaaaaaaaaaaaaaaaaaaaaaaaaaaaaaaaaaaaaaaaaaaaaaa

SEQ ID NO: 26376 - RNA, 4273 nt, Artificial Sequence
  SARS-CoV-2/Wuhan/WIV05/2019__EPI_ISL_402128 spike protein mRNA gc mod (1-1273)(S13I_W152C_L452R_D614G)
agaauaaacuaguauucuucugguccccacagacucagagagaacccgccaccauguucguguuccuggugcugcugccucugguguccauccagugugugaaccugaccaccagaacacagcugccuccagccuacaccaacagcuuuaccagaggcguguacuaccccgacaagguguucagauccagcgugcugcacucuacccaggaccuguuccugccuuucuucagcaacgugaccugguuccacgccauccacguguccggcaccaauggcaccaagagauucgacaaccccgugcugcccuucaacgacgggguguacuuugccagcaccgagaaguccaacaucaucagaggcuggaucuucggcaccacacuggacagcaagacccagagccugcugaucgugaacaacgccaccaacguggucaucaaagugugcgaguuccaguucugcaacgaccccuuccugggcgucuacuaccacaagaacaacaagagcugcauggaaagcgaguuccggguguacagcagcgccaacaacugcaccuucgaguacgugucccagccuuuccugauggaccuggaaggcaagcagggcaacuucaagaaccugcgcgaguucguguuuaagaacaucgacggcuacuucaagaucuacagcaagcacaccccuaucaaccucgugcgggaucugccucagggcuucucugcucuggaaccccugguggaucugcccaucggcaucaacaucacccgguuucagacacugcuggcccugcacagaagcuaccugacaccuggcgauagcagcagcggauggacagcuggugccgccgcuuacuaugugggcuaccugcagccuagaaccuuccugcugaaguacaacgagaacggcaccaucaccgacgccguggauugugcucuggauccucugagcgagacaaagugcacccugaaguccuucaccguggaaaagggcaucuaccagaccagcaacuuccgggugcagcccaccgaauccaucgugcgguuccccaauaucaccaaucugugccccuucggcgagguguucaaugccaccagauucgccucuguguacgccuggaaccggaagcggaucagcaauugcguggccgacuacuccgugcuguacaacuccgccagcuucagcaccuucaagugcuacggcguguccccuaccaagcugaacgaccugugcuucacaaacguguacgccgacagcuucgugauccggggagaugaagugcggcagauugccccuggacagacaggcaagaucgccgacuacaacuacaagcugcccgacgacuucaccggcugugugauugccuggaacagcaacaaccuggacuccaaagucggcggcaacuacaauuaccgcuaccggcuguuccggaaguccaaucugaagcccuucgagcgggacaucuccaccgagaucuaucaggccggcagcaccccuuguaacggcguggaaggcuucaacugcuacuucccacugcaguccuacggcuuucagcccacaaauggcgugggcuaucagcccuacagagugguggugcugagcuucgaacugcugcaugccccugccacagugugcggcccuaagaaaagcaccaaucucgugaagaacaaaugcgugaacuucaacuucaacggccugaccggcaccggcgugcugacagagagcaacaagaaguuccugccauuccagcaguuuggccgggauaucgccgauaccacagacgccguuagagauccccagacacuggaaauccuggacaucaccccuugcagcuucggcggagugucugugaucaccccuggcaccaacaccagcaaucagguggcagugcuguaccagggcgugaacuguaccgaagugcccguggccauucacgccgaucagcugacaccuacauggcggguguacuccaccggcagcaauguguuucagaccagagccggcugucugaucggagccgagcacgugaacaauagcuacgagugcgacauccccaucggcgcuggaaucugcgccagcuaccagacacagacaaacagcccucggagagccagaagcguggccagccagagcaucauugccuacacaaugucucugggcgccgagaacagcguggccuacuccaacaacucuaucgcuauccccaccaacuucaccaucagcgugaccacagagauccugccuguguccaugaccaagaccagcguggacugcaccauguacaucugcggcgauuccaccgagugcuccaaccugcugcugcaguacggcagcuucugcacccagcugaauagagcccugacagggaucgccguggaacaggacaagaacacccaagagguguucgcccaagugaagcagaucuacaagaccccuccuaucaaggacuucggcggcuucaauuucagccagauucugcccgauccuagcaagcccagcaagcggagcuucaucgaggaccugcuguucaacaaagugacacuggccgacgccggcuucaucaagcaguauggcgauugucugggcgacauugccgccagggaucugauuugcgcccagaaguuuaacggacugacagugcugccuccucugcugaccgaugagaugaucgcccaguacacaucugcccugcuggccggcacaaucacaagcggcuggacauuuggagcaggcgccgcucugcagauccccuuugcuaugcagauggccuaccgguucaacggcaucggagugacccagaaugugcuguacgagaaccagaagcugaucgccaaccaguucaacagcgccaucggcaagauccaggacagccugagcagcacagcaagcgcccugggaaagcugcaggacguggucaaccagaaugcccaggcacugaacacccuggucaagcagcuguccuccaacuucggcgccaucagcucugugcugaacgauauccugagcagacuggacaaggucgaggccgaggugcagaucgacagacugaucacaggcagacugcagagccuccagacauacgugacccagcagcugaucagagccgccgagauuagagccucugccaaucuggccgccaccaagaugucugagugugugcugggccagagcaagagaguggacuuuugcggcaagggcuaccaccugaugagcuucccucagucugccccucacggcgugguguuucugcacgugacauaugugcccgcucaagagaagaauuucaccaccgcuccagccaucugccacgacggcaaagcccacuuuccuagagaaggcguguucguguccaacggcacccauugguucgugacacagcggaacuucuacgagccccagaucaucaccaccgacaacaccuucgugucuggcaacugcgacgucgugaucggcauugugaacaauaccguguacgacccucugcagcccgagcuggacagcuucaaagaggaacuggacaaguacuuuaagaaccacacaagccccgacguggaccugggcgauaucagcggaaucaaugccagcgucgugaacauccagaaagagaucgaccggcugaacgagguggccaagaaucugaacgagagccugaucgaccugcaagaacuggggaaguacgagcaguacaucaaguggcccugguacaucuggcugggcuuuaucgccggacugauugccaucgugauggucacaaucaugcuguguugcaugaccagcugcuguagcugccugaagggcuguuguagcuguggcagcugcugcaaguucgacgaggacgauucugagcccgugcugaagggcgugaaacugcacuacacaugaugacucgagcugguacugcaugcacgcaaugcuagcugccccuuucccguccuggguaccccgagucucccccgaccucgggucccagguaugcucccaccuccaccugccccacucaccaccucugcuaguuccagacaccucccaagcacgcagcaaugcagcucaaaacgcuuagccuagccacacccccacgggaaacagcagugauuaaccuuuagcaauaaacgaaaguuuaacuaagcuauacuaaccccaggguuggucaauuucgugccagccacacccuggagcuagcaaaaaaaaaaaaaaaaaaaaaaaaaaaaaaaaaaaaaaaaaaaaaaaaaaaaaaaaaaaaaaaaaaaaaaaaaaaaaaaaaaaaaaaaaaaaaaaaaaaa

SEQ ID NO: 26377 - RNA, 4273 nt, Artificial Sequence
  SARS-CoV-2/Wuhan/WIV05/2019__EPI_ISL_402128 spike protein mRNA gc (1-1273)(K986P_V987P)
agaauaaacuaguauucuucugguccccacagacucagagagaacccgccaccauguucguguuccugguccuccugccccuggugagcucccagugcgugaaccucaccacccgcacgcagcugccgcccgccuacaccaacagcuucacccggggcgucuacuaccccgacaagguguuccgcuccagcgugcugcacuccacccaggaccucuuccugcccuucuucagcaacgucacgugguuccacgccauccacguguccgggaccaacggcaccaagcgguucgacaacccggugcugcccuucaacgacggggucuacuucgcgagcaccgagaaguccaacaucauccgcggcuggaucuucgggacgacccucgacagcaagacccagucccugcugaucgugaacaacgccaccaacguggucaucaaggugugcgaguuccaguucugcaacgaccccuuccucggcguguacuaccacaagaacaacaagagcuggauggaguccgaguuccgggucuacagcuccgccaacaacugcacguucgaguacgugagccagcccuuccugauggaccuggagggcaagcaggggaacuucaagaaccuccgcgaguucguguucaagaacaucgacggcuacuucaagaucuacuccaagcacaccccgaucaaccugguccgggaccugccccagggguucagcgcccucgagccccugguggaccugcccaucggcaucaacaucacccgcuuccagacccuccuggcccugcaccgguccuaccucacgccgggggacagcagcuccggcuggaccgcgggcgccgccgccuacuacgugggguaccugcagccccgcaccuuccugcucaaguacaacgagaacggcaccaucacggacgcggucgacugcgcccuggacccccugagcgagaccaagugcacccucaaguccuucaccguggagaaggggaucuaccagacgagcaacuuccgggugcagcccaccgaguccaucguccgcuucccgaacaucaccaaccugugccccuucggcgagguguucaacgccacccgguucgccagcgucuacgccuggaaccgcaagcggaucuccaacugcguggcggacuacagcgugcuguacaacuccgccagcuucuccacguucaagugcuacggcgucagccccaccaagcucaacgaccugugcuucaccaacguguacgccgacuccuucgugauccgcggggacgagguccggcagaucgcccccggccagaccgggaagaucgccgacuacaacuacaagcugccggacgacuucacgggcugcgugaucgcguggaacagcaacaaccucgacuccaaggucgggggcaacuacaacuaccuguaccgccuguuccgcaagagcaaccucaagcccuucgagcgggacaucuccaccgagaucuaccaggccggcagcacccccugcaacgggguggagggcuucaacugcuacuucccccugcaguccuacggguuccagccgaccaacggcgugggguaccagcccuaccggguggucgugcugagcuucgagcuccugcacgcccccgccacggugugcggccccaagaaguccaccaaccuggucaagaacaagugcgugaacuucaacuucaacggccucaccgggaccggcgugcugaccgagagcaacaagaaguuccugccguuccagcaguucgggcgcgacaucgccgacacgaccgacgcgguccgcgacccccagacccuggagauccucgacaucacccccugcagcuucggcgggguguccgugaucacgccgggcaccaacaccagcaaccaggucgccgugcuguaccaggacgugaacugcaccgagguccccguggccauccacgccgaccagcugacgcccaccuggcggguguacuccaccggcagcaacgucuuccagacccgcgccgggugccucaucggcgcggagcacgugaacaacuccuacgagugcgacauccccaucggggccggcaucugcgccagcuaccagacgcagaccaacuccccgcggcgcgcccggagcguggcgucccagagcaucaucgccuacaccaugucccugggcgccgagaacagcgucgccuacuccaacaacagcaucgccauccccaccaacuucacgaucuccgugaccaccgagauccugcccgugagcaugaccaagacgagcgucgacugcaccauguacaucugcggggacuccaccgagugcagcaaccuccugcugcaguacggcuccuucugcacccagcucaaccgcgcgcugacggggaucgccguggagcaggacaagaacacccaggagguguucgcccaggucaagcagaucuacaagacgcccccgaucaaggacuucggcggguucaacuucagccagauccugcccgaccccuccaagcccagcaagcgguccuucaucgaggaccuccuguucaacaaggugacccuggccgacgccggcuucaucaagcaguacggcgacugccucggggacaucgcggcccgcgaccugaucugcgcccagaaguucaacggccugaccgugcucccgccccugcugaccgacgagaugaucgcccaguacaccagcgcccuccuggcggggaccaucacguccggcuggaccuucggggccggcgccgcccugcagauccccuucgcgaugcagauggccuaccgguucaacggcaucggggucacccagaacgugcucuacgagaaccagaagcugaucgccaaccaguucaacagcgccaucggcaagauccaggacucccugagcuccaccgccagcgcgcucgggaagcugcaggacguggucaaccagaacgcccaggcccugaacacgcucgugaagcagcuguccagcaacuucggcgccaucuccagcgugcugaacgacauccucucccgccuggacccgcccgaggccgaggugcagaucgaccggcugaucaccgggcgccuccagagccugcagaccuacgugacccagcagcugauccgggcggccgagauccgcgccagcgccaaccucgccgcgaccaagauguccgagugcguccugggccagagcaagcggguggacuucugcggcaagggguaccaccugauguccuucccccagagcgccccgcacggcguggucuuccuccacgugacguacguccccgcccaggagaagaacuucaccaccgcccccgcgaucugccacgacgggaaggcccacuucccccgcgagggcguguucguguccaacgggacccacugguucgucacgcagcggaacuucuacgagccgcagaucaucaccaccgacaacaccuucgugagcggcaacugcgacguggucaucggcaucgugaacaacacgguguacgacccccugcagcccgagcuggacuccuucaaggaggagcucgacaaguacuucaagaaccacaccagccccgacgucgaccugggggacaucuccggcaucaacgccagcguggugaacauccagaaggagaucgaccgccugaacgaggucgccaagaaccucaacgagucccugaucgaccugcaggagcucgggaaguacgagcaguacaucaaguggccgugguacaucuggcugggcuucaucgccggccugaucgcgaucgugauggugaccaucaugcucugcugcaugaccagcugcugcuccugccugaaggggugcugcagcugcggcuccugcugcaaguucgacgaggacgacagcgagcccguccugaagggggugaagcuccacuacacgugaugacucgagcugguacugcaugcacgcaaugcuagcugccccuuucccguccuggguaccccgagucucccccgaccucgggucccagguaugcucccaccuccaccugccccacucaccaccucugcuaguuccagacaccucccaagcacgcagcaaugcagcucaaaacgcuuagccuagccacacccccacgggaaacagcagugauuaaccuuuagcaauaaacgaaaguuuaacuaagcuauacuaaccccaggguuggucaauuucgugccagccacacccuggagcuagcaaaaaaaaaaaaaaaaaaaaaaaaaaaaaaaaaaaaaaaaaaaaaaaaaaaaaaaaaaaaaaaaaaaaaaaaaaaaaaaaaaaaaaaaaaaaaaaaaaaa

SEQ ID NO: 26378 - RNA, 4273 nt, Artificial Sequence
  SARS-CoV-2/Wuhan/WIV05/2019__EPI_ISL_402128 spike protein mRNA gc (1-1273)(K986P_V987P_ D614G)
agaauaaacuaguauucuucugguccccacagacucagagagaacccgccaccauguucguguuccugguccuccugccccuggugagcucccagugcgugaaccucaccacccgcacgcagcugccgcccgccuacaccaacagcuucacccggggcgucuacuaccccgacaagguguuccgcuccagcgugcugcacuccacccaggaccucuuccugcccuucuucagcaacgucacgugguuccacgccauccacguguccgggaccaacggcaccaagcgguucgacaacccggugcugcccuucaacgacggggucuacuucgcgagcaccgagaaguccaacaucauccgcggcuggaucuucgggacgacccucgacagcaagacccagucccugcugaucgugaacaacgccaccaacguggucaucaaggugugcgaguuccaguucugcaacgaccccuuccucggcguguacuaccacaagaacaacaagagcuggauggaguccgaguuccgggucuacagcuccgccaacaacugcacguucgaguacgugagccagcccuuccugauggaccuggagggcaagcaggggaacuucaagaaccuccgcgaguucguguucaagaacaucgacggcuacuucaagaucuacuccaagcacaccccgaucaaccugguccgggaccugccccagggguucagcgcccucgagccccugguggaccugcccaucggcaucaacaucacccgcuuccagacccuccuggcccugcaccgguccuaccucacgccgggggacagcagcuccggcuggaccgcgggcgccgccgccuacuacgugggguaccugcagccccgcaccuuccugcucaaguacaacgagaacggcaccaucacggacgcggucgacugcgcccuggacccccugagcgagaccaagugcacccucaaguccuucaccguggagaaggggaucuaccagacgagcaacuuccgggugcagcccaccgaguccaucguccgcuucccgaacaucaccaaccugugccccuucggcgagguguucaacgccacccgguucgccagcgucuacgccuggaaccgcaagcggaucuccaacugcguggcggacuacagcgugcuguacaacuccgccagcuucuccacguucaagugcuacggcgucagccccaccaagcucaacgaccugugcuucaccaacguguacgccgacuccuucgugauccgcggggacgagguccggcagaucgcccccggccagaccgggaagaucgccgacuacaacuacaagcugccggacgacuucacgggcugcgugaucgcguggaacagcaacaaccucgacuccaaggucgggggcaacuacaacuaccuguaccgccuguuccgcaagagcaaccucaagcccuucgagcgggacaucuccaccgagaucuaccaggccggcagcacccccugcaacgggguggagggcuucaacugcuacuucccccugcaguccuacggguuccagccgaccaacggcgugggguaccagcccuaccggguggucgugcugagcuucgagcuccugcacgcccccgccacggugugcggccccaagaaguccaccaaccuggucaagaacaagugcgugaacuucaacuucaacggccucaccgggaccggcgugcugaccgagagcaacaagaaguuccugccguuccagcaguucgggcgcgacaucgccgacacgaccgacgcgguccgcgacccccagacccuggagauccucgacaucacccccugcagcuucggcgggguguccgugaucacgccgggcaccaacaccagcaaccaggucgccgugcuguaccagggcgugaacugcaccgagguccccguggccauccacgccgaccagcugacgcccaccuggcggguguacuccaccggcagcaacgucuuccagacccgcgccgggugccucaucggcgcggagcacgugaacaacuccuacgagugcgacauccccaucggggccggcaucugcgccagcuaccagacgcagaccaacuccccgcggcgcgcccggagcguggcgucccagagcaucaucgccuacaccaugucccugggcgccgagaacagcgucgccuacuccaacaacagcaucgccauccccaccaacuucacgaucuccgugaccaccgagauccugcccgugagcaugaccaagacgagcgucgacugcaccauguacaucugcggggacuccaccgagugcagcaaccuccugcugcaguacggcuccuucugcacccagcucaaccgcgcgcugacggggaucgccguggagcaggacaagaacacccaggagguguucgcccaggucaagcagaucuacaagacgcccccgaucaaggacuucggcggguucaacuucagccagauccugcccgaccccuccaagcccagcaagcgguccuucaucgaggaccuccuguucaacaaggugacccuggccgacgccggcuucaucaagcaguacggcgacugccucggggacaucgcggcccgcgaccugaucugcgcccagaaguucaacggccugaccgugcucccgccccugcugaccgacgagaugaucgcccaguacaccagcgcccuccuggcggggaccaucacguccggcuggaccuucggggccggcgccgcccugcagauccccuucgcgaugcagauggccuaccgguucaacggcaucggggucacccagaacgugcucuacgagaaccagaagcugaucgccaaccaguucaacagcgccaucggcaagauccaggacucccugagcuccaccgccagcgcgcucgggaagcugcaggacguggucaaccagaacgcccaggcccugaacacgcucgugaagcagcuguccagcaacuucggcgccaucuccagcgugcugaacgacauccucucccgccuggacccgcccgaggccgaggugcagaucgaccggcugaucaccgggcgccuccagagccugcagaccuacgugacccagcagcugauccgggcggccgagauccgcgccagcgccaaccucgccgcgaccaagauguccgagugcguccugggccagagcaagcggguggacuucugcggcaagggguaccaccugauguccuucccccagagcgccccgcacggcguggucuuccuccacgugacguacguccccgcccaggagaagaacuucaccaccgcccccgcgaucugccacgacgggaaggcccacuucccccgcgagggcguguucguguccaacgggacccacugguucgucacgcagcggaacuucuacgagccgcagaucaucaccaccgacaacaccuucgugagcggcaacugcgacguggucaucggcaucgugaacaacacgguguacgacccccugcagcccgagcuggacuccuucaaggaggagcucgacaaguacuucaagaaccacaccagccccgacgucgaccugggggacaucuccggcaucaacgccagcguggugaacauccagaaggagaucgaccgccugaacgaggucgccaagaaccucaacgagucccugaucgaccugcaggagcucgggaaguacgagcaguacaucaaguggccgugguacaucuggcugggcuucaucgccggccugaucgcgaucgugauggugaccaucaugcucugcugcaugaccagcugcugcuccugccugaaggggugcugcagcugcggcuccugcugcaaguucgacgaggacgacagcgagcccguccugaagggggugaagcuccacuacacgugaugacucgagcugguacugcaugcacgcaaugcuagcugccccuuucccguccuggguaccccgagucucccccgaccucgggucccagguaugcucccaccuccaccugccccacucaccaccucugcuaguuccagacaccucccaagcacgcagcaaugcagcucaaaacgcuuagccuagccacacccccacgggaaacagcagugauuaaccuuuagcaauaaacgaaaguuuaacuaagcuauacuaaccccaggguuggucaauuucgugccagccacacccuggagcuagcaaaaaaaaaaaaaaaaaaaaaaaaaaaaaaaaaaaaaaaaaaaaaaaaaaaaaaaaaaaaaaaaaaaaaaaaaaaaaaaaaaaaaaaaaaaaaaaaaaaa

SEQ ID NO: 26379 - RNA, 4273 nt, Artificial Sequence
  SARS-CoV-2/Wuhan/WIV05/2019__EPI_ISL_402128 spike protein mRNA gc (1-1273)(K986P_V987P_A222V_D614G)
agaauaaacuaguauucuucugguccccacagacucagagagaacccgccaccauguucguguuccugguccuccugccccuggugagcucccagugcgugaaccucaccacccgcacgcagcugccgcccgccuacaccaacagcuucacccggggcgucuacuaccccgacaagguguuccgcuccagcgugcugcacuccacccaggaccucuuccugcccuucuucagcaacgucacgugguuccacgccauccacguguccgggaccaacggcaccaagcgguucgacaacccggugcugcccuucaacgacggggucuacuucgcgagcaccgagaaguccaacaucauccgcggcuggaucuucgggacgacccucgacagcaagacccagucccugcugaucgugaacaacgccaccaacguggucaucaaggugugcgaguuccaguucugcaacgaccccuuccucggcguguacuaccacaagaacaacaagagcuggauggaguccgaguuccgggucuacagcuccgccaacaacugcacguucgaguacgugagccagcccuuccugauggaccuggagggcaagcaggggaacuucaagaaccuccgcgaguucguguucaagaacaucgacggcuacuucaagaucuacuccaagcacaccccgaucaaccugguccgggaccugccccagggguucagcguccucgagccccugguggaccugcccaucggcaucaacaucacccgcuuccagacccuccuggcccugcaccgguccuaccucacgccgggggacagcagcuccggcuggaccgcgggcgccgccgccuacuacgugggguaccugcagccccgcaccuuccugcucaaguacaacgagaacggcaccaucacggacgcggucgacugcgcccuggacccccugagcgagaccaagugcacccucaaguccuucaccguggagaaggggaucuaccagacgagcaacuuccgggugcagcccaccgaguccaucguccgcuucccgaacaucaccaaccugugccccuucggcgagguguucaacgccacccgguucgccagcgucuacgccuggaaccgcaagcggaucuccaacugcguggcggacuacagcgugcuguacaacuccgccagcuucuccacguucaagugcuacggcgucagccccaccaagcucaacgaccugugcuucaccaacguguacgccgacuccuucgugauccgcggggacgagguccggcagaucgcccccggccagaccgggaagaucgccgacuacaacuacaagcugccggacgacuucacgggcugcgugaucgcguggaacagcaacaaccucgacuccaaggucgggggcaacuacaacuaccuguaccgccuguuccgcaagagcaaccucaagcccuucgagcgggacaucuccaccgagaucuaccaggccggcagcacccccugcaacgggguggagggcuucaacugcuacuucccccugcaguccuacggguuccagccgaccaacggcgugggguaccagcccuaccggguggucgugcugagcuucgagcuccugcacgcccccgccacggugugcggccccaagaaguccaccaaccuggucaagaacaagugcgugaacuucaacuucaacggccucaccgggaccggcgugcugaccgagagcaacaagaaguuccugccguuccagcaguucgggcgcgacaucgccgacacgaccgacgcgguccgcgacccccagacccuggagauccucgacaucacccccugcagcuucggcgggguguccgugaucacgccgggcaccaacaccagcaaccaggucgccgugcuguaccagggcgugaacugcaccgagguccccguggccauccacgccgaccagcugacgcccaccuggcggguguacuccaccggcagcaacgucuuccagacccgcgccgggugccucaucggcgcggagcacgugaacaacuccuacgagugcgacauccccaucggggccggcaucugcgccagcuaccagacgcagaccaacuccccgcggcgcgcccggagcguggcgucccagagcaucaucgccuacaccaugucccugggcgccgagaacagcgucgccuacuccaacaacagcaucgccauccccaccaacuucacgaucuccgugaccaccgagauccugcccgugagcaugaccaagacgagcgucgacugcaccauguacaucugcggggacuccaccgagugcagcaaccuccugcugcaguacggcuccuucugcacccagcucaaccgcgcgcugacggggaucgccguggagcaggacaagaacacccaggagguguucgcccaggucaagcagaucuacaagacgcccccgaucaaggacuucggcggguucaacuucagccagauccugcccgaccccuccaagcccagcaagcgguccuucaucgaggaccuccuguucaacaaggugacccuggccgacgccggcuucaucaagcaguacggcgacugccucggggacaucgcggcccgcgaccugaucugcgcccagaaguucaacggccugaccgugcucccgccccugcugaccgacgagaugaucgcccaguacaccagcgcccuccuggcggggaccaucacguccggcuggaccuucggggccggcgccgcccugcagauccccuucgcgaugcagauggccuaccgguucaacggcaucggggucacccagaacgugcucuacgagaaccagaagcugaucgccaaccaguucaacagcgccaucggcaagauccaggacucccugagcuccaccgccagcgcgcucgggaagcugcaggacguggucaaccagaacgcccaggcccugaacacgcucgugaagcagcuguccagcaacuucggcgccaucuccagcgugcugaacgacauccucucccgccuggacccgcccgaggccgaggugcagaucgaccggcugaucaccgggcgccuccagagccugcagaccuacgugacccagcagcugauccgggcggccgagauccgcgccagcgccaaccucgccgcgaccaagauguccgagugcguccugggccagagcaagcggguggacuucugcggcaagggguaccaccugauguccuucccccagagcgccccgcacggcguggucuuccuccacgugacguacguccccgcccaggagaagaacuucaccaccgcccccgcgaucugccacgacgggaaggcccacuucccccgcgagggcguguucguguccaacgggacccacugguucgucacgcagcggaacuucuacgagccgcagaucaucaccaccgacaacaccuucgugagcggcaacugcgacguggucaucggcaucgugaacaacacgguguacgacccccugcagcccgagcuggacuccuucaaggaggagcucgacaaguacuucaagaaccacaccagccccgacgucgaccugggggacaucuccggcaucaacgccagcguggugaacauccagaaggagaucgaccgccugaacgaggucgccaagaaccucaacgagucccugaucgaccugcaggagcucgggaaguacgagcaguacaucaaguggccgugguacaucuggcugggcuucaucgccggccugaucgcgaucgugauggugaccaucaugcucugcugcaugaccagcugcugcuccugccugaaggggugcugcagcugcggcuccugcugcaaguucgacgaggacgacagcgagcccguccugaagggggugaagcuccacuacacgugaugacucgagcugguacugcaugcacgcaaugcuagcugccccuuucccguccuggguaccccgagucucccccgaccucgggucccagguaugcucccaccuccaccugccccacucaccaccucugcuaguuccagacaccucccaagcacgcagcaaugcagcucaaaacgcuuagccuagccacacccccacgggaaacagcagugauuaaccuuuagcaauaaacgaaaguuuaacuaagcuauacuaaccccaggguuggucaauuucgugccagccacacccuggagcuagcaaaaaaaaaaaaaaaaaaaaaaaaaaaaaaaaaaaaaaaaaaaaaaaaaaaaaaaaaaaaaaaaaaaaaaaaaaaaaaaaaaaaaaaaaaaaaaaaaaaa

SEQ ID NO: 26380 - RNA, 4273 nt, Artificial Sequence
  SARS-CoV-2/Wuhan/WIV05/2019__EPI_ISL_402128 spike protein mRNA gc (1-1273)(K986P_V987P_N439K_D614G)
agaauaaacuaguauucuucugguccccacagacucagagagaacccgccaccauguucguguuccugguccuccugccccuggugagcucccagugcgugaaccucaccacccgcacgcagcugccgcccgccuacaccaacagcuucacccggggcgucuacuaccccgacaagguguuccgcuccagcgugcugcacuccacccaggaccucuuccugcccuucuucagcaacgucacgugguuccacgccauccacguguccgggaccaacggcaccaagcgguucgacaacccggugcugcccuucaacgacggggucuacuucgcgagcaccgagaaguccaacaucauccgcggcuggaucuucgggacgacccucgacagcaagacccagucccugcugaucgugaacaacgccaccaacguggucaucaaggugugcgaguuccaguucugcaacgaccccuuccucggcguguacuaccacaagaacaacaagagcuggauggaguccgaguuccgggucuacagcuccgccaacaacugcacguucgaguacgugagccagcccuuccugauggaccuggagggcaagcaggggaacuucaagaaccuccgcgaguucguguucaagaacaucgacggcuacuucaagaucuacuccaagcacaccccgaucaaccugguccgggaccugccccagggguucagcgcccucgagccccugguggaccugcccaucggcaucaacaucacccgcuuccagacccuccuggcccugcaccgguccuaccucacgccgggggacagcagcuccggcuggaccgcgggcgccgccgccuacuacgugggguaccugcagccccgcaccuuccugcucaaguacaacgagaacggcaccaucacggacgcggucgacugcgcccuggacccccugagcgagaccaagugcacccucaaguccuucaccguggagaaggggaucuaccagacgagcaacuuccgggugcagcccaccgaguccaucguccgcuucccgaacaucaccaaccugugccccuucggcgagguguucaacgccacccgguucgccagcgucuacgccuggaaccgcaagcggaucuccaacugcguggcggacuacagcgugcuguacaacuccgccagcuucuccacguucaagugcuacggcgucagccccaccaagcucaacgaccugugcuucaccaacguguacgccgacuccuucgugauccgcggggacgagguccggcagaucgcccccggccagaccgggaagaucgccgacuacaacuacaagcugccggacgacuucacgggcugcgugaucgcguggaacagcaagaaccucgacuccaaggucgggggcaacuacaacuaccuguaccgccuguuccgcaagagcaaccucaagcccuucgagcgggacaucuccaccgagaucuaccaggccggcagcacccccugcaacgggguggagggcuucaacugcuacuucccccugcaguccuacggguuccagccgaccaacggcgugggguaccagcccuaccggguggucgugcugagcuucgagcuccugcacgcccccgccacggugugcggccccaagaaguccaccaaccuggucaagaacaagugcgugaacuucaacuucaacggccucaccgggaccggcgugcugaccgagagcaacaagaaguuccugccguuccagcaguucgggcgcgacaucgccgacacgaccgacgcgguccgcgacccccagacccuggagauccucgacaucacccccugcagcuucggcgggguguccgugaucacgccgggcaccaacaccagcaaccaggucgccgugcuguaccagggcgugaacugcaccgagguccccguggccauccacgccgaccagcugacgcccaccuggcggguguacuccaccggcagcaacgucuuccagacccgcgccgggugccucaucggcgcggagcacgugaacaacuccuacgagugcgacauccccaucggggccggcaucugcgccagcuaccagacgcagaccaacuccccgcggcgcgcccggagcguggcgucccagagcaucaucgccuacaccaugucccugggcgccgagaacagcgucgccuacuccaacaacagcaucgccauccccaccaacuucacgaucuccgugaccaccgagauccugcccgugagcaugaccaagacgagcgucgacugcaccauguacaucugcggggacuccaccgagugcagcaaccuccugcugcaguacggcuccuucugcacccagcucaaccgcgcgcugacggggaucgccguggagcaggacaagaacacccaggagguguucgcccaggucaagcagaucuacaagacgcccccgaucaaggacuucggcggguucaacuucagccagauccugcccgaccccuccaagcccagcaagcgguccuucaucgaggaccuccuguucaacaaggugacccuggccgacgccggcuucaucaagcaguacggcgacugccucggggacaucgcggcccgcgaccugaucugcgcccagaaguucaacggccugaccgugcucccgccccugcugaccgacgagaugaucgcccaguacaccagcgcccuccuggcggggaccaucacguccggcuggaccuucggggccggcgccgcccugcagauccccuucgcgaugcagauggccuaccgguucaacggcaucggggucacccagaacgugcucuacgagaaccagaagcugaucgccaaccaguucaacagcgccaucggcaagauccaggacucccugagcuccaccgccagcgcgcucgggaagcugcaggacguggucaaccagaacgcccaggcccugaacacgcucgugaagcagcuguccagcaacuucggcgccaucuccagcgugcugaacgacauccucucccgccuggacccgcccgaggccgaggugcagaucgaccggcugaucaccgggcgccuccagagccugcagaccuacgugacccagcagcugauccgggcggccgagauccgcgccagcgccaaccucgccgcgaccaagauguccgagugcguccugggccagagcaagcggguggacuucugcggcaagggguaccaccugauguccuucccccagagcgccccgcacggcguggucuuccuccacgugacguacguccccgcccaggagaagaacuucaccaccgcccccgcgaucugccacgacgggaaggcccacuucccccgcgagggcguguucguguccaacgggacccacugguucgucacgcagcggaacuucuacgagccgcagaucaucaccaccgacaacaccuucgugagcggcaacugcgacguggucaucggcaucgugaacaacacgguguacgacccccugcagcccgagcuggacuccuucaaggaggagcucgacaaguacuucaagaaccacaccagccccgacgucgaccugggggacaucuccggcaucaacgccagcguggugaacauccagaaggagaucgaccgccugaacgaggucgccaagaaccucaacgagucccugaucgaccugcaggagcucgggaaguacgagcaguacaucaaguggccgugguacaucuggcugggcuucaucgccggccugaucgcgaucgugauggugaccaucaugcucugcugcaugaccagcugcugcuccugccugaaggggugcugcagcugcggcuccugcugcaaguucgacgaggacgacagcgagcccguccugaagggggugaagcuccacuacacgugaugacucgagcugguacugcaugcacgcaaugcuagcugccccuuucccguccuggguaccccgagucucccccgaccucgggucccagguaugcucccaccuccaccugccccacucaccaccucugcuaguuccagacaccucccaagcacgcagcaaugcagcucaaaacgcuuagccuagccacacccccacgggaaacagcagugauuaaccuuuagcaauaaacgaaaguuuaacuaagcuauacuaaccccaggguuggucaauuucgugccagccacacccuggagcuagcaaaaaaaaaaaaaaaaaaaaaaaaaaaaaaaaaaaaaaaaaaaaaaaaaaaaaaaaaaaaaaaaaaaaaaaaaaaaaaaaaaaaaaaaaaaaaaaaaaaa

SEQ ID NO: 26381 - RNA, 4273 nt, Artificial Sequence
  SARS-CoV-2/Wuhan/WIV05/2019__EPI_ISL_402128 spike protein mRNA gc (1-1273)(K986P_V987P_S477N_D614G)
agaauaaacuaguauucuucugguccccacagacucagagagaacccgccaccauguucguguuccugguccuccugccccuggugagcucccagugcgugaaccucaccacccgcacgcagcugccgcccgccuacaccaacagcuucacccggggcgucuacuaccccgacaagguguuccgcuccagcgugcugcacuccacccaggaccucuuccugcccuucuucagcaacgucacgugguuccacgccauccacguguccgggaccaacggcaccaagcgguucgacaacccggugcugcccuucaacgacggggucuacuucgcgagcaccgagaaguccaacaucauccgcggcuggaucuucgggacgacccucgacagcaagacccagucccugcugaucgugaacaacgccaccaacguggucaucaaggugugcgaguuccaguucugcaacgaccccuuccucggcguguacuaccacaagaacaacaagagcuggauggaguccgaguuccgggucuacagcuccgccaacaacugcacguucgaguacgugagccagcccuuccugauggaccuggagggcaagcaggggaacuucaagaaccuccgcgaguucguguucaagaacaucgacggcuacuucaagaucuacuccaagcacaccccgaucaaccugguccgggaccugccccagggguucagcgcccucgagccccugguggaccugcccaucggcaucaacaucacccgcuuccagacccuccuggcccugcaccgguccuaccucacgccgggggacagcagcuccggcuggaccgcgggcgccgccgccuacuacgugggguaccugcagccccgcaccuuccugcucaaguacaacgagaacggcaccaucacggacgcggucgacugcgcccuggacccccugagcgagaccaagugcacccucaaguccuucaccguggagaaggggaucuaccagacgagcaacuuccgggugcagcccaccgaguccaucguccgcuucccgaacaucaccaaccugugccccuucggcgagguguucaacgccacccgguucgccagcgucuacgccuggaaccgcaagcggaucuccaacugcguggcggacuacagcgugcuguacaacuccgccagcuucuccacguucaagugcuacggcgucagccccaccaagcucaacgaccugugcuucaccaacguguacgccgacuccuucgugauccgcggggacgagguccggcagaucgcccccggccagaccgggaagaucgccgacuacaacuacaagcugccggacgacuucacgggcugcgugaucgcguggaacagcaacaaccucgacuccaaggucgggggcaacuacaacuaccuguaccgccuguuccgcaagagcaaccucaagcccuucgagcgggacaucuccaccgagaucuaccaggccggcaacacccccugcaacgggguggagggcuucaacugcuacuucccccugcaguccuacggguuccagccgaccaacggcgugggguaccagcccuaccggguggucgugcugagcuucgagcuccugcacgcccccgccacggugugcggccccaagaaguccaccaaccuggucaagaacaagugcgugaacuucaacuucaacggccucaccgggaccggcgugcugaccgagagcaacaagaaguuccugccguuccagcaguucgggcgcgacaucgccgacacgaccgacgcgguccgcgacccccagacccuggagauccucgacaucacccccugcagcuucggcgggguguccgugaucacgccgggcaccaacaccagcaaccaggucgccgugcuguaccagggcgugaacugcaccgagguccccguggccauccacgccgaccagcugacgcccaccuggcggguguacuccaccggcagcaacgucuuccagacccgcgccgggugccucaucggcgcggagcacgugaacaacuccuacgagugcgacauccccaucggggccggcaucugcgccagcuaccagacgcagaccaacuccccgcggcgcgcccggagcguggcgucccagagcaucaucgccuacaccaugucccugggcgccgagaacagcgucgccuacuccaacaacagcaucgccauccccaccaacuucacgaucuccgugaccaccgagauccugcccgugagcaugaccaagacgagcgucgacugcaccauguacaucugcggggacuccaccgagugcagcaaccuccugcugcaguacggcuccuucugcacccagcucaaccgcgcgcugacggggaucgccguggagcaggacaagaacacccaggagguguucgcccaggucaagcagaucuacaagacgcccccgaucaaggacuucggcggguucaacuucagccagauccugcccgaccccuccaagcccagcaagcgguccuucaucgaggaccuccuguucaacaaggugacccuggccgacgccggcuucaucaagcaguacggcgacugccucggggacaucgcggcccgcgaccugaucugcgcccagaaguucaacggccugaccgugcucccgccccugcugaccgacgagaugaucgcccaguacaccagcgcccuccuggcggggaccaucacguccggcuggaccuucggggccggcgccgcccugcagauccccuucgcgaugcagauggccuaccgguucaacggcaucggggucacccagaacgugcucuacgagaaccagaagcugaucgccaaccaguucaacagcgccaucggcaagauccaggacucccugagcuccaccgccagcgcgcucgggaagcugcaggacguggucaaccagaacgcccaggcccugaacacgcucgugaagcagcuguccagcaacuucggcgccaucuccagcgugcugaacgacauccucucccgccuggacccgcccgaggccgaggugcagaucgaccggcugaucaccgggcgccuccagagccugcagaccuacgugacccagcagcugauccgggcggccgagauccgcgccagcgccaaccucgccgcgaccaagauguccgagugcguccugggccagagcaagcggguggacuucugcggcaagggguaccaccugauguccuucccccagagcgccccgcacggcguggucuuccuccacgugacguacguccccgcccaggagaagaacuucaccaccgcccccgcgaucugccacgacgggaaggcccacuucccccgcgagggcguguucguguccaacgggacccacugguucgucacgcagcggaacuucuacgagccgcagaucaucaccaccgacaacaccuucgugagcggcaacugcgacguggucaucggcaucgugaacaacacgguguacgacccccugcagcccgagcuggacuccuucaaggaggagcucgacaaguacuucaagaaccacaccagccccgacgucgaccugggggacaucuccggcaucaacgccagcguggugaacauccagaaggagaucgaccgccugaacgaggucgccaagaaccucaacgagucccugaucgaccugcaggagcucgggaaguacgagcaguacaucaaguggccgugguacaucuggcugggcuucaucgccggccugaucgcgaucgugauggugaccaucaugcucugcugcaugaccagcugcugcuccugccugaaggggugcugcagcugcggcuccugcugcaaguucgacgaggacgacagcgagcccguccugaagggggugaagcuccacuacacgugaugacucgagcugguacugcaugcacgcaaugcuagcugccccuuucccguccuggguaccccgagucucccccgaccucgggucccagguaugcucccaccuccaccugccccacucaccaccucugcuaguuccagacaccucccaagcacgcagcaaugcagcucaaaacgcuuagccuagccacacccccacgggaaacagcagugauuaaccuuuagcaauaaacgaaaguuuaacuaagcuauacuaaccccaggguuggucaauuucgugccagccacacccuggagcuagcaaaaaaaaaaaaaaaaaaaaaaaaaaaaaaaaaaaaaaaaaaaaaaaaaaaaaaaaaaaaaaaaaaaaaaaaaaaaaaaaaaaaaaaaaaaaaaaaaaaa

SEQ ID NO: 26382 - RNA, 4273 nt, Artificial Sequence
  SARS-CoV-2/Wuhan/WIV05/2019__EPI_ISL_402128 spike protein mRNA gc (1-1273)(K986P_V987P_N501Y_D614G)
agaauaaacuaguauucuucugguccccacagacucagagagaacccgccaccauguucguguuccugguccuccugccccuggugagcucccagugcgugaaccucaccacccgcacgcagcugccgcccgccuacaccaacagcuucacccggggcgucuacuaccccgacaagguguuccgcuccagcgugcugcacuccacccaggaccucuuccugcccuucuucagcaacgucacgugguuccacgccauccacguguccgggaccaacggcaccaagcgguucgacaacccggugcugcccuucaacgacggggucuacuucgcgagcaccgagaaguccaacaucauccgcggcuggaucuucgggacgacccucgacagcaagacccagucccugcugaucgugaacaacgccaccaacguggucaucaaggugugcgaguuccaguucugcaacgaccccuuccucggcguguacuaccacaagaacaacaagagcuggauggaguccgaguuccgggucuacagcuccgccaacaacugcacguucgaguacgugagccagcccuuccugauggaccuggagggcaagcaggggaacuucaagaaccuccgcgaguucguguucaagaacaucgacggcuacuucaagaucuacuccaagcacaccccgaucaaccugguccgggaccugccccagggguucagcgcccucgagccccugguggaccugcccaucggcaucaacaucacccgcuuccagacccuccuggcccugcaccgguccuaccucacgccgggggacagcagcuccggcuggaccgcgggcgccgccgccuacuacgugggguaccugcagccccgcaccuuccugcucaaguacaacgagaacggcaccaucacggacgcggucgacugcgcccuggacccccugagcgagaccaagugcacccucaaguccuucaccguggagaaggggaucuaccagacgagcaacuuccgggugcagcccaccgaguccaucguccgcuucccgaacaucaccaaccugugccccuucggcgagguguucaacgccacccgguucgccagcgucuacgccuggaaccgcaagcggaucuccaacugcguggcggacuacagcgugcuguacaacuccgccagcuucuccacguucaagugcuacggcgucagccccaccaagcucaacgaccugugcuucaccaacguguacgccgacuccuucgugauccgcggggacgagguccggcagaucgcccccggccagaccgggaagaucgccgacuacaacuacaagcugccggacgacuucacgggcugcgugaucgcguggaacagcaacaaccucgacuccaaggucgggggcaacuacaacuaccuguaccgccuguuccgcaagagcaaccucaagcccuucgagcgggacaucuccaccgagaucuaccaggccggcagcacccccugcaacgggguggagggcuucaacugcuacuucccccugcaguccuacggguuccagccgaccuacggcgugggguaccagcccuaccggguggucgugcugagcuucgagcuccugcacgcccccgccacggugugcggccccaagaaguccaccaaccuggucaagaacaagugcgugaacuucaacuucaacggccucaccgggaccggcgugcugaccgagagcaacaagaaguuccugccguuccagcaguucgggcgcgacaucgccgacacgaccgacgcgguccgcgacccccagacccuggagauccucgacaucacccccugcagcuucggcgggguguccgugaucacgccgggcaccaacaccagcaaccaggucgccgugcuguaccagggcgugaacugcaccgagguccccguggccauccacgccgaccagcugacgcccaccuggcggguguacuccaccggcagcaacgucuuccagacccgcgccgggugccucaucggcgcggagcacgugaacaacuccuacgagugcgacauccccaucggggccggcaucugcgccagcuaccagacgcagaccaacuccccgcggcgcgcccggagcguggcgucccagagcaucaucgccuacaccaugucccugggcgccgagaacagcgucgccuacuccaacaacagcaucgccauccccaccaacuucacgaucuccgugaccaccgagauccugcccgugagcaugaccaagacgagcgucgacugcaccauguacaucugcggggacuccaccgagugcagcaaccuccugcugcaguacggcuccuucugcacccagcucaaccgcgcgcugacggggaucgccguggagcaggacaagaacacccaggagguguucgcccaggucaagcagaucuacaagacgcccccgaucaaggacuucggcggguucaacuucagccagauccugcccgaccccuccaagcccagcaagcgguccuucaucgaggaccuccuguucaacaaggugacccuggccgacgccggcuucaucaagcaguacggcgacugccucggggacaucgcggcccgcgaccugaucugcgcccagaaguucaacggccugaccgugcucccgccccugcugaccgacgagaugaucgcccaguacaccagcgcccuccuggcggggaccaucacguccggcuggaccuucggggccggcgccgcccugcagauccccuucgcgaugcagauggccuaccgguucaacggcaucggggucacccagaacgugcucuacgagaaccagaagcugaucgccaaccaguucaacagcgccaucggcaagauccaggacucccugagcuccaccgccagcgcgcucgggaagcugcaggacguggucaaccagaacgcccaggcccugaacacgcucgugaagcagcuguccagcaacuucggcgccaucuccagcgugcugaacgacauccucucccgccuggacccgcccgaggccgaggugcagaucgaccggcugaucaccgggcgccuccagagccugcagaccuacgugacccagcagcugauccgggcggccgagauccgcgccagcgccaaccucgccgcgaccaagauguccgagugcguccugggccagagcaagcggguggacuucugcggcaagggguaccaccugauguccuucccccagagcgccccgcacggcguggucuuccuccacgugacguacguccccgcccaggagaagaacuucaccaccgcccccgcgaucugccacgacgggaaggcccacuucccccgcgagggcguguucguguccaacgggacccacugguucgucacgcagcggaacuucuacgagccgcagaucaucaccaccgacaacaccuucgugagcggcaacugcgacguggucaucggcaucgugaacaacacgguguacgacccccugcagcccgagcuggacuccuucaaggaggagcucgacaaguacuucaagaaccacaccagccccgacgucgaccugggggacaucuccggcaucaacgccagcguggugaacauccagaaggagaucgaccgccugaacgaggucgccaagaaccucaacgagucccugaucgaccugcaggagcucgggaaguacgagcaguacaucaaguggccgugguacaucuggcugggcuucaucgccggccugaucgcgaucgugauggugaccaucaugcucugcugcaugaccagcugcugcuccugccugaaggggugcugcagcugcggcuccugcugcaaguucgacgaggacgacagcgagcccguccugaagggggugaagcuccacuacacgugaugacucgagcugguacugcaugcacgcaaugcuagcugccccuuucccguccuggguaccccgagucucccccgaccucgggucccagguaugcucccaccuccaccugccccacucaccaccucugcuaguuccagacaccucccaagcacgcagcaaugcagcucaaaacgcuuagccuagccacacccccacgggaaacagcagugauuaaccuuuagcaauaaacgaaaguuuaacuaagcuauacuaaccccaggguuggucaauuucgugccagccacacccuggagcuagcaaaaaaaaaaaaaaaaaaaaaaaaaaaaaaaaaaaaaaaaaaaaaaaaaaaaaaaaaaaaaaaaaaaaaaaaaaaaaaaaaaaaaaaaaaaaaaaaaaaa

SEQ ID NO: 26383 - RNA, 4267 nt, Artificial Sequence
  SARS-CoV-2/Wuhan/WIV05/2019__EPI_ISL_402128 spike protein mRNA gc (1-1273)(K986P_V987P_H69del_V70del_D614G)
agaauaaacuaguauucuucugguccccacagacucagagagaacccgccaccauguucguguuccugguccuccugccccuggugagcucccagugcgugaaccucaccacccgcacgcagcugccgcccgccuacaccaacagcuucacccggggcgucuacuaccccgacaagguguuccgcuccagcgugcugcacuccacccaggaccucuuccugcccuucuucagcaacgucacgugguuccacgccaucuccgggaccaacggcaccaagcgguucgacaacccggugcugcccuucaacgacggggucuacuucgcgagcaccgagaaguccaacaucauccgcggcuggaucuucgggacgacccucgacagcaagacccagucccugcugaucgugaacaacgccaccaacguggucaucaaggugugcgaguuccaguucugcaacgaccccuuccucggcguguacuaccacaagaacaacaagagcuggauggaguccgaguuccgggucuacagcuccgccaacaacugcacguucgaguacgugagccagcccuuccugauggaccuggagggcaagcaggggaacuucaagaaccuccgcgaguucguguucaagaacaucgacggcuacuucaagaucuacuccaagcacaccccgaucaaccugguccgggaccugccccagggguucagcgcccucgagccccugguggaccugcccaucggcaucaacaucacccgcuuccagacccuccuggcccugcaccgguccuaccucacgccgggggacagcagcuccggcuggaccgcgggcgccgccgccuacuacgugggguaccugcagccccgcaccuuccugcucaaguacaacgagaacggcaccaucacggacgcggucgacugcgcccuggacccccugagcgagaccaagugcacccucaaguccuucaccguggagaaggggaucuaccagacgagcaacuuccgggugcagcccaccgaguccaucguccgcuucccgaacaucaccaaccugugccccuucggcgagguguucaacgccacccgguucgccagcgucuacgccuggaaccgcaagcggaucuccaacugcguggcggacuacagcgugcuguacaacuccgccagcuucuccacguucaagugcuacggcgucagccccaccaagcucaacgaccugugcuucaccaacguguacgccgacuccuucgugauccgcggggacgagguccggcagaucgcccccggccagaccgggaagaucgccgacuacaacuacaagcugccggacgacuucacgggcugcgugaucgcguggaacagcaacaaccucgacuccaaggucgggggcaacuacaacuaccuguaccgccuguuccgcaagagcaaccucaagcccuucgagcgggacaucuccaccgagaucuaccaggccggcagcacccccugcaacgggguggagggcuucaacugcuacuucccccugcaguccuacggguuccagccgaccaacggcgugggguaccagcccuaccggguggucgugcugagcuucgagcuccugcacgcccccgccacggugugcggccccaagaaguccaccaaccuggucaagaacaagugcgugaacuucaacuucaacggccucaccgggaccggcgugcugaccgagagcaacaagaaguuccugccguuccagcaguucgggcgcgacaucgccgacacgaccgacgcgguccgcgacccccagacccuggagauccucgacaucacccccugcagcuucggcgggguguccgugaucacgccgggcaccaacaccagcaaccaggucgccgugcuguaccagggcgugaacugcaccgagguccccguggccauccacgccgaccagcugacgcccaccuggcggguguacuccaccggcagcaacgucuuccagacccgcgccgggugccucaucggcgcggagcacgugaacaacuccuacgagugcgacauccccaucggggccggcaucugcgccagcuaccagacgcagaccaacuccccgcggcgcgcccggagcguggcgucccagagcaucaucgccuacaccaugucccugggcgccgagaacagcgucgccuacuccaacaacagcaucgccauccccaccaacuucacgaucuccgugaccaccgagauccugcccgugagcaugaccaagacgagcgucgacugcaccauguacaucugcggggacuccaccgagugcagcaaccuccugcugcaguacggcuccuucugcacccagcucaaccgcgcgcugacggggaucgccguggagcaggacaagaacacccaggagguguucgcccaggucaagcagaucuacaagacgcccccgaucaaggacuucggcggguucaacuucagccagauccugcccgaccccuccaagcccagcaagcgguccuucaucgaggaccuccuguucaacaaggugacccuggccgacgccggcuucaucaagcaguacggcgacugccucggggacaucgcggcccgcgaccugaucugcgcccagaaguucaacggccugaccgugcucccgccccugcugaccgacgagaugaucgcccaguacaccagcgcccuccuggcggggaccaucacguccggcuggaccuucggggccggcgccgcccugcagauccccuucgcgaugcagauggccuaccgguucaacggcaucggggucacccagaacgugcucuacgagaaccagaagcugaucgccaaccaguucaacagcgccaucggcaagauccaggacucccugagcuccaccgccagcgcgcucgggaagcugcaggacguggucaaccagaacgcccaggcccugaacacgcucgugaagcagcuguccagcaacuucggcgccaucuccagcgugcugaacgacauccucucccgccuggacccgcccgaggccgaggugcagaucgaccggcugaucaccgggcgccuccagagccugcagaccuacgugacccagcagcugauccgggcggccgagauccgcgccagcgccaaccucgccgcgaccaagauguccgagugcguccugggccagagcaagcggguggacuucugcggcaagggguaccaccugauguccuucccccagagcgccccgcacggcguggucuuccuccacgugacguacguccccgcccaggagaagaacuucaccaccgcccccgcgaucugccacgacgggaaggcccacuucccccgcgagggcguguucguguccaacgggacccacugguucgucacgcagcggaacuucuacgagccgcagaucaucaccaccgacaacaccuucgugagcggcaacugcgacguggucaucggcaucgugaacaacacgguguacgacccccugcagcccgagcuggacuccuucaaggaggagcucgacaaguacuucaagaaccacaccagccccgacgucgaccugggggacaucuccggcaucaacgccagcguggugaacauccagaaggagaucgaccgccugaacgaggucgccaagaaccucaacgagucccugaucgaccugcaggagcucgggaaguacgagcaguacaucaaguggccgugguacaucuggcugggcuucaucgccggccugaucgcgaucgugauggugaccaucaugcucugcugcaugaccagcugcugcuccugccugaaggggugcugcagcugcggcuccugcugcaaguucgacgaggacgacagcgagcccguccugaagggggugaagcuccacuacacgugaugacucgagcugguacugcaugcacgcaaugcuagcugccccuuucccguccuggguaccccgagucucccccgaccucgggucccagguaugcucccaccuccaccugccccacucaccaccucugcuaguuccagacaccucccaagcacgcagcaaugcagcucaaaacgcuuagccuagccacacccccacgggaaacagcagugauuaaccuuuagcaauaaacgaaaguuuaacuaagcuauacuaaccccaggguuggucaauuucgugccagccacacccuggagcuagcaaaaaaaaaaaaaaaaaaaaaaaaaaaaaaaaaaaaaaaaaaaaaaaaaaaaaaaaaaaaaaaaaaaaaaaaaaaaaaaaaaaaaaaaaaaaaaaaaaaa

SEQ ID NO: 26384 - RNA, 4273 nt, Artificial Sequence
  SARS-CoV-2/Wuhan/WIV05/2019__EPI_ISL_402128 spike protein mRNA gc (1-1273)(K986P_V987P_Y453F_D614G)
agaauaaacuaguauucuucugguccccacagacucagagagaacccgccaccauguucguguuccugguccuccugccccuggugagcucccagugcgugaaccucaccacccgcacgcagcugccgcccgccuacaccaacagcuucacccggggcgucuacuaccccgacaagguguuccgcuccagcgugcugcacuccacccaggaccucuuccugcccuucuucagcaacgucacgugguuccacgccauccacguguccgggaccaacggcaccaagcgguucgacaacccggugcugcccuucaacgacggggucuacuucgcgagcaccgagaaguccaacaucauccgcggcuggaucuucgggacgacccucgacagcaagacccagucccugcugaucgugaacaacgccaccaacguggucaucaaggugugcgaguuccaguucugcaacgaccccuuccucggcguguacuaccacaagaacaacaagagcuggauggaguccgaguuccgggucuacagcuccgccaacaacugcacguucgaguacgugagccagcccuuccugauggaccuggagggcaagcaggggaacuucaagaaccuccgcgaguucguguucaagaacaucgacggcuacuucaagaucuacuccaagcacaccccgaucaaccugguccgggaccugccccagggguucagcgcccucgagccccugguggaccugcccaucggcaucaacaucacccgcuuccagacccuccuggcccugcaccgguccuaccucacgccgggggacagcagcuccggcuggaccgcgggcgccgccgccuacuacgugggguaccugcagccccgcaccuuccugcucaaguacaacgagaacggcaccaucacggacgcggucgacugcgcccuggacccccugagcgagaccaagugcacccucaaguccuucaccguggagaaggggaucuaccagacgagcaacuuccgggugcagcccaccgaguccaucguccgcuucccgaacaucaccaaccugugccccuucggcgagguguucaacgccacccgguucgccagcgucuacgccuggaaccgcaagcggaucuccaacugcguggcggacuacagcgugcuguacaacuccgccagcuucuccacguucaagugcuacggcgucagccccaccaagcucaacgaccugugcuucaccaacguguacgccgacuccuucgugauccgcggggacgagguccggcagaucgcccccggccagaccgggaagaucgccgacuacaacuacaagcugccggacgacuucacgggcugcgugaucgcguggaacagcaacaaccucgacuccaaggucgggggcaacuacaacuaccuguuccgccuguuccgcaagagcaaccucaagcccuucgagcgggacaucuccaccgagaucuaccaggccggcagcacccccugcaacgggguggagggcuucaacugcuacuucccccugcaguccuacggguuccagccgaccaacggcgugggguaccagcccuaccggguggucgugcugagcuucgagcuccugcacgcccccgccacggugugcggccccaagaaguccaccaaccuggucaagaacaagugcgugaacuucaacuucaacggccucaccgggaccggcgugcugaccgagagcaacaagaaguuccugccguuccagcaguucgggcgcgacaucgccgacacgaccgacgcgguccgcgacccccagacccuggagauccucgacaucacccccugcagcuucggcgggguguccgugaucacgccgggcaccaacaccagcaaccaggucgccgugcuguaccagggcgugaacugcaccgagguccccguggccauccacgccgaccagcugacgcccaccuggcggguguacuccaccggcagcaacgucuuccagacccgcgccgggugccucaucggcgcggagcacgugaacaacuccuacgagugcgacauccccaucggggccggcaucugcgccagcuaccagacgcagaccaacuccccgcggcgcgcccggagcguggcgucccagagcaucaucgccuacaccaugucccugggcgccgagaacagcgucgccuacuccaacaacagcaucgccauccccaccaacuucacgaucuccgugaccaccgagauccugcccgugagcaugaccaagacgagcgucgacugcaccauguacaucugcggggacuccaccgagugcagcaaccuccugcugcaguacggcuccuucugcacccagcucaaccgcgcgcugacggggaucgccguggagcaggacaagaacacccaggagguguucgcccaggucaagcagaucuacaagacgcccccgaucaaggacuucggcggguucaacuucagccagauccugcccgaccccuccaagcccagcaagcgguccuucaucgaggaccuccuguucaacaaggugacccuggccgacgccggcuucaucaagcaguacggcgacugccucggggacaucgcggcccgcgaccugaucugcgcccagaaguucaacggccugaccgugcucccgccccugcugaccgacgagaugaucgcccaguacaccagcgcccuccuggcggggaccaucacguccggcuggaccuucggggccggcgccgcccugcagauccccuucgcgaugcagauggccuaccgguucaacggcaucggggucacccagaacgugcucuacgagaaccagaagcugaucgccaaccaguucaacagcgccaucggcaagauccaggacucccugagcuccaccgccagcgcgcucgggaagcugcaggacguggucaaccagaacgcccaggcccugaacacgcucgugaagcagcuguccagcaacuucggcgccaucuccagcgugcugaacgacauccucucccgccuggacccgcccgaggccgaggugcagaucgaccggcugaucaccgggcgccuccagagccugcagaccuacgugacccagcagcugauccgggcggccgagauccgcgccagcgccaaccucgccgcgaccaagauguccgagugcguccugggccagagcaagcggguggacuucugcggcaagggguaccaccugauguccuucccccagagcgccccgcacggcguggucuuccuccacgugacguacguccccgcccaggagaagaacuucaccaccgcccccgcgaucugccacgacgggaaggcccacuucccccgcgagggcguguucguguccaacgggacccacugguucgucacgcagcggaacuucuacgagccgcagaucaucaccaccgacaacaccuucgugagcggcaacugcgacguggucaucggcaucgugaacaacacgguguacgacccccugcagcccgagcuggacuccuucaaggaggagcucgacaaguacuucaagaaccacaccagccccgacgucgaccugggggacaucuccggcaucaacgccagcguggugaacauccagaaggagaucgaccgccugaacgaggucgccaagaaccucaacgagucccugaucgaccugcaggagcucgggaaguacgagcaguacaucaaguggccgugguacaucuggcugggcuucaucgccggccugaucgcgaucgugauggugaccaucaugcucugcugcaugaccagcugcugcuccugccugaaggggugcugcagcugcggcuccugcugcaaguucgacgaggacgacagcgagcccguccugaagggggugaagcuccacuacacgugaugacucgagcugguacugcaugcacgcaaugcuagcugccccuuucccguccuggguaccccgagucucccccgaccucgggucccagguaugcucccaccuccaccugccccacucaccaccucugcuaguuccagacaccucccaagcacgcagcaaugcagcucaaaacgcuuagccuagccacacccccacgggaaacagcagugauuaaccuuuagcaauaaacgaaaguuuaacuaagcuauacuaaccccaggguuggucaauuucgugccagccacacccuggagcuagcaaaaaaaaaaaaaaaaaaaaaaaaaaaaaaaaaaaaaaaaaaaaaaaaaaaaaaaaaaaaaaaaaaaaaaaaaaaaaaaaaaaaaaaaaaaaaaaaaaaa

SEQ ID NO: 26385 - RNA, 4273 nt, Artificial Sequence
  SARS-CoV-2/Wuhan/WIV05/2019__EPI_ISL_402128 spike protein mRNA gc (1-1273)(K986P_V987P_D614G_I692V)
agaauaaacuaguauucuucugguccccacagacucagagagaacccgccaccauguucguguuccugguccuccugccccuggugagcucccagugcgugaaccucaccacccgcacgcagcugccgcccgccuacaccaacagcuucacccggggcgucuacuaccccgacaagguguuccgcuccagcgugcugcacuccacccaggaccucuuccugcccuucuucagcaacgucacgugguuccacgccauccacguguccgggaccaacggcaccaagcgguucgacaacccggugcugcccuucaacgacggggucuacuucgcgagcaccgagaaguccaacaucauccgcggcuggaucuucgggacgacccucgacagcaagacccagucccugcugaucgugaacaacgccaccaacguggucaucaaggugugcgaguuccaguucugcaacgaccccuuccucggcguguacuaccacaagaacaacaagagcuggauggaguccgaguuccgggucuacagcuccgccaacaacugcacguucgaguacgugagccagcccuuccugauggaccuggagggcaagcaggggaacuucaagaaccuccgcgaguucguguucaagaacaucgacggcuacuucaagaucuacuccaagcacaccccgaucaaccugguccgggaccugccccagggguucagcgcccucgagccccugguggaccugcccaucggcaucaacaucacccgcuuccagacccuccuggcccugcaccgguccuaccucacgccgggggacagcagcuccggcuggaccgcgggcgccgccgccuacuacgugggguaccugcagccccgcaccuuccugcucaaguacaacgagaacggcaccaucacggacgcggucgacugcgcccuggacccccugagcgagaccaagugcacccucaaguccuucaccguggagaaggggaucuaccagacgagcaacuuccgggugcagcccaccgaguccaucguccgcuucccgaacaucaccaaccugugccccuucggcgagguguucaacgccacccgguucgccagcgucuacgccuggaaccgcaagcggaucuccaacugcguggcggacuacagcgugcuguacaacuccgccagcuucuccacguucaagugcuacggcgucagccccaccaagcucaacgaccugugcuucaccaacguguacgccgacuccuucgugauccgcggggacgagguccggcagaucgcccccggccagaccgggaagaucgccgacuacaacuacaagcugccggacgacuucacgggcugcgugaucgcguggaacagcaacaaccucgacuccaaggucgggggcaacuacaacuaccuguaccgccuguuccgcaagagcaaccucaagcccuucgagcgggacaucuccaccgagaucuaccaggccggcagcacccccugcaacgggguggagggcuucaacugcuacuucccccugcaguccuacggguuccagccgaccaacggcgugggguaccagcccuaccggguggucgugcugagcuucgagcuccugcacgcccccgccacggugugcggccccaagaaguccaccaaccuggucaagaacaagugcgugaacuucaacuucaacggccucaccgggaccggcgugcugaccgagagcaacaagaaguuccugccguuccagcaguucgggcgcgacaucgccgacacgaccgacgcgguccgcgacccccagacccuggagauccucgacaucacccccugcagcuucggcgggguguccgugaucacgccgggcaccaacaccagcaaccaggucgccgugcuguaccagggcgugaacugcaccgagguccccguggccauccacgccgaccagcugacgcccaccuggcggguguacuccaccggcagcaacgucuuccagacccgcgccgggugccucaucggcgcggagcacgugaacaacuccuacgagugcgacauccccaucggggccggcaucugcgccagcuaccagacgcagaccaacuccccgcggcgcgcccggagcguggcgucccagagcgucaucgccuacaccaugucccugggcgccgagaacagcgucgccuacuccaacaacagcaucgccauccccaccaacuucacgaucuccgugaccaccgagauccugcccgugagcaugaccaagacgagcgucgacugcaccauguacaucugcggggacuccaccgagugcagcaaccuccugcugcaguacggcuccuucugcacccagcucaaccgcgcgcugacggggaucgccguggagcaggacaagaacacccaggagguguucgcccaggucaagcagaucuacaagacgcccccgaucaaggacuucggcggguucaacuucagccagauccugcccgaccccuccaagcccagcaagcgguccuucaucgaggaccuccuguucaacaaggugacccuggccgacgccggcuucaucaagcaguacggcgacugccucggggacaucgcggcccgcgaccugaucugcgcccagaaguucaacggccugaccgugcucccgccccugcugaccgacgagaugaucgcccaguacaccagcgcccuccuggcggggaccaucacguccggcuggaccuucggggccggcgccgcccugcagauccccuucgcgaugcagauggccuaccgguucaacggcaucggggucacccagaacgugcucuacgagaaccagaagcugaucgccaaccaguucaacagcgccaucggcaagauccaggacucccugagcuccaccgccagcgcgcucgggaagcugcaggacguggucaaccagaacgcccaggcccugaacacgcucgugaagcagcuguccagcaacuucggcgccaucuccagcgugcugaacgacauccucucccgccuggacccgcccgaggccgaggugcagaucgaccggcugaucaccgggcgccuccagagccugcagaccuacgugacccagcagcugauccgggcggccgagauccgcgccagcgccaaccucgccgcgaccaagauguccgagugcguccugggccagagcaagcggguggacuucugcggcaagggguaccaccugauguccuucccccagagcgccccgcacggcguggucuuccuccacgugacguacguccccgcccaggagaagaacuucaccaccgcccccgcgaucugccacgacgggaaggcccacuucccccgcgagggcguguucguguccaacgggacccacugguucgucacgcagcggaacuucuacgagccgcagaucaucaccaccgacaacaccuucgugagcggcaacugcgacguggucaucggcaucgugaacaacacgguguacgacccccugcagcccgagcuggacuccuucaaggaggagcucgacaaguacuucaagaaccacaccagccccgacgucgaccugggggacaucuccggcaucaacgccagcguggugaacauccagaaggagaucgaccgccugaacgaggucgccaagaaccucaacgagucccugaucgaccugcaggagcucgggaaguacgagcaguacaucaaguggccgugguacaucuggcugggcuucaucgccggccugaucgcgaucgugauggugaccaucaugcucugcugcaugaccagcugcugcuccugccugaaggggugcugcagcugcggcuccugcugcaaguucgacgaggacgacagcgagcccguccugaagggggugaagcuccacuacacgugaugacucgagcugguacugcaugcacgcaaugcuagcugccccuuucccguccuggguaccccgagucucccccgaccucgggucccagguaugcucccaccuccaccugccccacucaccaccucugcuaguuccagacaccucccaagcacgcagcaaugcagcucaaaacgcuuagccuagccacacccccacgggaaacagcagugauuaaccuuuagcaauaaacgaaaguuuaacuaagcuauacuaaccccaggguuggucaauuucgugccagccacacccuggagcuagcaaaaaaaaaaaaaaaaaaaaaaaaaaaaaaaaaaaaaaaaaaaaaaaaaaaaaaaaaaaaaaaaaaaaaaaaaaaaaaaaaaaaaaaaaaaaaaaaaaaa

SEQ ID NO: 26386 - RNA, 4273 nt, Artificial Sequence
  SARS-CoV-2/Wuhan/WIV05/2019__EPI_ISL_402128 spike protein mRNA gc (1-1273)(K986P_V987P_D614G_M1229I)
agaauaaacuaguauucuucugguccccacagacucagagagaacccgccaccauguucguguuccugguccuccugccccuggugagcucccagugcgugaaccucaccacccgcacgcagcugccgcccgccuacaccaacagcuucacccggggcgucuacuaccccgacaagguguuccgcuccagcgugcugcacuccacccaggaccucuuccugcccuucuucagcaacgucacgugguuccacgccauccacguguccgggaccaacggcaccaagcgguucgacaacccggugcugcccuucaacgacggggucuacuucgcgagcaccgagaaguccaacaucauccgcggcuggaucuucgggacgacccucgacagcaagacccagucccugcugaucgugaacaacgccaccaacguggucaucaaggugugcgaguuccaguucugcaacgaccccuuccucggcguguacuaccacaagaacaacaagagcuggauggaguccgaguuccgggucuacagcuccgccaacaacugcacguucgaguacgugagccagcccuuccugauggaccuggagggcaagcaggggaacuucaagaaccuccgcgaguucguguucaagaacaucgacggcuacuucaagaucuacuccaagcacaccccgaucaaccugguccgggaccugccccagggguucagcgcccucgagccccugguggaccugcccaucggcaucaacaucacccgcuuccagacccuccuggcccugcaccgguccuaccucacgccgggggacagcagcuccggcuggaccgcgggcgccgccgccuacuacgugggguaccugcagccccgcaccuuccugcucaaguacaacgagaacggcaccaucacggacgcggucgacugcgcccuggacccccugagcgagaccaagugcacccucaaguccuucaccguggagaaggggaucuaccagacgagcaacuuccgggugcagcccaccgaguccaucguccgcuucccgaacaucaccaaccugugccccuucggcgagguguucaacgccacccgguucgccagcgucuacgccuggaaccgcaagcggaucuccaacugcguggcggacuacagcgugcuguacaacuccgccagcuucuccacguucaagugcuacggcgucagccccaccaagcucaacgaccugugcuucaccaacguguacgccgacuccuucgugauccgcggggacgagguccggcagaucgcccccggccagaccgggaagaucgccgacuacaacuacaagcugccggacgacuucacgggcugcgugaucgcguggaacagcaacaaccucgacuccaaggucgggggcaacuacaacuaccuguaccgccuguuccgcaagagcaaccucaagcccuucgagcgggacaucuccaccgagaucuaccaggccggcagcacccccugcaacgggguggagggcuucaacugcuacuucccccugcaguccuacggguuccagccgaccaacggcgugggguaccagcccuaccggguggucgugcugagcuucgagcuccugcacgcccccgccacggugugcggccccaagaaguccaccaaccuggucaagaacaagugcgugaacuucaacuucaacggccucaccgggaccggcgugcugaccgagagcaacaagaaguuccugccguuccagcaguucgggcgcgacaucgccgacacgaccgacgcgguccgcgacccccagacccuggagauccucgacaucacccccugcagcuucggcgggguguccgugaucacgccgggcaccaacaccagcaaccaggucgccgugcuguaccagggcgugaacugcaccgagguccccguggccauccacgccgaccagcugacgcccaccuggcggguguacuccaccggcagcaacgucuuccagacccgcgccgggugccucaucggcgcggagcacgugaacaacuccuacgagugcgacauccccaucggggccggcaucugcgccagcuaccagacgcagaccaacuccccgcggcgcgcccggagcguggcgucccagagcaucaucgccuacaccaugucccugggcgccgagaacagcgucgccuacuccaacaacagcaucgccauccccaccaacuucacgaucuccgugaccaccgagauccugcccgugagcaugaccaagacgagcgucgacugcaccauguacaucugcggggacuccaccgagugcagcaaccuccugcugcaguacggcuccuucugcacccagcucaaccgcgcgcugacggggaucgccguggagcaggacaagaacacccaggagguguucgcccaggucaagcagaucuacaagacgcccccgaucaaggacuucggcggguucaacuucagccagauccugcccgaccccuccaagcccagcaagcgguccuucaucgaggaccuccuguucaacaaggugacccuggccgacgccggcuucaucaagcaguacggcgacugccucggggacaucgcggcccgcgaccugaucugcgcccagaaguucaacggccugaccgugcucccgccccugcugaccgacgagaugaucgcccaguacaccagcgcccuccuggcggggaccaucacguccggcuggaccuucggggccggcgccgcccugcagauccccuucgcgaugcagauggccuaccgguucaacggcaucggggucacccagaacgugcucuacgagaaccagaagcugaucgccaaccaguucaacagcgccaucggcaagauccaggacucccugagcuccaccgccagcgcgcucgggaagcugcaggacguggucaaccagaacgcccaggcccugaacacgcucgugaagcagcuguccagcaacuucggcgccaucuccagcgugcugaacgacauccucucccgccuggacccgcccgaggccgaggugcagaucgaccggcugaucaccgggcgccuccagagccugcagaccuacgugacccagcagcugauccgggcggccgagauccgcgccagcgccaaccucgccgcgaccaagauguccgagugcguccugggccagagcaagcggguggacuucugcggcaagggguaccaccugauguccuucccccagagcgccccgcacggcguggucuuccuccacgugacguacguccccgcccaggagaagaacuucaccaccgcccccgcgaucugccacgacgggaaggcccacuucccccgcgagggcguguucguguccaacgggacccacugguucgucacgcagcggaacuucuacgagccgcagaucaucaccaccgacaacaccuucgugagcggcaacugcgacguggucaucggcaucgugaacaacacgguguacgacccccugcagcccgagcuggacuccuucaaggaggagcucgacaaguacuucaagaaccacaccagccccgacgucgaccugggggacaucuccggcaucaacgccagcguggugaacauccagaaggagaucgaccgccugaacgaggucgccaagaaccucaacgagucccugaucgaccugcaggagcucgggaaguacgagcaguacaucaaguggccgugguacaucuggcugggcuucaucgccggccugaucgcgaucgugaucgugaccaucaugcucugcugcaugaccagcugcugcuccugccugaaggggugcugcagcugcggcuccugcugcaaguucgacgaggacgacagcgagcccguccugaagggggugaagcuccacuacacgugaugacucgagcugguacugcaugcacgcaaugcuagcugccccuuucccguccuggguaccccgagucucccccgaccucgggucccagguaugcucccaccuccaccugccccacucaccaccucugcuaguuccagacaccucccaagcacgcagcaaugcagcucaaaacgcuuagccuagccacacccccacgggaaacagcagugauuaaccuuuagcaauaaacgaaaguuuaacuaagcuauacuaaccccaggguuggucaauuucgugccagccacacccuggagcuagcaaaaaaaaaaaaaaaaaaaaaaaaaaaaaaaaaaaaaaaaaaaaaaaaaaaaaaaaaaaaaaaaaaaaaaaaaaaaaaaaaaaaaaaaaaaaaaaaaaaa

SEQ ID NO: 26387 - RNA, 4267 nt, Artificial Sequence
  SARS-CoV-2/Wuhan/WIV05/2019__EPI_ISL_402128 spike protein mRNA gc (1-1273)(K986P_V987P_H69del_V70del_A222V_Y453F_S477N_D614G_I692V)
agaauaaacuaguauucuucugguccccacagacucagagagaacccgccaccauguucguguuccugguccuccugccccuggugagcucccagugcgugaaccucaccacccgcacgcagcugccgcccgccuacaccaacagcuucacccggggcgucuacuaccccgacaagguguuccgcuccagcgugcugcacuccacccaggaccucuuccugcccuucuucagcaacgucacgugguuccacgccaucuccgggaccaacggcaccaagcgguucgacaacccggugcugcccuucaacgacggggucuacuucgcgagcaccgagaaguccaacaucauccgcggcuggaucuucgggacgacccucgacagcaagacccagucccugcugaucgugaacaacgccaccaacguggucaucaaggugugcgaguuccaguucugcaacgaccccuuccucggcguguacuaccacaagaacaacaagagcuggauggaguccgaguuccgggucuacagcuccgccaacaacugcacguucgaguacgugagccagcccuuccugauggaccuggagggcaagcaggggaacuucaagaaccuccgcgaguucguguucaagaacaucgacggcuacuucaagaucuacuccaagcacaccccgaucaaccugguccgggaccugccccagggguucagcguccucgagccccugguggaccugcccaucggcaucaacaucacccgcuuccagacccuccuggcccugcaccgguccuaccucacgccgggggacagcagcuccggcuggaccgcgggcgccgccgccuacuacgugggguaccugcagccccgcaccuuccugcucaaguacaacgagaacggcaccaucacggacgcggucgacugcgcccuggacccccugagcgagaccaagugcacccucaaguccuucaccguggagaaggggaucuaccagacgagcaacuuccgggugcagcccaccgaguccaucguccgcuucccgaacaucaccaaccugugccccuucggcgagguguucaacgccacccgguucgccagcgucuacgccuggaaccgcaagcggaucuccaacugcguggcggacuacagcgugcuguacaacuccgccagcuucuccacguucaagugcuacggcgucagccccaccaagcucaacgaccugugcuucaccaacguguacgccgacuccuucgugauccgcggggacgagguccggcagaucgcccccggccagaccgggaagaucgccgacuacaacuacaagcugccggacgacuucacgggcugcgugaucgcguggaacagcaacaaccucgacuccaaggucgggggcaacuacaacuaccuguuccgccuguuccgcaagagcaaccucaagcccuucgagcgggacaucuccaccgagaucuaccaggccggcaacacccccugcaacgggguggagggcuucaacugcuacuucccccugcaguccuacggguuccagccgaccaacggcgugggguaccagcccuaccggguggucgugcugagcuucgagcuccugcacgcccccgccacggugugcggccccaagaaguccaccaaccuggucaagaacaagugcgugaacuucaacuucaacggccucaccgggaccggcgugcugaccgagagcaacaagaaguuccugccguuccagcaguucgggcgcgacaucgccgacacgaccgacgcgguccgcgacccccagacccuggagauccucgacaucacccccugcagcuucggcgggguguccgugaucacgccgggcaccaacaccagcaaccaggucgccgugcuguaccagggcgugaacugcaccgagguccccguggccauccacgccgaccagcugacgcccaccuggcggguguacuccaccggcagcaacgucuuccagacccgcgccgggugccucaucggcgcggagcacgugaacaacuccuacgagugcgacauccccaucggggccggcaucugcgccagcuaccagacgcagaccaacuccccgcggcgcgcccggagcguggcgucccagagcgucaucgccuacaccaugucccugggcgccgagaacagcgucgccuacuccaacaacagcaucgccauccccaccaacuucacgaucuccgugaccaccgagauccugcccgugagcaugaccaagacgagcgucgacugcaccauguacaucugcggggacuccaccgagugcagcaaccuccugcugcaguacggcuccuucugcacccagcucaaccgcgcgcugacggggaucgccguggagcaggacaagaacacccaggagguguucgcccaggucaagcagaucuacaagacgcccccgaucaaggacuucggcggguucaacuucagccagauccugcccgaccccuccaagcccagcaagcgguccuucaucgaggaccuccuguucaacaaggugacccuggccgacgccggcuucaucaagcaguacggcgacugccucggggacaucgcggcccgcgaccugaucugcgcccagaaguucaacggccugaccgugcucccgccccugcugaccgacgagaugaucgcccaguacaccagcgcccuccuggcggggaccaucacguccggcuggaccuucggggccggcgccgcccugcagauccccuucgcgaugcagauggccuaccgguucaacggcaucggggucacccagaacgugcucuacgagaaccagaagcugaucgccaaccaguucaacagcgccaucggcaagauccaggacucccugagcuccaccgccagcgcgcucgggaagcugcaggacguggucaaccagaacgcccaggcccugaacacgcucgugaagcagcuguccagcaacuucggcgccaucuccagcgugcugaacgacauccucucccgccuggacccgcccgaggccgaggugcagaucgaccggcugaucaccgggcgccuccagagccugcagaccuacgugacccagcagcugauccgggcggccgagauccgcgccagcgccaaccucgccgcgaccaagauguccgagugcguccugggccagagcaagcggguggacuucugcggcaagggguaccaccugauguccuucccccagagcgccccgcacggcguggucuuccuccacgugacguacguccccgcccaggagaagaacuucaccaccgcccccgcgaucugccacgacgggaaggcccacuucccccgcgagggcguguucguguccaacgggacccacugguucgucacgcagcggaacuucuacgagccgcagaucaucaccaccgacaacaccuucgugagcggcaacugcgacguggucaucggcaucgugaacaacacgguguacgacccccugcagcccgagcuggacuccuucaaggaggagcucgacaaguacuucaagaaccacaccagccccgacgucgaccugggggacaucuccggcaucaacgccagcguggugaacauccagaaggagaucgaccgccugaacgaggucgccaagaaccucaacgagucccugaucgaccugcaggagcucgggaaguacgagcaguacaucaaguggccgugguacaucuggcugggcuucaucgccggccugaucgcgaucgugauggugaccaucaugcucugcugcaugaccagcugcugcuccugccugaaggggugcugcagcugcggcuccugcugcaaguucgacgaggacgacagcgagcccguccugaagggggugaagcuccacuacacgugaugacucgagcugguacugcaugcacgcaaugcuagcugccccuuucccguccuggguaccccgagucucccccgaccucgggucccagguaugcucccaccuccaccugccccacucaccaccucugcuaguuccagacaccucccaagcacgcagcaaugcagcucaaaacgcuuagccuagccacacccccacgggaaacagcagugauuaaccuuuagcaauaaacgaaaguuuaacuaagcuauacuaaccccaggguuggucaauuucgugccagccacacccuggagcuagcaaaaaaaaaaaaaaaaaaaaaaaaaaaaaaaaaaaaaaaaaaaaaaaaaaaaaaaaaaaaaaaaaaaaaaaaaaaaaaaaaaaaaaaaaaaaaaaaaaaa

SEQ ID NO: 26388 - RNA, 4267 nt, Artificial Sequence
  SARS-CoV-2/Wuhan/WIV05/2019__EPI_ISL_402128 spike protein mRNA gc (1-1273)(K986P_V987P_H69del_V70del_Y453F_D614G_I692V_M1229I)
agaauaaacuaguauucuucugguccccacagacucagagagaacccgccaccauguucguguuccugguccuccugccccuggugagcucccagugcgugaaccucaccacccgcacgcagcugccgcccgccuacaccaacagcuucacccggggcgucuacuaccccgacaagguguuccgcuccagcgugcugcacuccacccaggaccucuuccugcccuucuucagcaacgucacgugguuccacgccaucuccgggaccaacggcaccaagcgguucgacaacccggugcugcccuucaacgacggggucuacuucgcgagcaccgagaaguccaacaucauccgcggcuggaucuucgggacgacccucgacagcaagacccagucccugcugaucgugaacaacgccaccaacguggucaucaaggugugcgaguuccaguucugcaacgaccccuuccucggcguguacuaccacaagaacaacaagagcuggauggaguccgaguuccgggucuacagcuccgccaacaacugcacguucgaguacgugagccagcccuuccugauggaccuggagggcaagcaggggaacuucaagaaccuccgcgaguucguguucaagaacaucgacggcuacuucaagaucuacuccaagcacaccccgaucaaccugguccgggaccugccccagggguucagcgcccucgagccccugguggaccugcccaucggcaucaacaucacccgcuuccagacccuccuggcccugcaccgguccuaccucacgccgggggacagcagcuccggcuggaccgcgggcgccgccgccuacuacgugggguaccugcagccccgcaccuuccugcucaaguacaacgagaacggcaccaucacggacgcggucgacugcgcccuggacccccugagcgagaccaagugcacccucaaguccuucaccguggagaaggggaucuaccagacgagcaacuuccgggugcagcccaccgaguccaucguccgcuucccgaacaucaccaaccugugccccuucggcgagguguucaacgccacccgguucgccagcgucuacgccuggaaccgcaagcggaucuccaacugcguggcggacuacagcgugcuguacaacuccgccagcuucuccacguucaagugcuacggcgucagccccaccaagcucaacgaccugugcuucaccaacguguacgccgacuccuucgugauccgcggggacgagguccggcagaucgcccccggccagaccgggaagaucgccgacuacaacuacaagcugccggacgacuucacgggcugcgugaucgcguggaacagcaacaaccucgacuccaaggucgggggcaacuacaacuaccuguuccgccuguuccgcaagagcaaccucaagcccuucgagcgggacaucuccaccgagaucuaccaggccggcagcacccccugcaacgggguggagggcuucaacugcuacuucccccugcaguccuacggguuccagccgaccaacggcgugggguaccagcccuaccggguggucgugcugagcuucgagcuccugcacgcccccgccacggugugcggccccaagaaguccaccaaccuggucaagaacaagugcgugaacuucaacuucaacggccucaccgggaccggcgugcugaccgagagcaacaagaaguuccugccguuccagcaguucgggcgcgacaucgccgacacgaccgacgcgguccgcgacccccagacccuggagauccucgacaucacccccugcagcuucggcgggguguccgugaucacgccgggcaccaacaccagcaaccaggucgccgugcuguaccagggcgugaacugcaccgagguccccguggccauccacgccgaccagcugacgcccaccuggcggguguacuccaccggcagcaacgucuuccagacccgcgccgggugccucaucggcgcggagcacgugaacaacuccuacgagugcgacauccccaucggggccggcaucugcgccagcuaccagacgcagaccaacuccccgcggcgcgcccggagcguggcgucccagagcgugaucgccuacaccaugucccugggcgccgagaacagcgucgccuacuccaacaacagcaucgccauccccaccaacuucacgaucuccgugaccaccgagauccugcccgugagcaugaccaagacgagcgucgacugcaccauguacaucugcggggacuccaccgagugcagcaaccuccugcugcaguacggcuccuucugcacccagcucaaccgcgcgcugacggggaucgccguggagcaggacaagaacacccaggagguguucgcccaggucaagcagaucuacaagacgcccccgaucaaggacuucggcggguucaacuucagccagauccugcccgaccccuccaagcccagcaagcgguccuucaucgaggaccuccuguucaacaaggugacccuggccgacgccggcuucaucaagcaguacggcgacugccucggggacaucgcggcccgcgaccugaucugcgcccagaaguucaacggccugaccgugcucccgccccugcugaccgacgagaugaucgcccaguacaccagcgcccuccuggcggggaccaucacguccggcuggaccuucggggccggcgccgcccugcagauccccuucgcgaugcagauggccuaccgguucaacggcaucggggucacccagaacgugcucuacgagaaccagaagcugaucgccaaccaguucaacagcgccaucggcaagauccaggacucccugagcuccaccgccagcgcgcucgggaagcugcaggacguggucaaccagaacgcccaggcccugaacacgcucgugaagcagcuguccagcaacuucggcgccaucuccagcgugcugaacgacauccucucccgccuggacccgcccgaggccgaggugcagaucgaccggcugaucaccgggcgccuccagagccugcagaccuacgugacccagcagcugauccgggcggccgagauccgcgccagcgccaaccucgccgcgaccaagauguccgagugcguccugggccagagcaagcggguggacuucugcggcaagggguaccaccugauguccuucccccagagcgccccgcacggcguggucuuccuccacgugacguacguccccgcccaggagaagaacuucaccaccgcccccgcgaucugccacgacgggaaggcccacuucccccgcgagggcguguucguguccaacgggacccacugguucgucacgcagcggaacuucuacgagccgcagaucaucaccaccgacaacaccuucgugagcggcaacugcgacguggucaucggcaucgugaacaacacgguguacgacccccugcagcccgagcuggacuccuucaaggaggagcucgacaaguacuucaagaaccacaccagccccgacgucgaccugggggacaucuccggcaucaacgccagcguggugaacauccagaaggagaucgaccgccugaacgaggucgccaagaaccucaacgagucccugaucgaccugcaggagcucgggaaguacgagcaguacaucaaguggccgugguacaucuggcugggcuucaucgccggccugaucgcgaucgugaucgugaccaucaugcucugcugcaugaccagcugcugcuccugccugaaggggugcugcagcugcggcuccugcugcaaguucgacgaggacgacagcgagcccguccugaagggggugaagcuccacuacacgugaugacucgagcugguacugcaugcacgcaaugcuagcugccccuuucccguccuggguaccccgagucucccccgaccucgggucccagguaugcucccaccuccaccugccccacucaccaccucugcuaguuccagacaccucccaagcacgcagcaaugcagcucaaaacgcuuagccuagccacacccccacgggaaacagcagugauuaaccuuuagcaauaaacgaaaguuuaacuaagcuauacuaaccccaggguuggucaauuucgugccagccacacccuggagcuagcaaaaaaaaaaaaaaaaaaaaaaaaaaaaaaaaaaaaaaaaaaaaaaaaaaaaaaaaaaaaaaaaaaaaaaaaaaaaaaaaaaaaaaaaaaaaaaaaaaaa

SEQ ID NO: 26389 - RNA, 4264 nt, Artificial Sequence
  SARS-CoV-2/Wuhan/WIV05/2019__EPI_ISL_402128 spike protein mRNA gc (1-1273)(K986P_V987P_K986P_V987P_H69del_V70del_Y144del_N501Y_A570 D_D614G_P681H_T716I_S982A_D1118H)
agaauaaacuaguauucuucugguccccacagacucagagagaacccgccaccauguucguguuccugguccuccugccccuggugagcucccagugcgugaaccucaccacccgcacgcagcugccgcccgccuacaccaacagcuucacccggggcgucuacuaccccgacaagguguuccgcuccagcgugcugcacuccacccaggaccucuuccugcccuucuucagcaacgucacgugguuccacgccaucuccgggaccaacggcaccaagcgguucgacaacccggugcugcccuucaacgacggggucuacuucgcgagcaccgagaaguccaacaucauccgcggcuggaucuucgggacgacccucgacagcaagacccagucccugcugaucgugaacaacgccaccaacguggucaucaaggugugcgaguuccaguucugcaacgaccccuuccucggcguguaccacaagaacaacaagagcuggauggaguccgaguuccgggucuacagcuccgccaacaacugcacguucgaguacgugagccagcccuuccugauggaccuggagggcaagcaggggaacuucaagaaccuccgcgaguucguguucaagaacaucgacggcuacuucaagaucuacuccaagcacaccccgaucaaccugguccgggaccugccccagggguucagcgcccucgagccccugguggaccugcccaucggcaucaacaucacccgcuuccagacccuccuggcccugcaccgguccuaccucacgccgggggacagcagcuccggcuggaccgcgggcgccgccgccuacuacgugggguaccugcagccccgcaccuuccugcucaaguacaacgagaacggcaccaucacggacgcggucgacugcgcccuggacccccugagcgagaccaagugcacccucaaguccuucaccguggagaaggggaucuaccagacgagcaacuuccgggugcagcccaccgaguccaucguccgcuucccgaacaucaccaaccugugccccuucggcgagguguucaacgccacccgguucgccagcgucuacgccuggaaccgcaagcggaucuccaacugcguggcggacuacagcgugcuguacaacuccgccagcuucuccacguucaagugcuacggcgucagccccaccaagcucaacgaccugugcuucaccaacguguacgccgacuccuucgugauccgcggggacgagguccggcagaucgcccccggccagaccgggaagaucgccgacuacaacuacaagcugccggacgacuucacgggcugcgugaucgcguggaacagcaacaaccucgacuccaaggucgggggcaacuacaacuaccuguaccgccuguuccgcaagagcaaccucaagcccuucgagcgggacaucuccaccgagaucuaccaggccggcagcacccccugcaacgggguggagggcuucaacugcuacuucccccugcaguccuacggguuccagccgaccuacggcgugggguaccagcccuaccggguggucgugcugagcuucgagcuccugcacgcccccgccacggugugcggccccaagaaguccaccaaccuggucaagaacaagugcgugaacuucaacuucaacggccucaccgggaccggcgugcugaccgagagcaacaagaaguuccugccguuccagcaguucgggcgcgacaucgacgacacgaccgacgcgguccgcgacccccagacccuggagauccucgacaucacccccugcagcuucggcgggguguccgugaucacgccgggcaccaacaccagcaaccaggucgccgugcuguaccagggcgugaacugcaccgagguccccguggccauccacgccgaccagcugacgcccaccuggcggguguacuccaccggcagcaacgucuuccagacccgcgccgggugccucaucggcgcggagcacgugaacaacuccuacgagugcgacauccccaucggggccggcaucugcgccagcuaccagacgcagaccaacucccaccggcgcgcccggagcguggcgucccagagcaucaucgccuacaccaugucccugggcgccgagaacagcgucgccuacuccaacaacagcaucgccauccccaucaacuucacgaucuccgugaccaccgagauccugcccgugagcaugaccaagacgagcgucgacugcaccauguacaucugcggggacuccaccgagugcagcaaccuccugcugcaguacggcuccuucugcacccagcucaaccgcgcgcugacggggaucgccguggagcaggacaagaacacccaggagguguucgcccaggucaagcagaucuacaagacgcccccgaucaaggacuucggcggguucaacuucagccagauccugcccgaccccuccaagcccagcaagcgguccuucaucgaggaccuccuguucaacaaggugacccuggccgacgccggcuucaucaagcaguacggcgacugccucggggacaucgcggcccgcgaccugaucugcgcccagaaguucaacggccugaccgugcucccgccccugcugaccgacgagaugaucgcccaguacaccagcgcccuccuggcggggaccaucacguccggcuggaccuucggggccggcgccgcccugcagauccccuucgcgaugcagauggccuaccgguucaacggcaucggggucacccagaacgugcucuacgagaaccagaagcugaucgccaaccaguucaacagcgccaucggcaagauccaggacucccugagcuccaccgccagcgcgcucgggaagcugcaggacguggucaaccagaacgcccaggcccugaacacgcucgugaagcagcuguccagcaacuucggcgccaucuccagcgugcugaacgacauccucgcccgccuggacccgcccgaggccgaggugcagaucgaccggcugaucaccgggcgccuccagagccugcagaccuacgugacccagcagcugauccgggcggccgagauccgcgccagcgccaaccucgccgcgaccaagauguccgagugcguccugggccagagcaagcggguggacuucugcggcaagggguaccaccugauguccuucccccagagcgccccgcacggcguggucuuccuccacgugacguacguccccgcccaggagaagaacuucaccaccgcccccgcgaucugccacgacgggaaggcccacuucccccgcgagggcguguucguguccaacgggacccacugguucgucacgcagcggaacuucuacgagccgcagaucaucaccacccacaacaccuucgugagcggcaacugcgacguggucaucggcaucgugaacaacacgguguacgacccccugcagcccgagcuggacuccuucaaggaggagcucgacaaguacuucaagaaccacaccagccccgacgucgaccugggggacaucuccggcaucaacgccagcguggugaacauccagaaggagaucgaccgccugaacgaggucgccaagaaccucaacgagucccugaucgaccugcaggagcucgggaaguacgagcaguacaucaaguggccgugguacaucuggcugggcuucaucgccggccugaucgcgaucgugauggugaccaucaugcucugcugcaugaccagcugcugcuccugccugaaggggugcugcagcugcggcuccugcugcaaguucgacgaggacgacagcgagcccguccugaagggggugaagcuccacuacacgugaugacucgagcugguacugcaugcacgcaaugcuagcugccccuuucccguccuggguaccccgagucucccccgaccucgggucccagguaugcucccaccuccaccugccccacucaccaccucugcuaguuccagacaccucccaagcacgcagcaaugcagcucaaaacgcuuagccuagccacacccccacgggaaacagcagugauuaaccuuuagcaauaaacgaaaguuuaacuaagcuauacuaaccccaggguuggucaauuucgugccagccacacccuggagcuagcaaaaaaaaaaaaaaaaaaaaaaaaaaaaaaaaaaaaaaaaaaaaaaaaaaaaaaaaaaaaaaaaaaaaaaaaaaaaaaaaaaaaaaaaaaaaaaaaaaaa

SEQ ID NO: 26390 - RNA, 4273 nt, Artificial Sequence
  SARS-CoV-2/Wuhan/WIV05/2019__EPI_ISL_402128 spike protein mRNA gc (1-1273)(K986P_V987P_K986P_V987P_K417N_E484K_N501Y_D614G)
agaauaaacuaguauucuucugguccccacagacucagagagaacccgccaccauguucguguuccugguccuccugccccuggugagcucccagugcgugaaccucaccacccgcacgcagcugccgcccgccuacaccaacagcuucacccggggcgucuacuaccccgacaagguguuccgcuccagcgugcugcacuccacccaggaccucuuccugcccuucuucagcaacgucacgugguuccacgccauccacguguccgggaccaacggcaccaagcgguucgacaacccggugcugcccuucaacgacggggucuacuucgcgagcaccgagaaguccaacaucauccgcggcuggaucuucgggacgacccucgacagcaagacccagucccugcugaucgugaacaacgccaccaacguggucaucaaggugugcgaguuccaguucugcaacgaccccuuccucggcguguacuaccacaagaacaacaagagcuggauggaguccgaguuccgggucuacagcuccgccaacaacugcacguucgaguacgugagccagcccuuccugauggaccuggagggcaagcaggggaacuucaagaaccuccgcgaguucguguucaagaacaucgacggcuacuucaagaucuacuccaagcacaccccgaucaaccugguccgggaccugccccagggguucagcgcccucgagccccugguggaccugcccaucggcaucaacaucacccgcuuccagacccuccuggcccugcaccgguccuaccucacgccgggggacagcagcuccggcuggaccgcgggcgccgccgccuacuacgugggguaccugcagccccgcaccuuccugcucaaguacaacgagaacggcaccaucacggacgcggucgacugcgcccuggacccccugagcgagaccaagugcacccucaaguccuucaccguggagaaggggaucuaccagacgagcaacuuccgggugcagcccaccgaguccaucguccgcuucccgaacaucaccaaccugugccccuucggcgagguguucaacgccacccgguucgccagcgucuacgccuggaaccgcaagcggaucuccaacugcguggcggacuacagcgugcuguacaacuccgccagcuucuccacguucaagugcuacggcgucagccccaccaagcucaacgaccugugcuucaccaacguguacgccgacuccuucgugauccgcggggacgagguccggcagaucgcccccggccagaccgggaacaucgccgacuacaacuacaagcugccggacgacuucacgggcugcgugaucgcguggaacagcaacaaccucgacuccaaggucgggggcaacuacaacuaccuguaccgccuguuccgcaagagcaaccucaagcccuucgagcgggacaucuccaccgagaucuaccaggccggcagcacccccugcaacggggugaagggcuucaacugcuacuucccccugcaguccuacggguuccagccgaccuacggcgugggguaccagcccuaccggguggucgugcugagcuucgagcuccugcacgcccccgccacggugugcggccccaagaaguccaccaaccuggucaagaacaagugcgugaacuucaacuucaacggccucaccgggaccggcgugcugaccgagagcaacaagaaguuccugccguuccagcaguucgggcgcgacaucgccgacacgaccgacgcgguccgcgacccccagacccuggagauccucgacaucacccccugcagcuucggcgggguguccgugaucacgccgggcaccaacaccagcaaccaggucgccgugcuguaccagggcgugaacugcaccgagguccccguggccauccacgccgaccagcugacgcccaccuggcggguguacuccaccggcagcaacgucuuccagacccgcgccgggugccucaucggcgcggagcacgugaacaacuccuacgagugcgacauccccaucggggccggcaucugcgccagcuaccagacgcagaccaacuccccgcggcgcgcccggagcguggcgucccagagcaucaucgccuacaccaugucccugggcgccgagaacagcgucgccuacuccaacaacagcaucgccauccccaccaacuucacgaucuccgugaccaccgagauccugcccgugagcaugaccaagacgagcgucgacugcaccauguacaucugcggggacuccaccgagugcagcaaccuccugcugcaguacggcuccuucugcacccagcucaaccgcgcgcugacggggaucgccguggagcaggacaagaacacccaggagguguucgcccaggucaagcagaucuacaagacgcccccgaucaaggacuucggcggguucaacuucagccagauccugcccgaccccuccaagcccagcaagcgguccuucaucgaggaccuccuguucaacaaggugacccuggccgacgccggcuucaucaagcaguacggcgacugccucggggacaucgcggcccgcgaccugaucugcgcccagaaguucaacggccugaccgugcucccgccccugcugaccgacgagaugaucgcccaguacaccagcgcccuccuggcggggaccaucacguccggcuggaccuucggggccggcgccgcccugcagauccccuucgcgaugcagauggccuaccgguucaacggcaucggggucacccagaacgugcucuacgagaaccagaagcugaucgccaaccaguucaacagcgccaucggcaagauccaggacucccugagcuccaccgccagcgcgcucgggaagcugcaggacguggucaaccagaacgcccaggcccugaacacgcucgugaagcagcuguccagcaacuucggcgccaucuccagcgugcugaacgacauccucucccgccuggacccgcccgaggccgaggugcagaucgaccggcugaucaccgggcgccuccagagccugcagaccuacgugacccagcagcugauccgggcggccgagauccgcgccagcgccaaccucgccgcgaccaagauguccgagugcguccugggccagagcaagcggguggacuucugcggcaagggguaccaccugauguccuucccccagagcgccccgcacggcguggucuuccuccacgugacguacguccccgcccaggagaagaacuucaccaccgcccccgcgaucugccacgacgggaaggcccacuucccccgcgagggcguguucguguccaacgggacccacugguucgucacgcagcggaacuucuacgagccgcagaucaucaccaccgacaacaccuucgugagcggcaacugcgacguggucaucggcaucgugaacaacacgguguacgacccccugcagcccgagcuggacuccuucaaggaggagcucgacaaguacuucaagaaccacaccagccccgacgucgaccugggggacaucuccggcaucaacgccagcguggugaacauccagaaggagaucgaccgccugaacgaggucgccaagaaccucaacgagucccugaucgaccugcaggagcucgggaaguacgagcaguacaucaaguggccgugguacaucuggcugggcuucaucgccggccugaucgcgaucgugauggugaccaucaugcucugcugcaugaccagcugcugcuccugccugaaggggugcugcagcugcggcuccugcugcaaguucgacgaggacgacagcgagcccguccugaagggggugaagcuccacuacacgugaugacucgagcugguacugcaugcacgcaaugcuagcugccccuuucccguccuggguaccccgagucucccccgaccucgggucccagguaugcucccaccuccaccugccccacucaccaccucugcuaguuccagacaccucccaagcacgcagcaaugcagcucaaaacgcuuagccuagccacacccccacgggaaacagcagugauuaaccuuuagcaauaaacgaaaguuuaacuaagcuauacuaaccccaggguuggucaauuucgugccagccacacccuggagcuagcaaaaaaaaaaaaaaaaaaaaaaaaaaaaaaaaaaaaaaaaaaaaaaaaaaaaaaaaaaaaaaaaaaaaaaaaaaaaaaaaaaaaaaaaaaaaaaaaaaaa

SEQ ID NO: 26391 - RNA, 4264 nt, Artificial Sequence
  SARS-CoV-2/Wuhan/WIV05/2019__EPI_ISL_402128 spike protein mRNA gc (1-1273)(K986P_V987P_K986P_V987P_L18F_D80A_D215G_L242del_A243del_ L244del_R246I_K417N_E484K_N501Y_D614G_A701V)
agaauaaacuaguauucuucugguccccacagacucagagagaacccgccaccauguucguguuccugguccuccugccccuggugagcucccagugcgugaacuucaccacccgcacgcagcugccgcccgccuacaccaacagcuucacccggggcgucuacuaccccgacaagguguuccgcuccagcgugcugcacuccacccaggaccucuuccugcccuucuucagcaacgucacgugguuccacgccauccacguguccgggaccaacggcaccaagcgguucgccaacccggugcugcccuucaacgacggggucuacuucgcgagcaccgagaaguccaacaucauccgcggcuggaucuucgggacgacccucgacagcaagacccagucccugcugaucgugaacaacgccaccaacguggucaucaaggugugcgaguuccaguucugcaacgaccccuuccucggcguguacuaccacaagaacaacaagagcuggauggaguccgaguuccgggucuacagcuccgccaacaacugcacguucgaguacgugagccagcccuuccugauggaccuggagggcaagcaggggaacuucaagaaccuccgcgaguucguguucaagaacaucgacggcuacuucaagaucuacuccaagcacaccccgaucaaccugguccggggccugccccagggguucagcgcccucgagccccugguggaccugcccaucggcaucaacaucacccgcuuccagacccuccacaucuccuaccucacgccgggggacagcagcuccggcuggaccgcgggcgccgccgccuacuacgugggguaccugcagccccgcaccuuccugcucaaguacaacgagaacggcaccaucacggacgcggucgacugcgcccuggacccccugagcgagaccaagugcacccucaaguccuucaccguggagaaggggaucuaccagacgagcaacuuccgggugcagcccaccgaguccaucguccgcuucccgaacaucaccaaccugugccccuucggcgagguguucaacgccacccgguucgccagcgucuacgccuggaaccgcaagcggaucuccaacugcguggcggacuacagcgugcuguacaacuccgccagcuucuccacguucaagugcuacggcgucagccccaccaagcucaacgaccugugcuucaccaacguguacgccgacuccuucgugauccgcggggacgagguccggcagaucgcccccggccagaccgggaacaucgccgacuacaacuacaagcugccggacgacuucacgggcugcgugaucgcguggaacagcaacaaccucgacuccaaggucgggggcaacuacaacuaccuguaccgccuguuccgcaagagcaaccucaagcccuucgagcgggacaucuccaccgagaucuaccaggccggcagcacccccugcaacggggugaagggcuucaacugcuacuucccccugcaguccuacggguuccagccgaccuacggcgugggguaccagcccuaccggguggucgugcugagcuucgagcuccugcacgcccccgccacggugugcggccccaagaaguccaccaaccuggucaagaacaagugcgugaacuucaacuucaacggccucaccgggaccggcgugcugaccgagagcaacaagaaguuccugccguuccagcaguucgggcgcgacaucgccgacacgaccgacgcgguccgcgacccccagacccuggagauccucgacaucacccccugcagcuucggcgggguguccgugaucacgccgggcaccaacaccagcaaccaggucgccgugcuguaccagggcgugaacugcaccgagguccccguggccauccacgccgaccagcugacgcccaccuggcggguguacuccaccggcagcaacgucuuccagacccgcgccgggugccucaucggcgcggagcacgugaacaacuccuacgagugcgacauccccaucggggccggcaucugcgccagcuaccagacgcagaccaacuccccgcggcgcgcccggagcguggcgucccagagcaucaucgccuacaccaugucccugggcguggagaacagcgucgccuacuccaacaacagcaucgccauccccaccaacuucacgaucuccgugaccaccgagauccugcccgugagcaugaccaagacgagcgucgacugcaccauguacaucugcggggacuccaccgagugcagcaaccuccugcugcaguacggcuccuucugcacccagcucaaccgcgcgcugacggggaucgccguggagcaggacaagaacacccaggagguguucgcccaggucaagcagaucuacaagacgcccccgaucaaggacuucggcggguucaacuucagccagauccugcccgaccccuccaagcccagcaagcgguccuucaucgaggaccuccuguucaacaaggugacccuggccgacgccggcuucaucaagcaguacggcgacugccucggggacaucgcggcccgcgaccugaucugcgcccagaaguucaacggccugaccgugcucccgccccugcugaccgacgagaugaucgcccaguacaccagcgcccuccuggcggggaccaucacguccggcuggaccuucggggccggcgccgcccugcagauccccuucgcgaugcagauggccuaccgguucaacggcaucggggucacccagaacgugcucuacgagaaccagaagcugaucgccaaccaguucaacagcgccaucggcaagauccaggacucccugagcuccaccgccagcgcgcucgggaagcugcaggacguggucaaccagaacgcccaggcccugaacacgcucgugaagcagcuguccagcaacuucggcgccaucuccagcgugcugaacgacauccucucccgccuggacccgcccgaggccgaggugcagaucgaccggcugaucaccgggcgccuccagagccugcagaccuacgugacccagcagcugauccgggcggccgagauccgcgccagcgccaaccucgccgcgaccaagauguccgagugcguccugggccagagcaagcggguggacuucugcggcaagggguaccaccugauguccuucccccagagcgccccgcacggcguggucuuccuccacgugacguacguccccgcccaggagaagaacuucaccaccgcccccgcgaucugccacgacgggaaggcccacuucccccgcgagggcguguucguguccaacgggacccacugguucgucacgcagcggaacuucuacgagccgcagaucaucaccaccgacaacaccuucgugagcggcaacugcgacguggucaucggcaucgugaacaacacgguguacgacccccugcagcccgagcuggacuccuucaaggaggagcucgacaaguacuucaagaaccacaccagccccgacgucgaccugggggacaucuccggcaucaacgccagcguggugaacauccagaaggagaucgaccgccugaacgaggucgccaagaaccucaacgagucccugaucgaccugcaggagcucgggaaguacgagcaguacaucaaguggccgugguacaucuggcugggcuucaucgccggccugaucgcgaucgugauggugaccaucaugcucugcugcaugaccagcugcugcuccugccugaaggggugcugcagcugcggcuccugcugcaaguucgacgaggacgacagcgagcccguccugaagggggugaagcuccacuacacgugaugacucgagcugguacugcaugcacgcaaugcuagcugccccuuucccguccuggguaccccgagucucccccgaccucgggucccagguaugcucccaccuccaccugccccacucaccaccucugcuaguuccagacaccucccaagcacgcagcaaugcagcucaaaacgcuuagccuagccacacccccacgggaaacagcagugauuaaccuuuagcaauaaacgaaaguuuaacuaagcuauacuaaccccaggguuggucaauuucgugccagccacacccuggagcuagcaaaaaaaaaaaaaaaaaaaaaaaaaaaaaaaaaaaaaaaaaaaaaaaaaaaaaaaaaaaaaaaaaaaaaaaaaaaaaaaaaaaaaaaaaaaaaaaaaaaa

SEQ ID NO: 26392 - RNA, 4273 nt, Artificial Sequence
  SARS-CoV-2/Wuhan/WIV05/2019__EPI_ISL_402128 spike protein mRNA gc (1-1273)(K986P_V987P_K986P_V987P_E484K_D614G)
agaauaaacuaguauucuucugguccccacagacucagagagaacccgccaccauguucguguuccugguccuccugccccuggugagcucccagugcgugaaccucaccacccgcacgcagcugccgcccgccuacaccaacagcuucacccggggcgucuacuaccccgacaagguguuccgcuccagcgugcugcacuccacccaggaccucuuccugcccuucuucagcaacgucacgugguuccacgccauccacguguccgggaccaacggcaccaagcgguucgacaacccggugcugcccuucaacgacggggucuacuucgcgagcaccgagaaguccaacaucauccgcggcuggaucuucgggacgacccucgacagcaagacccagucccugcugaucgugaacaacgccaccaacguggucaucaaggugugcgaguuccaguucugcaacgaccccuuccucggcguguacuaccacaagaacaacaagagcuggauggaguccgaguuccgggucuacagcuccgccaacaacugcacguucgaguacgugagccagcccuuccugauggaccuggagggcaagcaggggaacuucaagaaccuccgcgaguucguguucaagaacaucgacggcuacuucaagaucuacuccaagcacaccccgaucaaccugguccgggaccugccccagggguucagcgcccucgagccccugguggaccugcccaucggcaucaacaucacccgcuuccagacccuccuggcccugcaccgguccuaccucacgccgggggacagcagcuccggcuggaccgcgggcgccgccgccuacuacgugggguaccugcagccccgcaccuuccugcucaaguacaacgagaacggcaccaucacggacgcggucgacugcgcccuggacccccugagcgagaccaagugcacccucaaguccuucaccguggagaaggggaucuaccagacgagcaacuuccgggugcagcccaccgaguccaucguccgcuucccgaacaucaccaaccugugccccuucggcgagguguucaacgccacccgguucgccagcgucuacgccuggaaccgcaagcggaucuccaacugcguggcggacuacagcgugcuguacaacuccgccagcuucuccacguucaagugcuacggcgucagccccaccaagcucaacgaccugugcuucaccaacguguacgccgacuccuucgugauccgcggggacgagguccggcagaucgcccccggccagaccgggaagaucgccgacuacaacuacaagcugccggacgacuucacgggcugcgugaucgcguggaacagcaacaaccucgacuccaaggucgggggcaacuacaacuaccuguaccgccuguuccgcaagagcaaccucaagcccuucgagcgggacaucuccaccgagaucuaccaggccggcagcacccccugcaacggggugaagggcuucaacugcuacuucccccugcaguccuacggguuccagccgaccaacggcgugggguaccagcccuaccggguggucgugcugagcuucgagcuccugcacgcccccgccacggugugcggccccaagaaguccaccaaccuggucaagaacaagugcgugaacuucaacuucaacggccucaccgggaccggcgugcugaccgagagcaacaagaaguuccugccguuccagcaguucgggcgcgacaucgccgacacgaccgacgcgguccgcgacccccagacccuggagauccucgacaucacccccugcagcuucggcgggguguccgugaucacgccgggcaccaacaccagcaaccaggucgccgugcuguaccagggcgugaacugcaccgagguccccguggccauccacgccgaccagcugacgcccaccuggcggguguacuccaccggcagcaacgucuuccagacccgcgccgggugccucaucggcgcggagcacgugaacaacuccuacgagugcgacauccccaucggggccggcaucugcgccagcuaccagacgcagaccaacuccccgcggcgcgcccggagcguggcgucccagagcaucaucgccuacaccaugucccugggcgccgagaacagcgucgccuacuccaacaacagcaucgccauccccaccaacuucacgaucuccgugaccaccgagauccugcccgugagcaugaccaagacgagcgucgacugcaccauguacaucugcggggacuccaccgagugcagcaaccuccugcugcaguacggcuccuucugcacccagcucaaccgcgcgcugacggggaucgccguggagcaggacaagaacacccaggagguguucgcccaggucaagcagaucuacaagacgcccccgaucaaggacuucggcggguucaacuucagccagauccugcccgaccccuccaagcccagcaagcgguccuucaucgaggaccuccuguucaacaaggugacccuggccgacgccggcuucaucaagcaguacggcgacugccucggggacaucgcggcccgcgaccugaucugcgcccagaaguucaacggccugaccgugcucccgccccugcugaccgacgagaugaucgcccaguacaccagcgcccuccuggcggggaccaucacguccggcuggaccuucggggccggcgccgcccugcagauccccuucgcgaugcagauggccuaccgguucaacggcaucggggucacccagaacgugcucuacgagaaccagaagcugaucgccaaccaguucaacagcgccaucggcaagauccaggacucccugagcuccaccgccagcgcgcucgggaagcugcaggacguggucaaccagaacgcccaggcccugaacacgcucgugaagcagcuguccagcaacuucggcgccaucuccagcgugcugaacgacauccucucccgccuggacccgcccgaggccgaggugcagaucgaccggcugaucaccgggcgccuccagagccugcagaccuacgugacccagcagcugauccgggcggccgagauccgcgccagcgccaaccucgccgcgaccaagauguccgagugcguccugggccagagcaagcggguggacuucugcggcaagggguaccaccugauguccuucccccagagcgccccgcacggcguggucuuccuccacgugacguacguccccgcccaggagaagaacuucaccaccgcccccgcgaucugccacgacgggaaggcccacuucccccgcgagggcguguucguguccaacgggacccacugguucgucacgcagcggaacuucuacgagccgcagaucaucaccaccgacaacaccuucgugagcggcaacugcgacguggucaucggcaucgugaacaacacgguguacgacccccugcagcccgagcuggacuccuucaaggaggagcucgacaaguacuucaagaaccacaccagccccgacgucgaccugggggacaucuccggcaucaacgccagcguggugaacauccagaaggagaucgaccgccugaacgaggucgccaagaaccucaacgagucccugaucgaccugcaggagcucgggaaguacgagcaguacaucaaguggccgugguacaucuggcugggcuucaucgccggccugaucgcgaucgugauggugaccaucaugcucugcugcaugaccagcugcugcuccugccugaaggggugcugcagcugcggcuccugcugcaaguucgacgaggacgacagcgagcccguccugaagggggugaagcuccacuacacgugaugacucgagcugguacugcaugcacgcaaugcuagcugccccuuucccguccuggguaccccgagucucccccgaccucgggucccagguaugcucccaccuccaccugccccacucaccaccucugcuaguuccagacaccucccaagcacgcagcaaugcagcucaaaacgcuuagccuagccacacccccacgggaaacagcagugauuaaccuuuagcaauaaacgaaaguuuaacuaagcuauacuaaccccaggguuggucaauuucgugccagccacacccuggagcuagcaaaaaaaaaaaaaaaaaaaaaaaaaaaaaaaaaaaaaaaaaaaaaaaaaaaaaaaaaaaaaaaaaaaaaaaaaaaaaaaaaaaaaaaaaaaaaaaaaaaa

SEQ ID NO: 26393 - RNA, 4273 nt, Artificial Sequence
  SARS-CoV-2/Wuhan/WIV05/2019__EPI_ISL_402128 spike protein mRNA gc (1-1273)(K986P_V987P_K986P_V987P_L18F_T20N_P26S_D138Y_R190S_K417T _E484K_N501Y_D614G_H655Y_T1027I)
agaauaaacuaguauucuucugguccccacagacucagagagaacccgccaccauguucguguuccugguccuccugccccuggugagcucccagugcgugaacuucaccaaccgcacgcagcugccgagcgccuacaccaacagcuucacccggggcgucuacuaccccgacaagguguuccgcuccagcgugcugcacuccacccaggaccucuuccugcccuucuucagcaacgucacgugguuccacgccauccacguguccgggaccaacggcaccaagcgguucgacaacccggugcugcccuucaacgacggggucuacuucgcgagcaccgagaaguccaacaucauccgcggcuggaucuucgggacgacccucgacagcaagacccagucccugcugaucgugaacaacgccaccaacguggucaucaaggugugcgaguuccaguucugcaacuaccccuuccucggcguguacuaccacaagaacaacaagagcuggauggaguccgaguuccgggucuacagcuccgccaacaacugcacguucgaguacgugagccagcccuuccugauggaccuggagggcaagcaggggaacuucaagaaccucagcgaguucguguucaagaacaucgacggcuacuucaagaucuacuccaagcacaccccgaucaaccugguccgggaccugccccagggguucagcgcccucgagccccugguggaccugcccaucggcaucaacaucacccgcuuccagacccuccuggcccugcaccgguccuaccucacgccgggggacagcagcuccggcuggaccgcgggcgccgccgccuacuacgugggguaccugcagccccgcaccuuccugcucaaguacaacgagaacggcaccaucacggacgcggucgacugcgcccuggacccccugagcgagaccaagugcacccucaaguccuucaccguggagaaggggaucuaccagacgagcaacuuccgggugcagcccaccgaguccaucguccgcuucccgaacaucaccaaccugugccccuucggcgagguguucaacgccacccgguucgccagcgucuacgccuggaaccgcaagcggaucuccaacugcguggcggacuacagcgugcuguacaacuccgccagcuucuccacguucaagugcuacggcgucagccccaccaagcucaacgaccugugcuucaccaacguguacgccgacuccuucgugauccgcggggacgagguccggcagaucgcccccggccagaccgggaccaucgccgacuacaacuacaagcugccggacgacuucacgggcugcgugaucgcguggaacagcaacaaccucgacuccaaggucgggggcaacuacaacuaccuguaccgccuguuccgcaagagcaaccucaagcccuucgagcgggacaucuccaccgagaucuaccaggccggcagcacccccugcaacggggugaagggcuucaacugcuacuucccccugcaguccuacggguuccagccgaccuacggcgugggguaccagcccuaccggguggucgugcugagcuucgagcuccugcacgcccccgccacggugugcggccccaagaaguccaccaaccuggucaagaacaagugcgugaacuucaacuucaacggccucaccgggaccggcgugcugaccgagagcaacaagaaguuccugccguuccagcaguucgggcgcgacaucgccgacacgaccgacgcgguccgcgacccccagacccuggagauccucgacaucacccccugcagcuucggcgggguguccgugaucacgccgggcaccaacaccagcaaccaggucgccgugcuguaccagggcgugaacugcaccgagguccccguggccauccacgccgaccagcugacgcccaccuggcggguguacuccaccggcagcaacgucuuccagacccgcgccgggugccucaucggcgcggaguacgugaacaacuccuacgagugcgacauccccaucggggccggcaucugcgccagcuaccagacgcagaccaacuccccgcggcgcgcccggagcguggcgucccagagcaucaucgccuacaccaugucccugggcgccgagaacagcgucgccuacuccaacaacagcaucgccauccccaccaacuucacgaucuccgugaccaccgagauccugcccgugagcaugaccaagacgagcgucgacugcaccauguacaucugcggggacuccaccgagugcagcaaccuccugcugcaguacggcuccuucugcacccagcucaaccgcgcgcugacggggaucgccguggagcaggacaagaacacccaggagguguucgcccaggucaagcagaucuacaagacgcccccgaucaaggacuucggcggguucaacuucagccagauccugcccgaccccuccaagcccagcaagcgguccuucaucgaggaccuccuguucaacaaggugacccuggccgacgccggcuucaucaagcaguacggcgacugccucggggacaucgcggcccgcgaccugaucugcgcccagaaguucaacggccugaccgugcucccgccccugcugaccgacgagaugaucgcccaguacaccagcgcccuccuggcggggaccaucacguccggcuggaccuucggggccggcgccgcccugcagauccccuucgcgaugcagauggccuaccgguucaacggcaucggggucacccagaacgugcucuacgagaaccagaagcugaucgccaaccaguucaacagcgccaucggcaagauccaggacucccugagcuccaccgccagcgcgcucgggaagcugcaggacguggucaaccagaacgcccaggcccugaacacgcucgugaagcagcuguccagcaacuucggcgccaucuccagcgugcugaacgacauccucucccgccuggacccgcccgaggccgaggugcagaucgaccggcugaucaccgggcgccuccagagccugcagaccuacgugacccagcagcugauccgggcggccgagauccgcgccagcgccaaccucgccgcgaucaagauguccgagugcguccugggccagagcaagcggguggacuucugcggcaagggguaccaccugauguccuucccccagagcgccccgcacggcguggucuuccuccacgugacguacguccccgcccaggagaagaacuucaccaccgcccccgcgaucugccacgacgggaaggcccacuucccccgcgagggcguguucguguccaacgggacccacugguucgucacgcagcggaacuucuacgagccgcagaucaucaccaccgacaacaccuucgugagcggcaacugcgacguggucaucggcaucgugaacaacacgguguacgacccccugcagcccgagcuggacuccuucaaggaggagcucgacaaguacuucaagaaccacaccagccccgacgucgaccugggggacaucuccggcaucaacgccagcguggugaacauccagaaggagaucgaccgccugaacgaggucgccaagaaccucaacgagucccugaucgaccugcaggagcucgggaaguacgagcaguacaucaaguggccgugguacaucuggcugggcuucaucgccggccugaucgcgaucgugauggugaccaucaugcucugcugcaugaccagcugcugcuccugccugaaggggugcugcagcugcggcuccugcugcaaguucgacgaggacgacagcgagcccguccugaagggggugaagcuccacuacacgugaugacucgagcugguacugcaugcacgcaaugcuagcugccccuuucccguccuggguaccccgagucucccccgaccucgggucccagguaugcucccaccuccaccugccccacucaccaccucugcuaguuccagacaccucccaagcacgcagcaaugcagcucaaaacgcuuagccuagccacacccccacgggaaacagcagugauuaaccuuuagcaauaaacgaaaguuuaacuaagcuauacuaaccccaggguuggucaauuucgugccagccacacccuggagcuagcaaaaaaaaaaaaaaaaaaaaaaaaaaaaaaaaaaaaaaaaaaaaaaaaaaaaaaaaaaaaaaaaaaaaaaaaaaaaaaaaaaaaaaaaaaaaaaaaaaaa

SEQ ID NO: 26394 - RNA, 4273 nt, Artificial Sequence
  SARS-CoV-2/Wuhan/WIV05/2019__EPI_ISL_402128 spike protein mRNA gc (1-1273)(K986P_V987P_K986P_V987P_S13I_W152C_L452R_D614G)
agaauaaacuaguauucuucugguccccacagacucagagagaacccgccaccauguucguguuccugguccuccugccccuggugagcauccagugcgugaaccucaccacccgcacgcagcugccgcccgccuacaccaacagcuucacccggggcgucuacuaccccgacaagguguuccgcuccagcgugcugcacuccacccaggaccucuuccugcccuucuucagcaacgucacgugguuccacgccauccacguguccgggaccaacggcaccaagcgguucgacaacccggugcugcccuucaacgacggggucuacuucgcgagcaccgagaaguccaacaucauccgcggcuggaucuucgggacgacccucgacagcaagacccagucccugcugaucgugaacaacgccaccaacguggucaucaaggugugcgaguuccaguucugcaacgaccccuuccucggcguguacuaccacaagaacaacaagagcugcauggaguccgaguuccgggucuacagcuccgccaacaacugcacguucgaguacgugagccagcccuuccugauggaccuggagggcaagcaggggaacuucaagaaccuccgcgaguucguguucaagaacaucgacggcuacuucaagaucuacuccaagcacaccccgaucaaccugguccgggaccugccccagggguucagcgcccucgagccccugguggaccugcccaucggcaucaacaucacccgcuuccagacccuccuggcccugcaccgguccuaccucacgccgggggacagcagcuccggcuggaccgcgggcgccgccgccuacuacgugggguaccugcagccccgcaccuuccugcucaaguacaacgagaacggcaccaucacggacgcggucgacugcgcccuggacccccugagcgagaccaagugcacccucaaguccuucaccguggagaaggggaucuaccagacgagcaacuuccgggugcagcccaccgaguccaucguccgcuucccgaacaucaccaaccugugccccuucggcgagguguucaacgccacccgguucgccagcgucuacgccuggaaccgcaagcggaucuccaacugcguggcggacuacagcgugcuguacaacuccgccagcuucuccacguucaagugcuacggcgucagccccaccaagcucaacgaccugugcuucaccaacguguacgccgacuccuucgugauccgcggggacgagguccggcagaucgcccccggccagaccgggaagaucgccgacuacaacuacaagcugccggacgacuucacgggcugcgugaucgcguggaacagcaacaaccucgacuccaaggucgggggcaacuacaacuaccgcuaccgccuguuccgcaagagcaaccucaagcccuucgagcgggacaucuccaccgagaucuaccaggccggcagcacccccugcaacgggguggagggcuucaacugcuacuucccccugcaguccuacggguuccagccgaccaacggcgugggguaccagcccuaccggguggucgugcugagcuucgagcuccugcacgcccccgccacggugugcggccccaagaaguccaccaaccuggucaagaacaagugcgugaacuucaacuucaacggccucaccgggaccggcgugcugaccgagagcaacaagaaguuccugccguuccagcaguucgggcgcgacaucgccgacacgaccgacgcgguccgcgacccccagacccuggagauccucgacaucacccccugcagcuucggcgggguguccgugaucacgccgggcaccaacaccagcaaccaggucgccgugcuguaccagggcgugaacugcaccgagguccccguggccauccacgccgaccagcugacgcccaccuggcggguguacuccaccggcagcaacgucuuccagacccgcgccgggugccucaucggcgcggagcacgugaacaacuccuacgagugcgacauccccaucggggccggcaucugcgccagcuaccagacgcagaccaacuccccgcggcgcgcccggagcguggcgucccagagcaucaucgccuacaccaugucccugggcgccgagaacagcgucgccuacuccaacaacagcaucgccauccccaccaacuucacgaucuccgugaccaccgagauccugcccgugagcaugaccaagacgagcgucgacugcaccauguacaucugcggggacuccaccgagugcagcaaccuccugcugcaguacggcuccuucugcacccagcucaaccgcgcgcugacggggaucgccguggagcaggacaagaacacccaggagguguucgcccaggucaagcagaucuacaagacgcccccgaucaaggacuucggcggguucaacuucagccagauccugcccgaccccuccaagcccagcaagcgguccuucaucgaggaccuccuguucaacaaggugacccuggccgacgccggcuucaucaagcaguacggcgacugccucggggacaucgcggcccgcgaccugaucugcgcccagaaguucaacggccugaccgugcucccgccccugcugaccgacgagaugaucgcccaguacaccagcgcccuccuggcggggaccaucacguccggcuggaccuucggggccggcgccgcccugcagauccccuucgcgaugcagauggccuaccgguucaacggcaucggggucacccagaacgugcucuacgagaaccagaagcugaucgccaaccaguucaacagcgccaucggcaagauccaggacucccugagcuccaccgccagcgcgcucgggaagcugcaggacguggucaaccagaacgcccaggcccugaacacgcucgugaagcagcuguccagcaacuucggcgccaucuccagcgugcugaacgacauccucucccgccuggacccgcccgaggccgaggugcagaucgaccggcugaucaccgggcgccuccagagccugcagaccuacgugacccagcagcugauccgggcggccgagauccgcgccagcgccaaccucgccgcgaccaagauguccgagugcguccugggccagagcaagcggguggacuucugcggcaagggguaccaccugauguccuucccccagagcgccccgcacggcguggucuuccuccacgugacguacguccccgcccaggagaagaacuucaccaccgcccccgcgaucugccacgacgggaaggcccacuucccccgcgagggcguguucguguccaacgggacccacugguucgucacgcagcggaacuucuacgagccgcagaucaucaccaccgacaacaccuucgugagcggcaacugcgacguggucaucggcaucgugaacaacacgguguacgacccccugcagcccgagcuggacuccuucaaggaggagcucgacaaguacuucaagaaccacaccagccccgacgucgaccugggggacaucuccggcaucaacgccagcguggugaacauccagaaggagaucgaccgccugaacgaggucgccaagaaccucaacgagucccugaucgaccugcaggagcucgggaaguacgagcaguacaucaaguggccgugguacaucuggcugggcuucaucgccggccugaucgcgaucgugauggugaccaucaugcucugcugcaugaccagcugcugcuccugccugaaggggugcugcagcugcggcuccugcugcaaguucgacgaggacgacagcgagcccguccugaagggggugaagcuccacuacacgugaugacucgagcugguacugcaugcacgcaaugcuagcugccccuuucccguccuggguaccccgagucucccccgaccucgggucccagguaugcucccaccuccaccugccccacucaccaccucugcuaguuccagacaccucccaagcacgcagcaaugcagcucaaaacgcuuagccuagccacacccccacgggaaacagcagugauuaaccuuuagcaauaaacgaaaguuuaacuaagcuauacuaaccccaggguuggucaauuucgugccagccacacccuggagcuagcaaaaaaaaaaaaaaaaaaaaaaaaaaaaaaaaaaaaaaaaaaaaaaaaaaaaaaaaaaaaaaaaaaaaaaaaaaaaaaaaaaaaaaaaaaaaaaaaaaaa

SEQ ID NO: 26395 - RNA, 4273 nt, Artificial Sequence
  SARS-CoV-2/Wuhan/WIV05/2019__EPI_ISL_402128 spike protein mRNA gc (1-1273)(K986P_V987P)
agaauaaacuaguauucuucugguccccacagacucagagagaacccgccaccauguucguguuccugguccuccugccccuggugagcucccagugcgugaaccucaccacccgcacgcagcugccgcccgccuacaccaacagcuucacccggggcgucuacuaccccgacaagguguuccgcuccagcgugcugcacuccacccaggaccucuuccugcccuucuucagcaacgucacgugguuccacgccauccacguguccgggaccaacggcaccaagcgguucgacaacccggugcugcccuucaacgacggggucuacuucgcgagcaccgagaaguccaacaucauccgcggcuggaucuucgggacgacccucgacagcaagacccagucccugcugaucgugaacaacgccaccaacguggucaucaaggugugcgaguuccaguucugcaacgaccccuuccucggcguguacuaccacaagaacaacaagagcuggauggaguccgaguuccgggucuacagcuccgccaacaacugcacguucgaguacgugagccagcccuuccugauggaccuggagggcaagcaggggaacuucaagaaccuccgcgaguucguguucaagaacaucgacggcuacuucaagaucuacuccaagcacaccccgaucaaccugguccgggaccugccccagggguucagcgcccucgagccccugguggaccugcccaucggcaucaacaucacccgcuuccagacccuccuggcccugcaccgguccuaccucacgccgggggacagcagcuccggcuggaccgcgggcgccgccgccuacuacgugggguaccugcagccccgcaccuuccugcucaaguacaacgagaacggcaccaucacggacgcggucgacugcgcccuggacccccugagcgagaccaagugcacccucaaguccuucaccguggagaaggggaucuaccagacgagcaacuuccgggugcagcccaccgaguccaucguccgcuucccgaacaucaccaaccugugccccuucggcgagguguucaacgccacccgguucgccagcgucuacgccuggaaccgcaagcggaucuccaacugcguggcggacuacagcgugcuguacaacuccgccagcuucuccacguucaagugcuacggcgucagccccaccaagcucaacgaccugugcuucaccaacguguacgccgacuccuucgugauccgcggggacgagguccggcagaucgcccccggccagaccgggaagaucgccgacuacaacuacaagcugccggacgacuucacgggcugcgugaucgcguggaacagcaacaaccucgacuccaaggucgggggcaacuacaacuaccuguaccgccuguuccgcaagagcaaccucaagcccuucgagcgggacaucuccaccgagaucuaccaggccggcagcacccccugcaacgggguggagggcuucaacugcuacuucccccugcaguccuacggguuccagccgaccaacggcgugggguaccagcccuaccggguggucgugcugagcuucgagcuccugcacgcccccgccacggugugcggccccaagaaguccaccaaccuggucaagaacaagugcgugaacuucaacuucaacggccucaccgggaccggcgugcugaccgagagcaacaagaaguuccugccguuccagcaguucgggcgcgacaucgccgacacgaccgacgcgguccgcgacccccagacccuggagauccucgacaucacccccugcagcuucggcgggguguccgugaucacgccgggcaccaacaccagcaaccaggucgccgugcuguaccaggacgugaacugcaccgagguccccguggccauccacgccgaccagcugacgcccaccuggcggguguacuccaccggcagcaacgucuuccagacccgcgccgggugccucaucggcgcggagcacgugaacaacuccuacgagugcgacauccccaucggggccggcaucugcgccagcuaccagacgcagaccaacuccccgcggcgcgcccggagcguggcgucccagagcaucaucgccuacaccaugucccugggcgccgagaacagcgucgccuacuccaacaacagcaucgccauccccaccaacuucacgaucuccgugaccaccgagauccugcccgugagcaugaccaagacgagcgucgacugcaccauguacaucugcggggacuccaccgagugcagcaaccuccugcugcaguacggcuccuucugcacccagcucaaccgcgcgcugacggggaucgccguggagcaggacaagaacacccaggagguguucgcccaggucaagcagaucuacaagacgcccccgaucaaggacuucggcggguucaacuucagccagauccugcccgaccccuccaagcccagcaagcgguccuucaucgaggaccuccuguucaacaaggugacccuggccgacgccggcuucaucaagcaguacggcgacugccucggggacaucgcggcccgcgaccugaucugcgcccagaaguucaacggccugaccgugcucccgccccugcugaccgacgagaugaucgcccaguacaccagcgcccuccuggcggggaccaucacguccggcuggaccuucggggccggcgccgcccugcagauccccuucgcgaugcagauggccuaccgguucaacggcaucggggucacccagaacgugcucuacgagaaccagaagcugaucgccaaccaguucaacagcgccaucggcaagauccaggacucccugagcuccaccgccagcgcgcucgggaagcugcaggacguggucaaccagaacgcccaggcccugaacacgcucgugaagcagcuguccagcaacuucggcgccaucuccagcgugcugaacgacauccucucccgccuggacccgcccgaggccgagguccagaucgaccggcugaucaccgggcgccuccagagccugcagaccuacgugacccagcagcugauccgggcggccgagauccgcgccagcgccaaccucgccgcgaccaagauguccgagugcgugcugggccagagcaagcgggucgacuucugcggcaagggguaccaccugauguccuucccccagagcgcgccccacggcgugguguuccuccacgucacguacgugcccgcccaggagaagaacuucaccaccgccccggccaucugccacgacgggaaggcccacuucccccgcgagggcgucuucguguccaacgggacccacugguucgugacgcagcggaacuucuacgagccccagaucaucaccaccgacaacaccuucgucagcggcaacugcgacguggugaucggcaucgucaacaacacgguguacgacccccugcagccggagcuggacuccuucaaggaggagcucgacaaguacuucaagaaccacaccagccccgacguggaccugggggacaucuccggcaucaacgccagcgucgugaacauccagaaggagaucgaccgccugaacgagguggccaagaaccucaacgagucccugaucgaccugcaggagcucgggaaguacgagcaguacaucaaguggcccugguacaucuggcugggcuucaucgccggccugaucgcgaucgucauggugaccaucaugcucugcugcaugaccagcugcugcuccugccugaaggggugcugcagcugcggcuccugcugcaaguucgacgaggacgacagcgagccggugcugaagggggucaagcuccacuacacgugaugacucgagcugguacugcaugcacgcaaugcuagcugccccuuucccguccuggguaccccgagucucccccgaccucgggucccagguaugcucccaccuccaccugccccacucaccaccucugcuaguuccagacaccucccaagcacgcagcaaugcagcucaaaacgcuuagccuagccacacccccacgggaaacagcagugauuaaccuuuagcaauaaacgaaaguuuaacuaagcuauacuaaccccaggguuggucaauuucgugccagccacacccuggagcuagcaaaaaaaaaaaaaaaaaaaaaaaaaaaaaaaaaaaaaaaaaaaaaaaaaaaaaaaaaaaaaaaaaaaaaaaaaaaaaaaaaaaaaaaaaaaaaaaaaaaa

SEQ ID NO: 26396 - RNA, 4273 nt, Artificial Sequence
  SARS-CoV-2/Wuhan/WIV05/2019__EPI_ISL_402128 spike protein mRNA gc (1-1273)(K986P_V987P_ D614G)
agaauaaacuaguauucuucugguccccacagacucagagagaacccgccaccauguucguguuccugguccuccugccccuggugagcucccagugcgugaaccucaccacccgcacgcagcugccgcccgccuacaccaacagcuucacccggggcgucuacuaccccgacaagguguuccgcuccagcgugcugcacuccacccaggaccucuuccugcccuucuucagcaacgucacgugguuccacgccauccacguguccgggaccaacggcaccaagcgguucgacaacccggugcugcccuucaacgacggggucuacuucgcgagcaccgagaaguccaacaucauccgcggcuggaucuucgggacgacccucgacagcaagacccagucccugcugaucgugaacaacgccaccaacguggucaucaaggugugcgaguuccaguucugcaacgaccccuuccucggcguguacuaccacaagaacaacaagagcuggauggaguccgaguuccgggucuacagcuccgccaacaacugcacguucgaguacgugagccagcccuuccugauggaccuggagggcaagcaggggaacuucaagaaccuccgcgaguucguguucaagaacaucgacggcuacuucaagaucuacuccaagcacaccccgaucaaccugguccgggaccugccccagggguucagcgcccucgagccccugguggaccugcccaucggcaucaacaucacccgcuuccagacccuccuggcccugcaccgguccuaccucacgccgggggacagcagcuccggcuggaccgcgggcgccgccgccuacuacgugggguaccugcagccccgcaccuuccugcucaaguacaacgagaacggcaccaucacggacgcggucgacugcgcccuggacccccugagcgagaccaagugcacccucaaguccuucaccguggagaaggggaucuaccagacgagcaacuuccgggugcagcccaccgaguccaucguccgcuucccgaacaucaccaaccugugccccuucggcgagguguucaacgccacccgguucgccagcgucuacgccuggaaccgcaagcggaucuccaacugcguggcggacuacagcgugcuguacaacuccgccagcuucuccacguucaagugcuacggcgucagccccaccaagcucaacgaccugugcuucaccaacguguacgccgacuccuucgugauccgcggggacgagguccggcagaucgcccccggccagaccgggaagaucgccgacuacaacuacaagcugccggacgacuucacgggcugcgugaucgcguggaacagcaacaaccucgacuccaaggucgggggcaacuacaacuaccuguaccgccuguuccgcaagagcaaccucaagcccuucgagcgggacaucuccaccgagaucuaccaggccggcagcacccccugcaacgggguggagggcuucaacugcuacuucccccugcaguccuacggguuccagccgaccaacggcgugggguaccagcccuaccggguggucgugcugagcuucgagcuccugcacgcccccgccacggugugcggccccaagaaguccaccaaccuggucaagaacaagugcgugaacuucaacuucaacggccucaccgggaccggcgugcugaccgagagcaacaagaaguuccugccguuccagcaguucgggcgcgacaucgccgacacgaccgacgcgguccgcgacccccagacccuggagauccucgacaucacccccugcagcuucggcgggguguccgugaucacgccgggcaccaacaccagcaaccaggucgccgugcuguaccagggcgugaacugcaccgagguccccguggccauccacgccgaccagcugacgcccaccuggcggguguacuccaccgggagcaacgucuuccagacccgcgccggcugccucaucggggcggagcacgugaacaacuccuacgagugcgacauccccaucggcgccggcaucugcgccagcuaccagacgcagaccaacuccccgcggcgcgcccggagcguggcgucccagagcaucaucgccuacaccaugucccugggggccgagaacagcgucgccuacuccaacaacagcaucgccauccccaccaacuucacgaucuccgugaccaccgagauccugcccgugagcaugaccaagacgagcgucgacugcaccauguacaucugcggcgacuccaccgagugcagcaaccuccugcugcaguacggguccuucugcacccagcucaaccgcgcgcugacgggcaucgccguggagcaggacaagaacacccaggagguguucgcccaggucaagcagaucuacaagacgcccccgaucaaggacuucgggggcuucaacuucagccagauccugcccgaccccuccaagcccagcaagcgguccuucaucgaggaccuccuguucaacaaggugacccuggccgacgccggcuucaucaagcaguacggggacugccucggcgacaucgcggcccgcgaccugaucugcgcccagaaguucaacgggcugaccgugcucccgccccugcugaccgacgagaugaucgcccaguacaccagcgcccuccuggcgggcaccaucacguccggguggaccuucggcgccggcgccgcccugcagauccccuucgcgaugcagauggccuaccgguucaacgggaucggcgucacccagaacgugcucuacgagaaccagaagcugaucgccaaccaguucaacagcgccaucgggaagauccaggacucccugagcuccaccgccagcgcgcucggcaagcugcaggacguggucaaccagaacgcccaggcccugaacacgcucgugaagcagcuguccagcaacuucggggccaucuccagcgugcugaacgacauccucucccgccuggacccgcccgaggccgagguccagaucgaccggcugaucaccggccgccuccagagccugcagaccuacgugacccagcagcugauccgggcggccgagauccgcgccagcgccaaccucgccgcgaccaagauguccgagugcgugcugggccagagcaagcgggucgacuucugcgggaagggcuaccaccugauguccuucccccagagcgcgccccacggggugguguuccuccacgucacguacgugcccgcccaggagaagaacuucaccaccgccccggccaucugccacgacggcaaggcccacuucccccgcgagggggucuucguguccaacggcacccacugguucgugacgcagcggaacuucuacgagccccagaucaucaccaccgacaacaccuucgucagcggcaacugcgacguggugaucgggaucgucaacaacacgguguacgacccccugcagccggagcuggacuccuucaaggaggagcucgacaaguacuucaagaaccacaccagccccgacguggaccugggcgacaucuccgggaucaacgccagcgucgugaacauccagaaggagaucgaccgccugaacgagguggccaagaaccucaacgagucccugaucgaccugcaggagcucggcaaguacgagcaguacaucaaguggcccugguacaucuggcugggcuucaucgccgggcugaucgcgaucgucauggugaccaucaugcucugcugcaugaccagcugcugcuccugccugaagggcugcugcagcugcggguccugcugcaaguucgacgaggacgacagcgagccggugcugaagggcgucaagcuccacuacacgugaugacucgagcugguacugcaugcacgcaaugcuagcugccccuuucccguccuggguaccccgagucucccccgaccucgggucccagguaugcucccaccuccaccugccccacucaccaccucugcuaguuccagacaccucccaagcacgcagcaaugcagcucaaaacgcuuagccuagccacacccccacgggaaacagcagugauuaaccuuuagcaauaaacgaaaguuuaacuaagcuauacuaaccccaggguuggucaauuucgugccagccacacccuggagcuagcaaaaaaaaaaaaaaaaaaaaaaaaaaaaaaaaaaaaaaaaaaaaaaaaaaaaaaaaaaaaaaaaaaaaaaaaaaaaaaaaaaaaaaaaaaaaaaaaaaaa

SEQ ID NO: 26397 - RNA, 4273 nt, Artificial Sequence
  SARS-CoV-2/Wuhan/WIV05/2019__EPI_ISL_402128 spike protein mRNA gc (1-1273)(K986P_V987P_A222V_D614G)
agaauaaacuaguauucuucugguccccacagacucagagagaacccgccaccauguucguguuccugguccuccugccccuggugagcucccagugcgugaaccucaccacccgcacgcagcugccgcccgccuacaccaacagcuucacccggggcgucuacuaccccgacaagguguuccgcuccagcgugcugcacuccacccaggaccucuuccugcccuucuucagcaacgucacgugguuccacgccauccacguguccgggaccaacggcaccaagcgguucgacaacccggugcugcccuucaacgacggggucuacuucgcgagcaccgagaaguccaacaucauccgcggcuggaucuucgggacgacccucgacagcaagacccagucccugcugaucgugaacaacgccaccaacguggucaucaaggugugcgaguuccaguucugcaacgaccccuuccucggcguguacuaccacaagaacaacaagagcuggauggaguccgaguuccgggucuacagcuccgccaacaacugcacguucgaguacgugagccagcccuuccugauggaccuggagggcaagcaggggaacuucaagaaccuccgcgaguucguguucaagaacaucgacggcuacuucaagaucuacuccaagcacaccccgaucaaccugguccgggaccugccccagggguucagcgugcucgagccccugguggaccugcccaucggcaucaacaucacccgcuuccagacccuccuggcccugcaccgguccuaccucacgccgggggacagcagcuccggcuggaccgccggcgcggccgccuacuacgucggguaccugcagccccgcaccuuccugcucaaguacaacgagaacggcaccaucacggacgccguggacugcgcgcuggacccccugagcgagaccaagugcacccucaaguccuucaccguggagaaggggaucuaccagacgagcaacuuccggguccagcccaccgaguccaucgugcgcuucccgaacaucaccaaccugugccccuucggcgaggucuucaacgccacccgguucgccagcguguacgccuggaaccgcaagcggaucuccaacugcguggccgacuacagcguccuguacaacuccgcgagcuucuccacguucaagugcuacggcgugagccccaccaagcucaacgaccugugcuucaccaacguguacgccgacuccuucgucauccgcggggacgaggugcggcagaucgcccccggccagaccgggaagaucgccgacuacaacuacaagcugccggacgacuucacgggcugcgugaucgccuggaacagcaacaaccucgacuccaaggucgggggcaacuacaacuaccuguaccgccuguuccgcaagagcaaccucaagcccuucgagcgggacaucuccaccgagaucuaccaggcgggcagcacccccugcaacgggguggagggcuucaacugcuacuucccccugcaguccuacggguuccagccgaccaacggcgugggguaccagcccuaccgggucguggugcugagcuucgagcuccugcacgcccccgccacggucugcggccccaagaaguccaccaaccuggugaagaacaagugcgugaacuucaacuucaacggccucaccgggaccggcguccugaccgagagcaacaagaaguuccugccguuccagcaguucgggcgcgacaucgccgacacgaccgacgccgugcgcgacccccagacccuggagauccucgacaucacccccugcagcuucggcgggguguccgucaucacgccgggcaccaacaccagcaaccagguggcggugcuguaccagggcgucaacugcaccgaggugcccguggccauccacgccgaccagcugacgcccaccuggcgggucuacuccaccgggagcaacguguuccagacccgcgccggcugccucaucggggccgagcacgugaacaacuccuacgagugcgacauccccaucggcgcgggcaucugcgccagcuaccagacgcagaccaacuccccgcggcgcgcccggagcgucgccucccagagcaucaucgcguacaccaugucccugggggccgagaacagcguggccuacuccaacaacagcaucgccauccccaccaacuucacgaucuccgugaccaccgagauccugcccgucagcaugaccaagacgagcguggacugcaccauguacaucugcggcgacuccaccgagugcagcaaccuccugcugcaguacggguccuucugcacccagcucaaccgcgcccugacgggcaucgcgguggagcaggacaagaacacccaggaggucuucgcccaggugaagcagaucuacaagacgcccccgaucaaggacuucgggggcuucaacuucagccagauccugcccgaccccuccaagcccagcaagcgguccuucaucgaggaccuccuguucaacaaggugacccuggccgacgccggcuucaucaagcaguacggggacugccucggcgacaucgccgcgcgcgaccugaucugcgcccagaaguucaacgggcugaccguccucccgccccugcugaccgacgagaugaucgcccaguacaccagcgcccuccuggccggcaccaucacguccggguggaccuucggcgcgggcgccgcccugcagauccccuucgccaugcagauggcguaccgguucaacgggaucggcgugacccagaacgugcucuacgagaaccagaagcugaucgccaaccaguucaacagcgccaucgggaagauccaggacucccugagcuccaccgccagcgcccucggcaagcugcaggacgucgugaaccagaacgcgcaggcccugaacacgcucgugaagcagcuguccagcaacuucggggccaucuccagcguccugaacgacauccucucccgccuggacccgcccgaggccgaggugcagaucgaccggcugaucaccggccgccuccagagccugcagaccuacgugacccagcagcugauccgggccgcggagauccgcgccagcgccaaccucgccgccaccaagauguccgagugcguccugggccagagcaagcggguggacuucugcgggaagggcuaccaccugauguccuucccccagagcgcgccccacgggguggucuuccuccacgugacguacguccccgcccaggagaagaacuucaccaccgccccggccaucugccacgacggcaaggcgcacuucccccgcgaggggguguucguguccaacggcacccacugguucgucacgcagcggaacuucuacgagccccagaucaucaccaccgacaacaccuucgugagcggcaacugcgacguggucaucgggaucgugaacaacacgguguacgacccccugcagccggagcuggacuccuucaaggaggagcucgacaaguacuucaagaaccacaccagccccgacgucgaccugggcgacaucuccgggaucaacgccagcguggugaacauccagaaggagaucgaccgccugaacgaggucgccaagaaccucaacgagucccugaucgaccugcaggagcucggcaaguacgagcaguacaucaaguggcccugguacaucuggcugggcuucaucgccgggcugaucgccaucgugauggugaccaucaugcucugcugcaugaccagcugcugcuccugccugaagggcugcugcagcugcggguccugcugcaaguucgacgaggacgacagcgagccgguccugaagggcgugaagcuccacuacacgugaugacucgagcugguacugcaugcacgcaaugcuagcugccccuuucccguccuggguaccccgagucucccccgaccucgggucccagguaugcucccaccuccaccugccccacucaccaccucugcuaguuccagacaccucccaagcacgcagcaaugcagcucaaaacgcuuagccuagccacacccccacgggaaacagcagugauuaaccuuuagcaauaaacgaaaguuuaacuaagcuauacuaaccccaggguuggucaauuucgugccagccacacccuggagcuagcaaaaaaaaaaaaaaaaaaaaaaaaaaaaaaaaaaaaaaaaaaaaaaaaaaaaaaaaaaaaaaaaaaaaaaaaaaaaaaaaaaaaaaaaaaaaaaaaaaaa

SEQ ID NO: 26398 - RNA, 4273 nt, Artificial Sequence
  SARS-CoV-2/Wuhan/WIV05/2019__EPI_ISL_402128 spike protein mRNA gc (1-1273)(K986P_V987P_N439K_D614G)
agaauaaacuaguauucuucugguccccacagacucagagagaacccgccaccauguucguguuccugguccuccugccccuggugagcucccagugcgugaaccucaccacccgcacgcagcugccgcccgccuacaccaacagcuucacccggggcgucuacuaccccgacaagguguuccgcuccagcgugcugcacuccacccaggaccucuuccugcccuucuucagcaacgucacgugguuccacgccauccacguguccgggaccaacggcaccaagcgguucgacaacccggugcugcccuucaacgacggggucuacuucgcgagcaccgagaaguccaacaucauccgcggcuggaucuucgggacgacccucgacagcaagacccagucccugcugaucgugaacaacgccaccaacguggucaucaaggugugcgaguuccaguucugcaacgaccccuuccucggcguguacuaccacaagaacaacaagagcuggauggaguccgaguuccgggucuacagcuccgccaacaacugcacguucgaguacgugagccagcccuuccugauggaccuggagggcaagcaggggaacuucaagaaccuccgcgaguucguguucaagaacaucgacggcuacuucaagaucuacuccaagcacaccccgaucaaccugguccgggaccugccccagggguucagcgcccucgagccccugguggaccugcccaucggcaucaacaucacccgcuuccagacccuccuggcccugcaccgguccuaccucacgccgggggacagcagcuccggcuggaccgcgggcgccgccgccuacuacgugggguaccugcagccccgcaccuuccugcucaaguacaacgagaacggcaccaucacggacgcggucgacugcgcccuggacccccugagcgagaccaagugcacccucaaguccuucaccguggagaaggggaucuaccagacgagcaacuuccgggugcagcccaccgaguccaucguccgcuucccgaacaucaccaaccugugccccuucggcgagguguucaacgccacccgguucgccagcgucuacgccuggaaccgcaagcggaucuccaacugcguggcggacuacagcgugcuguacaacuccgccagcuucuccacguucaagugcuacggcgucagccccaccaagcucaacgaccugugcuucaccaacguguacgccgacuccuucgugauccgcggggacgagguccggcagaucgcccccggccagaccgggaagaucgccgacuacaacuacaagcugccggacgacuucacgggcugcgugaucgcguggaacagcaagaaccucgacuccaaggucgggggcaacuacaacuaccuguaccgccuguuccgcaagagcaaccucaagcccuucgagcgggacaucuccaccgagaucuaccaggccggcagcacccccugcaacgggguggagggcuucaacugcuacuucccccugcaguccuacggguuccagccgaccaacggcgugggguaccagcccuaccggguggucgugcugagcuucgagcuccugcacgcccccgccacggugugcggccccaagaaguccaccaaccuggucaagaacaagugcgugaacuucaacuucaacggccucaccgggaccggcgugcugaccgagagcaacaagaaguuccugccguuccagcaguucgggcgcgacaucgccgacacgaccgacgcgguccgcgacccccagacccuggagauccucgacaucacccccugcagcuucggcgggguguccgugaucacgccgggcaccaacaccagcaaccaggucgccgugcuguaccagggcgugaacugcaccgagguccccguggccauccacgccgaccagcugacgcccaccuggcggguguacuccaccgggagcaacgucuuccagacccgcgccggcugccucaucggggcggagcacgugaacaacuccuacgagugcgacauccccaucggcgccggcaucugcgccagcuaccagacgcagaccaacuccccgcggcgcgcccggagcguggcgucccagagcaucaucgccuacaccaugucccugggggccgagaacagcgucgccuacuccaacaacagcaucgccauccccaccaacuucacgaucuccgugaccaccgagauccugcccgugagcaugaccaagacgagcgucgacugcaccauguacaucugcggcgacuccaccgagugcagcaaccuccugcugcaguacggguccuucugcacccagcucaaccgcgcgcugacgggcaucgccguggagcaggacaagaacacccaggagguguucgcccaggucaagcagaucuacaagacgcccccgaucaaggacuucgggggcuucaacuucagccagauccugcccgaccccuccaagcccagcaagcgguccuucaucgaggaccuccuguucaacaaggugacccuggccgacgccggcuucaucaagcaguacggggacugccucggcgacaucgcggcccgcgaccugaucugcgcccagaaguucaacgggcugaccgugcucccgccccugcugaccgacgagaugaucgcccaguacaccagcgcccuccuggcgggcaccaucacguccggguggaccuucggcgccggcgccgcccugcagauccccuucgcgaugcagauggccuaccgguucaacgggaucggcgucacccagaacgugcucuacgagaaccagaagcugaucgccaaccaguucaacagcgccaucgggaagauccaggacucccugagcuccaccgccagcgcgcucggcaagcugcaggacguggucaaccagaacgcccaggcccugaacacgcucgugaagcagcuguccagcaacuucggggccaucuccagcgugcugaacgacauccucucccgccuggacccgcccgaggccgagguccagaucgaccggcugaucaccggccgccuccagagccugcagaccuacgugacccagcagcugauccgggcggccgagauccgcgccagcgccaaccucgccgcgaccaagauguccgagugcgugcugggccagagcaagcgggucgacuucugcgggaagggcuaccaccugauguccuucccccagagcgcgccccacggggugguguuccuccacgucacguacgugcccgcccaggagaagaacuucaccaccgccccggccaucugccacgacggcaaggcccacuucccccgcgagggggucuucguguccaacggcacccacugguucgugacgcagcggaacuucuacgagccccagaucaucaccaccgacaacaccuucgucagcggcaacugcgacguggugaucgggaucgucaacaacacgguguacgacccccugcagccggagcuggacuccuucaaggaggagcucgacaaguacuucaagaaccacaccagccccgacguggaccugggcgacaucuccgggaucaacgccagcgucgugaacauccagaaggagaucgaccgccugaacgagguggccaagaaccucaacgagucccugaucgaccugcaggagcucggcaaguacgagcaguacaucaaguggcccugguacaucuggcugggcuucaucgccgggcugaucgcgaucgucauggugaccaucaugcucugcugcaugaccagcugcugcuccugccugaagggcugcugcagcugcggguccugcugcaaguucgacgaggacgacagcgagccggugcugaagggcgucaagcuccacuacacgugaugacucgagcugguacugcaugcacgcaaugcuagcugccccuuucccguccuggguaccccgagucucccccgaccucgggucccagguaugcucccaccuccaccugccccacucaccaccucugcuaguuccagacaccucccaagcacgcagcaaugcagcucaaaacgcuuagccuagccacacccccacgggaaacagcagugauuaaccuuuagcaauaaacgaaaguuuaacuaagcuauacuaaccccaggguuggucaauuucgugccagccacacccuggagcuagcaaaaaaaaaaaaaaaaaaaaaaaaaaaaaaaaaaaaaaaaaaaaaaaaaaaaaaaaaaaaaaaaaaaaaaaaaaaaaaaaaaaaaaaaaaaaaaaaaaaa

SEQ ID NO: 26399 - RNA, 4273 nt, Artificial Sequence
  SARS-CoV-2/Wuhan/WIV05/2019__EPI_ISL_402128 spike protein mRNA gc (1-1273)(K986P_V987P_S477N_D614G)
agaauaaacuaguauucuucugguccccacagacucagagagaacccgccaccauguucguguuccugguccuccugccccuggugagcucccagugcgugaaccucaccacccgcacgcagcugccgcccgccuacaccaacagcuucacccggggcgucuacuaccccgacaagguguuccgcuccagcgugcugcacuccacccaggaccucuuccugcccuucuucagcaacgucacgugguuccacgccauccacguguccgggaccaacggcaccaagcgguucgacaacccggugcugcccuucaacgacggggucuacuucgcgagcaccgagaaguccaacaucauccgcggcuggaucuucgggacgacccucgacagcaagacccagucccugcugaucgugaacaacgccaccaacguggucaucaaggugugcgaguuccaguucugcaacgaccccuuccucggcguguacuaccacaagaacaacaagagcuggauggaguccgaguuccgggucuacagcuccgccaacaacugcacguucgaguacgugagccagcccuuccugauggaccuggagggcaagcaggggaacuucaagaaccuccgcgaguucguguucaagaacaucgacggcuacuucaagaucuacuccaagcacaccccgaucaaccugguccgggaccugccccagggguucagcgcccucgagccccugguggaccugcccaucggcaucaacaucacccgcuuccagacccuccuggcccugcaccgguccuaccucacgccgggggacagcagcuccggcuggaccgcgggcgccgccgccuacuacgugggguaccugcagccccgcaccuuccugcucaaguacaacgagaacggcaccaucacggacgcggucgacugcgcccuggacccccugagcgagaccaagugcacccucaaguccuucaccguggagaaggggaucuaccagacgagcaacuuccgggugcagcccaccgaguccaucguccgcuucccgaacaucaccaaccugugccccuucggcgagguguucaacgccacccgguucgccagcgucuacgccuggaaccgcaagcggaucuccaacugcguggcggacuacagcgugcuguacaacuccgccagcuucuccacguucaagugcuacggcgucagccccaccaagcucaacgaccugugcuucaccaacguguacgccgacuccuucgugauccgcggggacgagguccggcagaucgcccccggccagaccgggaagaucgccgacuacaacuacaagcugccggacgacuucacgggcugcgugaucgcguggaacagcaacaaccucgacuccaaggucgggggcaacuacaacuaccuguaccgccuguuccgcaagagcaaccucaagcccuucgagcgggacaucuccaccgagaucuaccaggccggcaacacccccugcaacgggguggagggcuucaacugcuacuucccccugcagagcuacggguuccagccgaccaacggcgugggguaccagcccuaccggguggucgugcuguccuucgagcuccugcacgcccccgccacggugugcggccccaagaaguccaccaaccuggucaagaacaagugcgugaacuucaacuucaacggccucaccgggaccggcgugcugaccgagagcaacaagaaguuccugccguuccagcaguucgggcgcgacaucgccgacacgaccgacgcgguccgcgacccccagacccuggagauccucgacaucacccccugcagcuucggcggggugagcgugaucacgccgggcaccaacaccuccaaccaggucgccgugcuguaccagggcgugaacugcaccgagguccccguggccauccacgccgaccagcugacgcccaccuggcggguguacagcaccggguccaacgucuuccagacccgcgccggcugccucaucggggcggagcacgugaacaacagcuacgagugcgacauccccaucggcgccggcaucugcgccuccuaccagacgcagaccaacagcccgcggcgcgcccgguccguggcgagccaguccaucaucgccuacaccaugagccugggggccgagaacuccgucgccuacagcaacaacuccaucgccauccccaccaacuucacgaucagcgugaccaccgagauccugcccguguccaugaccaagacgagcgucgacugcaccauguacaucugcggcgacagcaccgagugcuccaaccuccugcugcaguacgggagcuucugcacccagcucaaccgcgcgcugacgggcaucgccguggagcaggacaagaacacccaggagguguucgcccaggucaagcagaucuacaagacgcccccgaucaaggacuucgggggcuucaacuucucccagauccugcccgaccccagcaagcccuccaagcggagcuucaucgaggaccuccuguucaacaaggugacccuggccgacgccggcuucaucaagcaguacggggacugccucggcgacaucgcggcccgcgaccugaucugcgcccagaaguucaacgggcugaccgugcucccgccccugcugaccgacgagaugaucgcccaguacaccuccgcccuccuggcgggcaccaucacgagcggguggaccuucggcgccggcgccgcccugcagauccccuucgcgaugcagauggccuaccgguucaacgggaucggcgucacccagaacgugcucuacgagaaccagaagcugaucgccaaccaguucaacuccgccaucgggaagauccaggacagccuguccagcaccgccuccgcgcucggcaagcugcaggacguggucaaccagaacgcccaggcccugaacacgcucgugaagcagcugagcuccaacuucggggccaucagcuccgugcugaacgacauccucagccgccuggacccgcccgaggccgagguccagaucgaccggcugaucaccggccgccuccagucccugcagaccuacgugacccagcagcugauccgggcggccgagauccgcgccagcgccaaccucgccgcgaccaagaugagcgagugcgugcugggccaguccaagcgggucgacuucugcgggaagggcuaccaccugaugagcuucccccaguccgcgccccacggggugguguuccuccacgucacguacgugcccgcccaggagaagaacuucaccaccgccccggccaucugccacgacggcaaggcccacuucccccgcgagggggucuucgugagcaacggcacccacugguucgugacgcagcggaacuucuacgagccccagaucaucaccaccgacaacaccuucgucuccggcaacugcgacguggugaucgggaucgucaacaacacgguguacgacccccugcagccggagcuggacagcuucaaggaggagcucgacaaguacuucaagaaccacaccucccccgacguggaccugggcgacaucagcgggaucaacgccuccgucgugaacauccagaaggagaucgaccgccugaacgagguggccaagaaccucaacgagagccugaucgaccugcaggagcucggcaaguacgagcaguacaucaaguggcccugguacaucuggcugggcuucaucgccgggcugaucgcgaucgucauggugaccaucaugcucugcugcaugaccuccugcugcagcugccugaagggcugcugcuccugcgggagcugcugcaaguucgacgaggacgacuccgagccggugcugaagggcgucaagcuccacuacacgugaugacucgagcugguacugcaugcacgcaaugcuagcugccccuuucccguccuggguaccccgagucucccccgaccucgggucccagguaugcucccaccuccaccugccccacucaccaccucugcuaguuccagacaccucccaagcacgcagcaaugcagcucaaaacgcuuagccuagccacacccccacgggaaacagcagugauuaaccuuuagcaauaaacgaaaguuuaacuaagcuauacuaaccccaggguuggucaauuucgugccagccacacccuggagcuagcaaaaaaaaaaaaaaaaaaaaaaaaaaaaaaaaaaaaaaaaaaaaaaaaaaaaaaaaaaaaaaaaaaaaaaaaaaaaaaaaaaaaaaaaaaaaaaaaaaaa

SEQ ID NO: 26400 - RNA, 4273 nt, Artificial Sequence
  SARS-CoV-2/Wuhan/WIV05/2019__EPI_ISL_402128 spike protein mRNA gc (1-1273)(K986P_V987P_N501Y_D614G)
agaauaaacuaguauucuucugguccccacagacucagagagaacccgccaccauguucguguuccugguccuccugccccuggugagcucccagugcgugaaccucaccacccgcacgcagcugccgcccgccuacaccaacagcuucacccggggcgucuacuaccccgacaagguguuccgcuccagcgugcugcacuccacccaggaccucuuccugcccuucuucagcaacgucacgugguuccacgccauccacguguccgggaccaacggcaccaagcgguucgacaacccggugcugcccuucaacgacggggucuacuucgcgagcaccgagaaguccaacaucauccgcggcuggaucuucgggacgacccucgacagcaagacccagucccugcugaucgugaacaacgccaccaacguggucaucaaggugugcgaguuccaguucugcaacgaccccuuccucggcguguacuaccacaagaacaacaagagcuggauggaguccgaguuccgggucuacagcuccgccaacaacugcacguucgaguacgugagccagcccuuccugauggaccuggagggcaagcaggggaacuucaagaaccuccgcgaguucguguucaagaacaucgacggcuacuucaagaucuacuccaagcacaccccgaucaaccugguccgggaccugccccagggguucagcgcccucgagccccugguggaccugcccaucggcaucaacaucacccgcuuccagacccuccuggcccugcaccgguccuaccucacgccgggggacagcagcuccggcuggaccgcgggcgccgccgccuacuacgugggguaccugcagccccgcaccuuccugcucaaguacaacgagaacggcaccaucacggacgcggucgacugcgcccuggacccccugagcgagaccaagugcacccucaaguccuucaccguggagaaggggaucuaccagacgagcaacuuccgggugcagcccaccgaguccaucguccgcuucccgaacaucaccaaccugugccccuucggcgagguguucaacgccacccgguucgccagcgucuacgccuggaaccgcaagcggaucuccaacugcguggcggacuacagcgugcuguacaacuccgccagcuucuccacguucaagugcuacggcgucagccccaccaagcucaacgaccugugcuucaccaacguguacgccgacuccuucgugauccgcggggacgagguccggcagaucgcccccggccagaccgggaagaucgccgacuacaacuacaagcugccggacgacuucacgggcugcgugaucgcguggaacagcaacaaccucgacuccaaggucgggggcaacuacaacuaccuguaccgccuguuccgcaagagcaaccucaagcccuucgagcgggacaucuccaccgagaucuaccaggccggcagcacccccugcaacgggguggagggcuucaacugcuacuucccccugcaguccuacggguuccagccgaccuacggcgugggguaccagcccuaccggguggucgugcugagcuucgagcuccugcacgcccccgccacggugugcggccccaagaaguccaccaaccuggucaagaacaagugcgugaacuucaacuucaacggccucaccgggaccggcgugcugaccgagagcaacaagaaguuccugccguuccagcaguucgggcgcgacaucgccgacacgaccgacgcgguccgcgacccccagacccuggagauccucgacaucacccccugcagcuucggcgggguguccgugaucacgccgggcaccaacaccagcaaccaggucgccgugcuguaccagggcgugaacugcaccgagguccccguggccauccacgccgaccagcugacgcccaccuggcggguguacuccaccgggagcaacgucuuccagacccgcgccggcugccucaucggggcggagcacgugaacaacuccuacgagugcgacauccccaucggcgccggcaucugcgccagcuaccagacgcagaccaacuccccgcggcgcgcccggagcguggcgucccagagcaucaucgccuacaccaugucccugggggccgagaacagcgucgccuacuccaacaacagcaucgccauccccaccaacuucacgaucuccgugaccaccgagauccugcccgugagcaugaccaagacgagcgucgacugcaccauguacaucugcggcgacuccaccgagugcagcaaccuccugcugcaguacggguccuucugcacccagcucaaccgcgcgcugacgggcaucgccguggagcaggacaagaacacccaggagguguucgcccaggucaagcagaucuacaagacgcccccgaucaaggacuucgggggcuucaacuucagccagauccugcccgaccccuccaagcccagcaagcgguccuucaucgaggaccuccuguucaacaaggugacccuggccgacgccggcuucaucaagcaguacggggacugccucggcgacaucgcggcccgcgaccugaucugcgcccagaaguucaacgggcugaccgugcucccgccccugcugaccgacgagaugaucgcccaguacaccagcgcccuccuggcgggcaccaucacguccggguggaccuucggcgccggcgccgcccugcagauccccuucgcgaugcagauggccuaccgguucaacgggaucggcgucacccagaacgugcucuacgagaaccagaagcugaucgccaaccaguucaacagcgccaucgggaagauccaggacucccugagcuccaccgccagcgcgcucggcaagcugcaggacguggucaaccagaacgcccaggcccugaacacgcucgugaagcagcuguccagcaacuucggggccaucuccagcgugcugaacgacauccucucccgccuggacccgcccgaggccgagguccagaucgaccggcugaucaccggccgccuccagagccugcagaccuacgugacccagcagcugauccgggcggccgagauccgcgccagcgccaaccucgccgcgaccaagauguccgagugcgugcugggccagagcaagcgggucgacuucugcgggaagggcuaccaccugauguccuucccccagagcgcgccccacggggugguguuccuccacgucacguacgugcccgcccaggagaagaacuucaccaccgccccggccaucugccacgacggcaaggcccacuucccccgcgagggggucuucguguccaacggcacccacugguucgugacgcagcggaacuucuacgagccccagaucaucaccaccgacaacaccuucgucagcggcaacugcgacguggugaucgggaucgucaacaacacgguguacgacccccugcagccggagcuggacuccuucaaggaggagcucgacaaguacuucaagaaccacaccagccccgacguggaccugggcgacaucuccgggaucaacgccagcgucgugaacauccagaaggagaucgaccgccugaacgagguggccaagaaccucaacgagucccugaucgaccugcaggagcucggcaaguacgagcaguacaucaaguggcccugguacaucuggcugggcuucaucgccgggcugaucgcgaucgucauggugaccaucaugcucugcugcaugaccagcugcugcuccugccugaagggcugcugcagcugcggguccugcugcaaguucgacgaggacgacagcgagccggugcugaagggcgucaagcuccacuacacgugaugacucgagcugguacugcaugcacgcaaugcuagcugccccuuucccguccuggguaccccgagucucccccgaccucgggucccagguaugcucccaccuccaccugccccacucaccaccucugcuaguuccagacaccucccaagcacgcagcaaugcagcucaaaacgcuuagccuagccacacccccacgggaaacagcagugauuaaccuuuagcaauaaacgaaaguuuaacuaagcuauacuaaccccaggguuggucaauuucgugccagccacacccuggagcuagcaaaaaaaaaaaaaaaaaaaaaaaaaaaaaaaaaaaaaaaaaaaaaaaaaaaaaaaaaaaaaaaaaaaaaaaaaaaaaaaaaaaaaaaaaaaaaaaaaaaa

SEQ ID NO: 26401 - RNA, 4267 nt, Artificial Sequence
  SARS-CoV-2/Wuhan/WIV05/2019__EPI_ISL_402128 spike protein mRNA gc (1-1273)(K986P_V987P_H69del_V70del_D614G)
agaauaaacuaguauucuucugguccccacagacucagagagaacccgccaccauguucguguuccugguccuccugccccuggugagcucccagugcgugaaccucaccacccgcacgcagcugccgcccgccuacaccaacagcuucacccggggcgucuacuaccccgacaagguguuccgcuccagcgugcugcacuccacccaggaccucuuccugcccuucuucagcaacgucacgugguuccacgccaucuccgggaccaacggcaccaagcgguucgacaacccggugcugcccuucaacgacgggguguacuucgcgagcaccgagaaguccaacaucauccgcggcuggaucuucgggacgacccucgacagcaagacccagucccugcugaucgucaacaacgccaccaacguggugaucaaggucugcgaguuccaguucugcaacgaccccuuccucggcguguacuaccacaagaacaacaagagcuggauggaguccgaguuccggguguacagcuccgccaacaacugcacguucgaguacgucagccagcccuuccugauggaccuggagggcaagcaggggaacuucaagaaccuccgcgaguucguguucaagaacaucgacggcuacuucaagaucuacuccaagcacaccccgaucaaccuggugcgggaccugccccagggguucagcgcccucgagccccuggucgaccugcccaucggcaucaacaucacccgcuuccagacccuccuggcccugcaccgguccuaccucacgccgggggacagcagcuccggcuggaccgcgggcgccgccgccuacuacgugggguaccugcagccccgcaccuuccugcucaaguacaacgagaacggcaccaucacggacgcgguggacugcgcccuggacccccugagcgagaccaagugcacccucaaguccuucaccgucgagaaggggaucuaccagacgagcaacuuccgggugcagcccaccgaguccaucgugcgcuucccgaacaucaccaaccugugccccuucggcgaggucuucaacgccacccgguucgccagcguguacgccuggaaccgcaagcggaucuccaacugcgucgcggacuacagcgugcuguacaacuccgccagcuucuccacguucaagugcuacggcgugagccccaccaagcucaacgaccugugcuucaccaacgucuacgccgacuccuucgugauccgcggggacgaggugcggcagaucgcccccggccagaccgggaagaucgccgacuacaacuacaagcugccggacgacuucacgggcugcgucaucgcguggaacagcaacaaccucgacuccaaggucgggggcaacuacaacuaccuguaccgccuguuccgcaagagcaaccucaagcccuucgagcgggacaucuccaccgagaucuaccaggccggcagcacccccugcaacgggguggagggcuucaacugcuacuucccccugcaguccuacggguuccagccgaccaacggcgugggguaccagcccuaccggguggugguccugagcuucgagcuccugcacgcccccgccacggugugcggccccaagaaguccaccaaccuggugaagaacaagugcgucaacuucaacuucaacggccucaccgggaccggcgugcugaccgagagcaacaagaaguuccugccguuccagcaguucgggcgcgacaucgccgacacgaccgacgcggugcgcgacccccagacccuggagauccucgacaucacccccugcagcuucggcggggucuccgugaucacgccgggcaccaacaccagcaaccagguggccguccuguaccagggcgugaacugcaccgaggugcccgucgccauccacgccgaccagcugacgcccaccuggcggguguacuccaccgggagcaacguguuccagacccgcgccggcugccucaucggggcggagcacgucaacaacuccuacgagugcgacauccccaucggcgccggcaucugcgccagcuaccagacgcagaccaacuccccgcggcgcgcccggagcguggcgucccagagcaucaucgccuacaccaugucccugggggccgagaacagcguggccuacuccaacaacagcaucgccauccccaccaacuucacgaucuccgucaccaccgagauccugcccgugagcaugaccaagacgagcguggacugcaccauguacaucugcggcgacuccaccgagugcagcaaccuccugcugcaguacggguccuucugcacccagcucaaccgcgcgcugacgggcaucgccgucgagcaggacaagaacacccaggagguguucgcccaggugaagcagaucuacaagacgcccccgaucaaggacuucgggggcuucaacuucagccagauccugcccgaccccuccaagcccagcaagcgguccuucaucgaggaccuccuguucaacaaggucacccuggccgacgccggcuucaucaagcaguacggggacugccucggcgacaucgcggcccgcgaccugaucugcgcccagaaguucaacgggcugaccgugcucccgccccugcugaccgacgagaugaucgcccaguacaccagcgcccuccuggcgggcaccaucacguccggguggaccuucggcgccggcgccgcccugcagauccccuucgcgaugcagauggccuaccgguucaacgggaucggcgugacccagaacguccucuacgagaaccagaagcugaucgccaaccaguucaacagcgccaucgggaagauccaggacucccugagcuccaccgccagcgcgcucggcaagcugcaggacguggugaaccagaacgcccaggcccugaacacgcucgucaagcagcuguccagcaacuucggggccaucuccagcgugcugaacgacauccucucccgccuggacccgcccgaggccgaggugcagaucgaccggcugaucaccggccgccuccagagccugcagaccuacgucacccagcagcugauccgggcggccgagauccgcgccagcgccaaccucgccgcgaccaagauguccgagugcgugcugggccagagcaagcggguggacuucugcgggaagggcuaccaccugauguccuucccccagagcgcgccccacggggucguguuccuccacgugacguacguccccgcccaggagaagaacuucaccaccgccccggccaucugccacgacggcaaggcccacuucccccgcgaggggguguucgucuccaacggcacccacugguucgugacgcagcggaacuucuacgagccccagaucaucaccaccgacaacaccuucgugagcggcaacugcgacgucgugaucgggaucgugaacaacacggucuacgacccccugcagccggagcuggacuccuucaaggaggagcucgacaaguacuucaagaaccacaccagccccgacguggaccugggcgacaucuccgggaucaacgccagcguggucaacauccagaaggagaucgaccgccugaacgagguggccaagaaccucaacgagucccugaucgaccugcaggagcucggcaaguacgagcaguacaucaaguggcccugguacaucuggcugggcuucaucgccgggcugaucgcgaucgugauggucaccaucaugcucugcugcaugaccagcugcugcuccugccugaagggcugcugcagcugcggguccugcugcaaguucgacgaggacgacagcgagccggugcugaagggcgugaagcuccacuacacgugaugacucgagcugguacugcaugcacgcaaugcuagcugccccuuucccguccuggguaccccgagucucccccgaccucgggucccagguaugcucccaccuccaccugccccacucaccaccucugcuaguuccagacaccucccaagcacgcagcaaugcagcucaaaacgcuuagccuagccacacccccacgggaaacagcagugauuaaccuuuagcaauaaacgaaaguuuaacuaagcuauacuaaccccaggguuggucaauuucgugccagccacacccuggagcuagcaaaaaaaaaaaaaaaaaaaaaaaaaaaaaaaaaaaaaaaaaaaaaaaaaaaaaaaaaaaaaaaaaaaaaaaaaaaaaaaaaaaaaaaaaaaaaaaaaaaa

SEQ ID NO: 26402 - RNA, 4273 nt, Artificial Sequence
  SARS-CoV-2/Wuhan/WIV05/2019__EPI_ISL_402128 spike protein mRNA gc (1-1273)(K986P_V987P_Y453F_D614G)
agaauaaacuaguauucuucugguccccacagacucagagagaacccgccaccauguucguguuccugguccuccugccccuggugagcucccagugcgugaaccucaccacccgcacgcagcugccgcccgccuacaccaacagcuucacccggggcgucuacuaccccgacaagguguuccgcuccagcgugcugcacuccacccaggaccucuuccugcccuucuucagcaacgucacgugguuccacgccauccacguguccgggaccaacggcaccaagcgguucgacaacccggugcugcccuucaacgacggggucuacuucgcgagcaccgagaaguccaacaucauccgcggcuggaucuucgggacgacccucgacagcaagacccagucccugcugaucgugaacaacgccaccaacguggucaucaaggugugcgaguuccaguucugcaacgaccccuuccucggcguguacuaccacaagaacaacaagagcuggauggaguccgaguuccgggucuacagcuccgccaacaacugcacguucgaguacgugagccagcccuuccugauggaccuggagggcaagcaggggaacuucaagaaccuccgcgaguucguguucaagaacaucgacggcuacuucaagaucuacuccaagcacaccccgaucaaccugguccgggaccugccccagggguucagcgcccucgagccccugguggaccugcccaucggcaucaacaucacccgcuuccagacccuccuggcccugcaccgguccuaccucacgccgggggacagcagcuccggcuggaccgcgggcgccgccgccuacuacgugggguaccugcagccccgcaccuuccugcucaaguacaacgagaacggcaccaucacggacgcggucgacugcgcccuggacccccugagcgagaccaagugcacccucaaguccuucaccguggagaaggggaucuaccagacgagcaacuuccgggugcagcccaccgaguccaucguccgcuucccgaacaucaccaaccugugccccuucggcgagguguucaacgccacccgguucgccagcgucuacgccuggaaccgcaagcggaucuccaacugcguggcggacuacagcgugcuguacaacuccgccagcuucuccacguucaagugcuacggcgucagccccaccaagcucaacgaccugugcuucaccaacguguacgccgacuccuucgugauccgcggggacgagguccggcagaucgcccccggccagaccgggaagaucgccgacuacaacuacaagcugccggacgacuucacgggcugcgugaucgcguggaacagcaacaaccucgacuccaaggucgggggcaacuacaacuaccuguuccgccuguuccgcaagagcaaccucaagcccuucgagcgggacaucuccaccgagaucuaccaggccggcagcacccccugcaacgggguggagggcuucaacugcuacuucccccugcaguccuacggguuccagccgaccaacggcgugggguaccagcccuaccggguggucgugcugagcuucgagcuccugcacgcccccgccacggugugcggccccaagaaguccaccaaccuggucaagaacaagugcgugaacuucaacuucaacggccucaccgggaccggcgugcugaccgagagcaacaagaaguuccugccguuccagcaguucgggcgcgacaucgccgacacgaccgacgcgguccgcgacccccagacccuggagauccucgacaucacccccugcagcuucggcgggguguccgugaucacgccgggcaccaacaccagcaaccaggucgccgugcuguaccagggcgugaacugcaccgagguccccguggccauccacgccgaccagcugacgcccaccuggcggguguacuccaccgggagcaacgucuuccagacccgcgccggcugccucaucggggcggagcacgugaacaacuccuacgagugcgacauccccaucggcgccggcaucugcgccagcuaccagacgcagaccaacuccccgcggcgcgcccggagcguggcgucccagagcaucaucgccuacaccaugucccugggggccgagaacagcgucgccuacuccaacaacagcaucgccauccccaccaacuucacgaucuccgugaccaccgagauccugcccgugagcaugaccaagacgagcgucgacugcaccauguacaucugcggcgacuccaccgagugcagcaaccuccugcugcaguacggguccuucugcacccagcucaaccgcgcgcugacgggcaucgccguggagcaggacaagaacacccaggagguguucgcccaggucaagcagaucuacaagacgcccccgaucaaggacuucgggggcuucaacuucagccagauccugcccgaccccuccaagcccagcaagcgguccuucaucgaggaccuccuguucaacaaggugacccuggccgacgccggcuucaucaagcaguacggggacugccucggcgacaucgcggcccgcgaccugaucugcgcccagaaguucaacgggcugaccgugcucccgccccugcugaccgacgagaugaucgcccaguacaccagcgcccuccuggcgggcaccaucacguccggguggaccuucggcgccggcgccgcccugcagauccccuucgcgaugcagauggccuaccgguucaacgggaucggcgucacccagaacgugcucuacgagaaccagaagcugaucgccaaccaguucaacagcgccaucgggaagauccaggacucccugagcuccaccgccagcgcgcucggcaagcugcaggacguggucaaccagaacgcccaggcccugaacacgcucgugaagcagcuguccagcaacuucggggccaucuccagcgugcugaacgacauccucucccgccuggacccgcccgaggccgagguccagaucgaccggcugaucaccggccgccuccagagccugcagaccuacgugacccagcagcugauccgggcggccgagauccgcgccagcgccaaccucgccgcgaccaagauguccgagugcgugcugggccagagcaagcgggucgacuucugcgggaagggcuaccaccugauguccuucccccagagcgcgccccacggggugguguuccuccacgucacguacgugcccgcccaggagaagaacuucaccaccgccccggccaucugccacgacggcaaggcccacuucccccgcgagggggucuucguguccaacggcacccacugguucgugacgcagcggaacuucuacgagccccagaucaucaccaccgacaacaccuucgucagcggcaacugcgacguggugaucgggaucgucaacaacacgguguacgacccccugcagccggagcuggacuccuucaaggaggagcucgacaaguacuucaagaaccacaccagccccgacguggaccugggcgacaucuccgggaucaacgccagcgucgugaacauccagaaggagaucgaccgccugaacgagguggccaagaaccucaacgagucccugaucgaccugcaggagcucggcaaguacgagcaguacaucaaguggcccugguacaucuggcugggcuucaucgccgggcugaucgcgaucgucauggugaccaucaugcucugcugcaugaccagcugcugcuccugccugaagggcugcugcagcugcggguccugcugcaaguucgacgaggacgacagcgagccggugcugaagggcgucaagcuccacuacacgugaugacucgagcugguacugcaugcacgcaaugcuagcugccccuuucccguccuggguaccccgagucucccccgaccucgggucccagguaugcucccaccuccaccugccccacucaccaccucugcuaguuccagacaccucccaagcacgcagcaaugcagcucaaaacgcuuagccuagccacacccccacgggaaacagcagugauuaaccuuuagcaauaaacgaaaguuuaacuaagcuauacuaaccccaggguuggucaauuucgugccagccacacccuggagcuagcaaaaaaaaaaaaaaaaaaaaaaaaaaaaaaaaaaaaaaaaaaaaaaaaaaaaaaaaaaaaaaaaaaaaaaaaaaaaaaaaaaaaaaaaaaaaaaaaaaaa

SEQ ID NO: 26403 - RNA, 4273 nt, Artificial Sequence
  SARS-CoV-2/Wuhan/WIV05/2019__EPI_ISL_402128 spike protein mRNA gc (1-1273)(K986P_V987P_D614G_I692V)
agaauaaacuaguauucuucugguccccacagacucagagagaacccgccaccauguucguguuccugguccuccugccccuggugagcucccagugcgugaaccucaccacccgcacgcagcugccgcccgccuacaccaacagcuucacccggggcgucuacuaccccgacaagguguuccgcuccagcgugcugcacuccacccaggaccucuuccugcccuucuucagcaacgucacgugguuccacgccauccacguguccgggaccaacggcaccaagcgguucgacaacccggugcugcccuucaacgacggggucuacuucgcgagcaccgagaaguccaacaucauccgcggcuggaucuucgggacgacccucgacagcaagacccagucccugcugaucgugaacaacgccaccaacguggucaucaaggugugcgaguuccaguucugcaacgaccccuuccucggcguguacuaccacaagaacaacaagagcuggauggaguccgaguuccgggucuacagcuccgccaacaacugcacguucgaguacgugagccagcccuuccugauggaccuggagggcaagcaggggaacuucaagaaccuccgcgaguucguguucaagaacaucgacggcuacuucaagaucuacuccaagcacaccccgaucaaccugguccgggaccugccccagggguucagcgcccucgagccccugguggaccugcccaucggcaucaacaucacccgcuuccagacccuccuggcccugcaccgguccuaccucacgccgggggacagcagcuccggcuggaccgcgggcgccgccgccuacuacgugggguaccugcagccccgcaccuuccugcucaaguacaacgagaacggcaccaucacggacgcggucgacugcgcccuggacccccugagcgagaccaagugcacccucaaguccuucaccguggagaaggggaucuaccagacgagcaacuuccgggugcagcccaccgaguccaucguccgcuucccgaacaucaccaaccugugccccuucggcgagguguucaacgccacccgguucgccagcgucuacgccuggaaccgcaagcggaucuccaacugcguggcggacuacagcgugcuguacaacuccgccagcuucuccacguucaagugcuacggcgucagccccaccaagcucaacgaccugugcuucaccaacguguacgccgacuccuucgugauccgcggggacgagguccggcagaucgcccccggccagaccgggaagaucgccgacuacaacuacaagcugccggacgacuucacgggcugcgugaucgcguggaacagcaacaaccucgacuccaaggucgggggcaacuacaacuaccuguaccgccuguuccgcaagagcaaccucaagcccuucgagcgggacaucuccaccgagaucuaccaggccggcagcacccccugcaacgggguggagggcuucaacugcuacuucccccugcaguccuacggguuccagccgaccaacggcgugggguaccagcccuaccggguggucgugcugagcuucgagcuccugcacgcccccgccacggugugcggccccaagaaguccaccaaccuggucaagaacaagugcgugaacuucaacuucaacggccucaccgggaccggcgugcugaccgagagcaacaagaaguuccugccguuccagcaguucgggcgcgacaucgccgacacgaccgacgcgguccgcgacccccagacccuggagauccucgacaucacccccugcagcuucggcgggguguccgugaucacgccgggcaccaacaccagcaaccaggucgccgugcuguaccagggcgugaacugcaccgagguccccguggccauccacgccgaccagcugacgcccaccuggcggguguacuccaccgggagcaacgucuuccagacccgcgccggcugccucaucggggcggagcacgugaacaacuccuacgagugcgacauccccaucggcgccggcaucugcgccagcuaccagacgcagaccaacuccccgcggcgcgcccggagcguggcgucccagagcgucaucgccuacaccaugucccugggggccgagaacagcguggccuacuccaacaacagcaucgccauccccaccaacuucacgaucuccgugaccaccgagauccugcccgucagcaugaccaagacgagcguggacugcaccauguacaucugcggcgacuccaccgagugcagcaaccuccugcugcaguacggguccuucugcacccagcucaaccgcgcgcugacgggcaucgccguggagcaggacaagaacacccaggaggucuucgcccaggugaagcagaucuacaagacgcccccgaucaaggacuucgggggcuucaacuucagccagauccugcccgaccccuccaagcccagcaagcgguccuucaucgaggaccuccuguucaacaaggugacccuggccgacgccggcuucaucaagcaguacggggacugccucggcgacaucgcggcccgcgaccugaucugcgcccagaaguucaacgggcugaccguccucccgccccugcugaccgacgagaugaucgcccaguacaccagcgcccuccuggcgggcaccaucacguccggguggaccuucggcgccggcgccgcccugcagauccccuucgcgaugcagauggccuaccgguucaacgggaucggcgugacccagaacgugcucuacgagaaccagaagcugaucgccaaccaguucaacagcgccaucgggaagauccaggacucccugagcuccaccgccagcgcgcucggcaagcugcaggacgucgugaaccagaacgcccaggcccugaacacgcucgugaagcagcuguccagcaacuucggggccaucuccagcguccugaacgacauccucucccgccuggacccgcccgaggccgaggugcagaucgaccggcugaucaccggccgccuccagagccugcagaccuacgugacccagcagcugauccgggcggccgagauccgcgccagcgccaaccucgccgcgaccaagauguccgagugcguccugggccagagcaagcggguggacuucugcgggaagggcuaccaccugauguccuucccccagagcgcgccccacgggguggucuuccuccacgugacguacguccccgcccaggagaagaacuucaccaccgccccggccaucugccacgacggcaaggcccacuucccccgcgaggggguguucguguccaacggcacccacugguucgucacgcagcggaacuucuacgagccccagaucaucaccaccgacaacaccuucgugagcggcaacugcgacguggucaucgggaucgugaacaacacgguguacgacccccugcagccggagcuggacuccuucaaggaggagcucgacaaguacuucaagaaccacaccagccccgacgucgaccugggcgacaucuccgggaucaacgccagcguggugaacauccagaaggagaucgaccgccugaacgaggucgccaagaaccucaacgagucccugaucgaccugcaggagcucggcaaguacgagcaguacaucaaguggcccugguacaucuggcugggcuucaucgccgggcugaucgcgaucgugauggugaccaucaugcucugcugcaugaccagcugcugcuccugccugaagggcugcugcagcugcggguccugcugcaaguucgacgaggacgacagcgagccgguccugaagggcgugaagcuccacuacacgugaugacucgagcugguacugcaugcacgcaaugcuagcugccccuuucccguccuggguaccccgagucucccccgaccucgggucccagguaugcucccaccuccaccugccccacucaccaccucugcuaguuccagacaccucccaagcacgcagcaaugcagcucaaaacgcuuagccuagccacacccccacgggaaacagcagugauuaaccuuuagcaauaaacgaaaguuuaacuaagcuauacuaaccccaggguuggucaauuucgugccagccacacccuggagcuagcaaaaaaaaaaaaaaaaaaaaaaaaaaaaaaaaaaaaaaaaaaaaaaaaaaaaaaaaaaaaaaaaaaaaaaaaaaaaaaaaaaaaaaaaaaaaaaaaaaaa

SEQ ID NO: 26404 - RNA, 4273 nt, Artificial Sequence
  SARS-CoV-2/Wuhan/WIV05/2019__EPI_ISL_402128 spike protein mRNA gc (1-1273)(K986P_V987P_D614G_M1229I)
agaauaaacuaguauucuucugguccccacagacucagagagaacccgccaccauguucguguuccugguccuccugccccuggugagcucccagugcgugaaccucaccacccgcacgcagcugccgcccgccuacaccaacagcuucacccggggcgucuacuaccccgacaagguguuccgcuccagcgugcugcacuccacccaggaccucuuccugcccuucuucagcaacgucacgugguuccacgccauccacguguccgggaccaacggcaccaagcgguucgacaacccggugcugcccuucaacgacggggucuacuucgcgagcaccgagaaguccaacaucauccgcggcuggaucuucgggacgacccucgacagcaagacccagucccugcugaucgugaacaacgccaccaacguggucaucaaggugugcgaguuccaguucugcaacgaccccuuccucggcguguacuaccacaagaacaacaagagcuggauggaguccgaguuccgggucuacagcuccgccaacaacugcacguucgaguacgugagccagcccuuccugauggaccuggagggcaagcaggggaacuucaagaaccuccgcgaguucguguucaagaacaucgacggcuacuucaagaucuacuccaagcacaccccgaucaaccugguccgggaccugccccagggguucagcgcccucgagccccugguggaccugcccaucggcaucaacaucacccgcuuccagacccuccuggcccugcaccgguccuaccucacgccgggggacagcagcuccggcuggaccgcgggcgccgccgccuacuacgugggguaccugcagccccgcaccuuccugcucaaguacaacgagaacggcaccaucacggacgcggucgacugcgcccuggacccccugagcgagaccaagugcacccucaaguccuucaccguggagaaggggaucuaccagacgagcaacuuccgggugcagcccaccgaguccaucguccgcuucccgaacaucaccaaccugugccccuucggcgagguguucaacgccacccgguucgccagcgucuacgccuggaaccgcaagcggaucuccaacugcguggcggacuacagcgugcuguacaacuccgccagcuucuccacguucaagugcuacggcgucagccccaccaagcucaacgaccugugcuucaccaacguguacgccgacuccuucgugauccgcggggacgagguccggcagaucgcccccggccagaccgggaagaucgccgacuacaacuacaagcugccggacgacuucacgggcugcgugaucgcguggaacagcaacaaccucgacuccaaggucgggggcaacuacaacuaccuguaccgccuguuccgcaagagcaaccucaagcccuucgagcgggacaucuccaccgagaucuaccaggccggcagcacccccugcaacgggguggagggcuucaacugcuacuucccccugcaguccuacggguuccagccgaccaacggcgugggguaccagcccuaccggguggucgugcugagcuucgagcuccugcacgcccccgccacggugugcggccccaagaaguccaccaaccuggucaagaacaagugcgugaacuucaacuucaacggccucaccgggaccggcgugcugaccgagagcaacaagaaguuccugccguuccagcaguucgggcgcgacaucgccgacacgaccgacgcgguccgcgacccccagacccuggagauccucgacaucacccccugcagcuucggcgggguguccgugaucacgccgggcaccaacaccagcaaccaggucgccgugcuguaccagggcgugaacugcaccgagguccccguggccauccacgccgaccagcugacgcccaccuggcggguguacuccaccgggagcaacgucuuccagacccgcgccggcugccucaucggggcggagcacgugaacaacuccuacgagugcgacauccccaucggcgccggcaucugcgccagcuaccagacgcagaccaacuccccgcggcgcgcccggagcguggcgucccagagcaucaucgccuacaccaugucccugggggccgagaacagcgucgccuacuccaacaacagcaucgccauccccaccaacuucacgaucuccgugaccaccgagauccugcccgugagcaugaccaagacgagcgucgacugcaccauguacaucugcggcgacuccaccgagugcagcaaccuccugcugcaguacggguccuucugcacccagcucaaccgcgcgcugacgggcaucgccguggagcaggacaagaacacccaggagguguucgcccaggucaagcagaucuacaagacgcccccgaucaaggacuucgggggcuucaacuucagccagauccugcccgaccccuccaagcccagcaagcgguccuucaucgaggaccuccuguucaacaaggugacccuggccgacgccggcuucaucaagcaguacggggacugccucggcgacaucgcggcccgcgaccugaucugcgcccagaaguucaacgggcugaccgugcucccgccccugcugaccgacgagaugaucgcccaguacaccagcgcccuccuggcgggcaccaucacguccggguggaccuucggcgccggcgccgcccugcagauccccuucgcgaugcagauggccuaccgguucaacgggaucggcgucacccagaacgugcucuacgagaaccagaagcugaucgccaaccaguucaacagcgccaucgggaagauccaggacucccugagcuccaccgccagcgcgcucggcaagcugcaggacguggucaaccagaacgcccaggcccugaacacgcucgugaagcagcuguccagcaacuucggggccaucuccagcgugcugaacgacauccucucccgccuggacccgcccgaggccgagguccagaucgaccggcugaucaccggccgccuccagagccugcagaccuacgugacccagcagcugauccgggcggccgagauccgcgccagcgccaaccucgccgcgaccaagauguccgagugcgugcugggccagagcaagcgggucgacuucugcgggaagggcuaccaccugauguccuucccccagagcgcgccccacggggugguguuccuccacgucacguacgugcccgcccaggagaagaacuucaccaccgccccggccaucugccacgacggcaaggcccacuucccccgcgagggggucuucguguccaacggcacccacugguucgugacgcagcggaacuucuacgagccccagaucaucaccaccgacaacaccuucgucagcggcaacugcgacguggugaucgggaucgucaacaacacgguguacgacccccugcagccggagcuggacuccuucaaggaggagcucgacaaguacuucaagaaccacaccagccccgacguggaccugggcgacaucuccgggaucaacgccagcgucgugaacauccagaaggagaucgaccgccugaacgagguggccaagaaccucaacgagucccugaucgaccugcaggagcucggcaaguacgagcaguacaucaaguggcccugguacaucuggcugggcuucaucgccgggcugaucgcgaucgucaucgugaccaucaugcucugcugcaugaccagcugcugcuccugccugaagggcugcugcagcugcggguccugcugcaaguucgacgaggacgacagcgagccggugcugaagggcgucaagcuccacuacacgugaugacucgagcugguacugcaugcacgcaaugcuagcugccccuuucccguccuggguaccccgagucucccccgaccucgggucccagguaugcucccaccuccaccugccccacucaccaccucugcuaguuccagacaccucccaagcacgcagcaaugcagcucaaaacgcuuagccuagccacacccccacgggaaacagcagugauuaaccuuuagcaauaaacgaaaguuuaacuaagcuauacuaaccccaggguuggucaauuucgugccagccacacccuggagcuagcaaaaaaaaaaaaaaaaaaaaaaaaaaaaaaaaaaaaaaaaaaaaaaaaaaaaaaaaaaaaaaaaaaaaaaaaaaaaaaaaaaaaaaaaaaaaaaaaaaaa

SEQ ID NO: 26405 - RNA, 4267 nt, Artificial Sequence
  SARS-CoV-2/Wuhan/WIV05/2019__EPI_ISL_402128 spike protein mRNA gc (1-1273)(K986P_V987P_H69del_V70del_A222V_Y453F_S477N_D614G_I692V)
agaauaaacuaguauucuucugguccccacagacucagagagaacccgccaccauguucguguuccugguccuccugccccuggugagcucccagugcgugaaccucaccacccgcacgcagcugccgcccgccuacaccaacagcuucacccggggcgucuacuaccccgacaagguguuccgcuccagcgugcugcacuccacccaggaccucuuccugcccuucuucagcaacgucacgugguuccacgccaucuccgggaccaacggcaccaagcgguucgacaacccggugcugcccuucaacgacgggguguacuucgcgagcaccgagaaguccaacaucauccgcggcuggaucuucgggacgacccucgacagcaagacccagucccugcugaucgucaacaacgccaccaacguggugaucaaggucugcgaguuccaguucugcaacgaccccuuccucggcguguacuaccacaagaacaacaagagcuggauggaguccgaguuccggguguacagcuccgccaacaacugcacguucgaguacgucagccagcccuuccugauggaccuggagggcaagcaggggaacuucaagaaccuccgcgaguucguguucaagaacaucgacggcuacuucaagaucuacuccaagcacaccccgaucaaccuggugcgggaccugccccagggguucagcguccucgagccccugguggaccugcccaucggcaucaacaucacccgcuuccagacccuccuggcccugcaccgguccuaccucacgccgggggacagcagcuccggcuggaccgccggcgcggccgccuacuacgugggguaccugcagccccgcaccuuccugcucaaguacaacgagaacggcaccaucacggacgccgucgacugcgcgcuggacccccugagcgagaccaagugcacccucaaguccuucaccguggagaaggggaucuaccagacgagcaacuuccgggugcagcccaccgaguccaucguccgcuucccgaacaucaccaaccugugccccuucggcgagguguucaacgccacccgguucgccagcgucuacgccuggaaccgcaagcggaucuccaacugcguggccgacuacagcgugcuguacaacuccgcgagcuucuccacguucaagugcuacggcgucagccccaccaagcucaacgaccugugcuucaccaacguguacgccgacuccuucgugauccgcggggacgagguccggcagaucgcccccggccagaccgggaagaucgccgacuacaacuacaagcugccggacgacuucacgggcugcgugaucgccuggaacagcaacaaccucgacuccaaggucgggggcaacuacaacuaccuguuccgccuguuccgcaagagcaaccucaagcccuucgagcgggacaucuccaccgagaucuaccaggcgggcaacacccccugcaacgggguggagggcuucaacugcuacuucccccugcagagcuacggguuccagccgaccaacggcgugggguaccagcccuaccggguggucgugcuguccuucgagcuccugcacgcccccgccacggugugcggccccaagaaguccaccaaccuggucaagaacaagugcgugaacuucaacuucaacggccucaccgggaccggcgugcugaccgagagcaacaagaaguuccugccguuccagcaguucgggcgcgacaucgccgacacgaccgacgccguccgcgacccccagacccuggagauccucgacaucacccccugcagcuucggcggggugagcgugaucacgccgggcaccaacaccuccaaccaggucgcggugcuguaccagggcgugaacugcaccgagguccccguggccauccacgccgaccagcugacgcccaccuggcggguguacagcaccggguccaacgucuuccagacccgcgccggcugccucaucggggccgagcacgugaacaacagcuacgagugcgacauccccaucggcgcgggcaucugcgccuccuaccagacgcagaccaacagcccgcggcgcgcccgguccguggccagccaguccgucaucgcguacaccaugagccugggggccgagaacuccguggccuacagcaacaacuccaucgccauccccaccaacuucacgaucagcgugaccaccgagauccugcccgucuccaugaccaagacgagcguggacugcaccauguacaucugcggcgacagcaccgagugcuccaaccuccugcugcaguacgggagcuucugcacccagcucaaccgcgcccugacgggcaucgcgguggagcaggacaagaacacccaggaggucuucgcccaggugaagcagaucuacaagacgcccccgaucaaggacuucgggggcuucaacuucucccagauccugcccgaccccagcaagcccuccaagcggagcuucaucgaggaccuccuguucaacaaggugacccuggccgacgccggcuucaucaagcaguacggggacugccucggcgacaucgccgcgcgcgaccugaucugcgcccagaaguucaacgggcugaccguccucccgccccugcugaccgacgagaugaucgcccaguacaccuccgcccuccuggccggcaccaucacgagcggguggaccuucggcgcgggcgccgcccugcagauccccuucgccaugcagauggcguaccgguucaacgggaucggcgugacccagaacgugcucuacgagaaccagaagcugaucgccaaccaguucaacuccgccaucgggaagauccaggacagccuguccagcaccgccuccgcccucggcaagcugcaggacgucgugaaccagaacgcgcaggcccugaacacgcucgugaagcagcugagcuccaacuucggggccaucagcuccguccugaacgacauccucagccgccuggacccgcccgaggccgaggugcagaucgaccggcugaucaccggccgccuccagucccugcagaccuacgugacccagcagcugauccgggccgcggagauccgcgccagcgccaaccucgccgccaccaagaugagcgagugcguccugggccaguccaagcggguggacuucugcgggaagggcuaccaccugaugagcuucccccaguccgcgccccacgggguggucuuccuccacgugacguacguccccgcccaggagaagaacuucaccaccgccccggccaucugccacgacggcaaggcgcacuucccccgcgaggggguguucgugagcaacggcacccacugguucgucacgcagcggaacuucuacgagccccagaucaucaccaccgacaacaccuucguguccggcaacugcgacguggucaucgggaucgugaacaacacgguguacgacccccugcagccggagcuggacagcuucaaggaggagcucgacaaguacuucaagaaccacaccucccccgacgucgaccugggcgacaucagcgggaucaacgccuccguggugaacauccagaaggagaucgaccgccugaacgaggucgccaagaaccucaacgagagccugaucgaccugcaggagcucggcaaguacgagcaguacaucaaguggcccugguacaucuggcugggcuucaucgccgggcugaucgccaucgugauggugaccaucaugcucugcugcaugaccuccugcugcagcugccugaagggcugcugcuccugcgggagcugcugcaaguucgacgaggacgacuccgagccgguccugaagggcgugaagcuccacuacacgugaugacucgagcugguacugcaugcacgcaaugcuagcugccccuuucccguccuggguaccccgagucucccccgaccucgggucccagguaugcucccaccuccaccugccccacucaccaccucugcuaguuccagacaccucccaagcacgcagcaaugcagcucaaaacgcuuagccuagccacacccccacgggaaacagcagugauuaaccuuuagcaauaaacgaaaguuuaacuaagcuauacuaaccccaggguuggucaauuucgugccagccacacccuggagcuagcaaaaaaaaaaaaaaaaaaaaaaaaaaaaaaaaaaaaaaaaaaaaaaaaaaaaaaaaaaaaaaaaaaaaaaaaaaaaaaaaaaaaaaaaaaaaaaaaaaaa

SEQ ID NO: 26406 - RNA, 4267 nt, Artificial Sequence
  SARS-CoV-2/Wuhan/WIV05/2019__EPI_ISL_402128 spike protein mRNA gc (1-1273)(K986P_V987P_H69del_V70del_Y453F_D614G_I692V_M1229I)
agaauaaacuaguauucuucugguccccacagacucagagagaacccgccaccauguucguguuccugguccuccugccccuggugagcucccagugcgugaaccucaccacccgcacgcagcugccgcccgccuacaccaacagcuucacccggggcgucuacuaccccgacaagguguuccgcuccagcgugcugcacuccacccaggaccucuuccugcccuucuucagcaacgucacgugguuccacgccaucuccgggaccaacggcaccaagcgguucgacaacccggugcugcccuucaacgacgggguguacuucgcgagcaccgagaaguccaacaucauccgcggcuggaucuucgggacgacccucgacagcaagacccagucccugcugaucgucaacaacgccaccaacguggugaucaaggucugcgaguuccaguucugcaacgaccccuuccucggcguguacuaccacaagaacaacaagagcuggauggaguccgaguuccggguguacagcuccgccaacaacugcacguucgaguacgucagccagcccuuccugauggaccuggagggcaagcaggggaacuucaagaaccuccgcgaguucguguucaagaacaucgacggcuacuucaagaucuacuccaagcacaccccgaucaaccuggugcgggaccugccccagggguucagcgcccucgagccccuggucgaccugcccaucggcaucaacaucacccgcuuccagacccuccuggcccugcaccgguccuaccucacgccgggggacagcagcuccggcuggaccgcgggcgccgccgccuacuacgugggguaccugcagccccgcaccuuccugcucaaguacaacgagaacggcaccaucacggacgcgguggacugcgcccuggacccccugagcgagaccaagugcacccucaaguccuucaccgucgagaaggggaucuaccagacgagcaacuuccgggugcagcccaccgaguccaucgugcgcuucccgaacaucaccaaccugugccccuucggcgaggucuucaacgccacccgguucgccagcguguacgccuggaaccgcaagcggaucuccaacugcgucgcggacuacagcgugcuguacaacuccgccagcuucuccacguucaagugcuacggcgugagccccaccaagcucaacgaccugugcuucaccaacgucuacgccgacuccuucgugauccgcggggacgaggugcggcagaucgcccccggccagaccgggaagaucgccgacuacaacuacaagcugccggacgacuucacgggcugcgucaucgcguggaacagcaacaaccucgacuccaaggucgggggcaacuacaacuaccuguuccgccuguuccgcaagagcaaccucaagcccuucgagcgggacaucuccaccgagaucuaccaggccggcagcacccccugcaacgggguggagggcuucaacugcuacuucccccugcaguccuacggguuccagccgaccaacggcgugggguaccagcccuaccggguggugguccugagcuucgagcuccugcacgcccccgccacggugugcggccccaagaaguccaccaaccuggugaagaacaagugcgucaacuucaacuucaacggccucaccgggaccggcgugcugaccgagagcaacaagaaguuccugccguuccagcaguucgggcgcgacaucgccgacacgaccgacgcggugcgcgacccccagacccuggagauccucgacaucacccccugcagcuucggcggggucuccgugaucacgccgggcaccaacaccagcaaccagguggccguccuguaccagggcgugaacugcaccgaggugcccgucgccauccacgccgaccagcugacgcccaccuggcggguguacuccaccgggagcaacguguuccagacccgcgccggcugccucaucggggcggagcacgucaacaacuccuacgagugcgacauccccaucggcgccggcaucugcgccagcuaccagacgcagaccaacuccccgcggcgcgcccggagcguggcgucccagagcgugaucgccuacaccaugucccugggggccgagaacagcgucgccuacuccaacaacagcaucgccauccccaccaacuucacgaucuccgugaccaccgagauccugcccgugagcaugaccaagacgagcgucgacugcaccauguacaucugcggcgacuccaccgagugcagcaaccuccugcugcaguacggguccuucugcacccagcucaaccgcgcgcugacgggcaucgccguggagcaggacaagaacacccaggagguguucgcccaggucaagcagaucuacaagacgcccccgaucaaggacuucgggggcuucaacuucagccagauccugcccgaccccuccaagcccagcaagcgguccuucaucgaggaccuccuguucaacaaggugacccuggccgacgccggcuucaucaagcaguacggggacugccucggcgacaucgcggcccgcgaccugaucugcgcccagaaguucaacgggcugaccgugcucccgccccugcugaccgacgagaugaucgcccaguacaccagcgcccuccuggcgggcaccaucacguccggguggaccuucggcgccggcgccgcccugcagauccccuucgcgaugcagauggccuaccgguucaacgggaucggcgucacccagaacgugcucuacgagaaccagaagcugaucgccaaccaguucaacagcgccaucgggaagauccaggacucccugagcuccaccgccagcgcgcucggcaagcugcaggacguggucaaccagaacgcccaggcccugaacacgcucgugaagcagcuguccagcaacuucggggccaucuccagcgugcugaacgacauccucucccgccuggacccgcccgaggccgagguccagaucgaccggcugaucaccggccgccuccagagccugcagaccuacgugacccagcagcugauccgggcggccgagauccgcgccagcgccaaccucgccgcgaccaagauguccgagugcgugcugggccagagcaagcgggucgacuucugcgggaagggcuaccaccugauguccuucccccagagcgcgccccacggggugguguuccuccacgucacguacgugcccgcccaggagaagaacuucaccaccgccccggccaucugccacgacggcaaggcccacuucccccgcgagggggucuucguguccaacggcacccacugguucgugacgcagcggaacuucuacgagccccagaucaucaccaccgacaacaccuucgucagcggcaacugcgacguggugaucgggaucgucaacaacacgguguacgacccccugcagccggagcuggacuccuucaaggaggagcucgacaaguacuucaagaaccacaccagccccgacguggaccugggcgacaucuccgggaucaacgccagcgucgugaacauccagaaggagaucgaccgccugaacgagguggccaagaaccucaacgagucccugaucgaccugcaggagcucggcaaguacgagcaguacaucaaguggcccugguacaucuggcugggcuucaucgccgggcugaucgcgaucgucaucgugaccaucaugcucugcugcaugaccagcugcugcuccugccugaagggcugcugcagcugcggguccugcugcaaguucgacgaggacgacagcgagccggugcugaagggcgucaagcuccacuacacgugaugacucgagcugguacugcaugcacgcaaugcuagcugccccuuucccguccuggguaccccgagucucccccgaccucgggucccagguaugcucccaccuccaccugccccacucaccaccucugcuaguuccagacaccucccaagcacgcagcaaugcagcucaaaacgcuuagccuagccacacccccacgggaaacagcagugauuaaccuuuagcaauaaacgaaaguuuaacuaagcuauacuaaccccaggguuggucaauuucgugccagccacacccuggagcuagcaaaaaaaaaaaaaaaaaaaaaaaaaaaaaaaaaaaaaaaaaaaaaaaaaaaaaaaaaaaaaaaaaaaaaaaaaaaaaaaaaaaaaaaaaaaaaaaaaaaa

SEQ ID NO: 26407 - RNA, 4264 nt, Artificial Sequence
  SARS-CoV-2/Wuhan/WIV05/2019__EPI_ISL_402128 spike protein mRNA gc (1-1273)(K986P_V987P_K986P_V987P_H69del_V70del_Y144del_N501Y_A570 D_D614G_P681H_T716I_S982A_D1118H)
agaauaaacuaguauucuucugguccccacagacucagagagaacccgccaccauguucguguuccugguccuccugccccuggugagcucccagugcgugaaccucaccacccgcacgcagcugccgcccgccuacaccaacagcuucacccggggcgucuacuaccccgacaagguguuccgcuccagcgugcugcacuccacccaggaccucuuccugcccuucuucagcaacgucacgugguuccacgccaucuccgggaccaacggcaccaagcgguucgacaacccggugcugcccuucaacgacgggguguacuucgcgagcaccgagaaguccaacaucauccgcggcuggaucuucgggacgacccucgacagcaagacccagucccugcugaucgucaacaacgccaccaacguggugaucaaggucugcgaguuccaguucugcaacgaccccuuccucggcguguaccacaagaacaacaagagcuggauggaguccgaguuccggguguacagcuccgccaacaacugcacguucgaguacgucagccagcccuuccugauggaccuggagggcaagcaggggaacuucaagaaccuccgcgaguucguguucaagaacaucgacggcuacuucaagaucuacuccaagcacaccccgaucaaccuggugcgggaccugccccagggguucagcgcccucgagccccuggucgaccugcccaucggcaucaacaucacccgcuuccagacccuccuggcccugcaccgguccuaccucacgccgggggacagcagcuccggcuggaccgcgggcgccgccgccuacuacgugggguaccugcagccccgcaccuuccugcucaaguacaacgagaacggcaccaucacggacgcgguggacugcgcccuggacccccugagcgagaccaagugcacccucaaguccuucaccgucgagaaggggaucuaccagacgagcaacuuccgggugcagcccaccgaguccaucgugcgcuucccgaacaucaccaaccugugccccuucggcgaggucuucaacgccacccgguucgccagcguguacgccuggaaccgcaagcggaucuccaacugcgucgcggacuacagcgugcuguacaacuccgccagcuucuccacguucaagugcuacggcgugagccccaccaagcucaacgaccugugcuucaccaacgucuacgccgacuccuucgugauccgcggggacgaggugcggcagaucgcccccggccagaccgggaagaucgccgacuacaacuacaagcugccggacgacuucacgggcugcgucaucgcguggaacagcaacaaccucgacuccaaggucgggggcaacuacaacuaccuguaccgccuguuccgcaagagcaaccucaagcccuucgagcgggacaucuccaccgagaucuaccaggccggcagcacccccugcaacgggguggagggcuucaacugcuacuucccccugcaguccuacggguuccagccgaccuacggcgugggguaccagcccuaccggguggugguccugagcuucgagcuccugcacgcccccgccacggugugcggccccaagaaguccaccaaccuggugaagaacaagugcgucaacuucaacuucaacggccucaccgggaccggcgugcugaccgagagcaacaagaaguuccugccguuccagcaguucgggcgcgacaucgacgacacgaccgacgccgugcgcgacccccagacccuggagauccucgacaucacccccugcagcuucggcggggucuccgugaucacgccgggcaccaacaccagcaaccagguggcgguccuguaccagggcgugaacugcaccgaggugcccgucgccauccacgccgaccagcugacgcccaccuggcggguguacuccaccgggagcaacguguuccagacccgcgccggcugccucaucggggccgagcacgucaacaacuccuacgagugcgacauccccaucggcgcgggcaucugcgccagcuaccagacgcagaccaacucccaccggcgcgcccggagcguggccucccagagcaucaucgcguacaccaugucccugggggccgagaacagcguggccuacuccaacaacagcaucgccaucccgaucaacuucaccaucuccgucacgaccgagauccugcccgugagcaugaccaagaccagcguggacugcacgauguacaucugcggcgacuccaccgagugcagcaaccuccugcugcaguacggguccuucugcacccagcucaaccgcgcccugaccggcaucgcggucgagcaggacaagaacacgcaggagguguucgcccaggugaagcagaucuacaagaccccgcccaucaaggacuucgggggcuucaacuucagccagauccugcccgaccccuccaagcccagcaagcgguccuucaucgaggaccuccuguucaacaaggucacccuggccgacgccggcuucaucaagcaguacggggacugccucggcgacaucgccgcgcgcgaccugaucugcgcccagaaguucaacgggcugaccgugcugcccccgcuccugacggacgagaugaucgcccaguacaccagcgcccuccuggccggcaccaucaccuccggguggacguucggcgcgggcgccgcccugcagauccccuucgccaugcagauggcguaccgguucaacgggaucggcgugacccagaacguccucuacgagaaccagaagcugaucgccaaccaguucaacagcgccaucgggaagauccaggacucccugagcuccaccgccagcgcccucggcaagcugcaggacguggugaaccagaacgcgcaggcccugaacacccucgucaagcagcuguccagcaacuucggggccaucuccagcgugcugaacgacauccucgcccgccuggacccgcccgaggccgaggugcagaucgaccggcugaucacgggccgccuccagucccugcagaccuacgucacccagcagcugauccgggcggccgagauccgcgccagcgccaaccucgccgcgaccaagaugagcgagugcgugcugggccaguccaagcggguggacuucugcgggaagggcuaccaccugaugagcuucccccaguccgcgccccacggggucguguuccuccacgugaccuacguccccgcccaggagaagaacuucacgaccgcccccgccaucugccacgacggcaaggcccacuucccgcgcgaggggguguucgucagcaacggcacccacugguucgugacccagcggaacuucuacgagccccagaucaucacgacccacaacaccuucguguccggcaacugcgacgucgugaucgggaucgugaacaacaccgucuacgacccccugcagcccgagcuggacagcuucaaggaggagcucgacaaguacuucaagaaccacacguccccggacguggaccugggcgacaucagcgggaucaacgccuccguggucaacauccagaaggagaucgaccgccugaacgagguggccaagaaccucaacgagagccugaucgaccugcaggagcucggcaaguacgagcaguacaucaaguggcccugguacaucuggcugggcuucaucgccgggcugaucgcgaucgugauggucaccaucaugcucugcugcaugaccuccugcugcagcugccugaagggcugcugcuccugcgggagcugcugcaaguucgacgaggacgacuccgagcccgugcugaagggcgugaagcuccacuacaccugaugacucgagcugguacugcaugcacgcaaugcuagcugccccuuucccguccuggguaccccgagucucccccgaccucgggucccagguaugcucccaccuccaccugccccacucaccaccucugcuaguuccagacaccucccaagcacgcagcaaugcagcucaaaacgcuuagccuagccacacccccacgggaaacagcagugauuaaccuuuagcaauaaacgaaaguuuaacuaagcuauacuaaccccaggguuggucaauuucgugccagccacacccuggagcuagcaaaaaaaaaaaaaaaaaaaaaaaaaaaaaaaaaaaaaaaaaaaaaaaaaaaaaaaaaaaaaaaaaaaaaaaaaaaaaaaaaaaaaaaaaaaaaaaaaaaa

SEQ ID NO: 26408 - RNA, 4273 nt, Artificial Sequence
  SARS-CoV-2/Wuhan/WIV05/2019__EPI_ISL_402128 spike protein mRNA gc (1-1273)(K986P_V987P_K986P_V987P_K417N_E484K_N501Y_D614G)
agaauaaacuaguauucuucugguccccacagacucagagagaacccgccaccauguucguguuccugguccuccugccccuggugagcucccagugcgugaaccucaccacccgcacgcagcugccgcccgccuacaccaacagcuucacccggggcgucuacuaccccgacaagguguuccgcuccagcgugcugcacuccacccaggaccucuuccugcccuucuucagcaacgucacgugguuccacgccauccacguguccgggaccaacggcaccaagcgguucgacaacccggugcugcccuucaacgacggggucuacuucgcgagcaccgagaaguccaacaucauccgcggcuggaucuucgggacgacccucgacagcaagacccagucccugcugaucgugaacaacgccaccaacguggucaucaaggugugcgaguuccaguucugcaacgaccccuuccucggcguguacuaccacaagaacaacaagagcuggauggaguccgaguuccgggucuacagcuccgccaacaacugcacguucgaguacgugagccagcccuuccugauggaccuggagggcaagcaggggaacuucaagaaccuccgcgaguucguguucaagaacaucgacggcuacuucaagaucuacuccaagcacaccccgaucaaccugguccgggaccugccccagggguucagcgcccucgagccccugguggaccugcccaucggcaucaacaucacccgcuuccagacccuccuggcccugcaccgguccuaccucacgccgggggacagcagcuccggcuggaccgcgggcgccgccgccuacuacgugggguaccugcagccccgcaccuuccugcucaaguacaacgagaacggcaccaucacggacgcggucgacugcgcccuggacccccugagcgagaccaagugcacccucaaguccuucaccguggagaaggggaucuaccagacgagcaacuuccgggugcagcccaccgaguccaucguccgcuucccgaacaucaccaaccugugccccuucggcgagguguucaacgccacccgguucgccagcgucuacgccuggaaccgcaagcggaucuccaacugcguggcggacuacagcgugcuguacaacuccgccagcuucuccacguucaagugcuacggcgucagccccaccaagcucaacgaccugugcuucaccaacguguacgccgacuccuucgugauccgcggggacgagguccggcagaucgcccccggccagaccgggaacaucgccgacuacaacuacaagcugccggacgacuucacgggcugcgugaucgcguggaacagcaacaaccucgacuccaaggucgggggcaacuacaacuaccuguaccgccuguuccgcaagagcaaccucaagcccuucgagcgggacaucuccaccgagaucuaccaggccggcagcacccccugcaacggggugaagggcuucaacugcuacuucccccugcaguccuacggguuccagccgaccuacggcgugggguaccagcccuaccggguggucgugcugagcuucgagcuccugcacgcccccgccacggugugcggccccaagaaguccaccaaccuggucaagaacaagugcgugaacuucaacuucaacggccucaccgggaccggcgugcugaccgagagcaacaagaaguuccugccguuccagcaguucgggcgcgacaucgccgacacgaccgacgcgguccgcgacccccagacccuggagauccucgacaucacccccugcagcuucggcgggguguccgugaucacgccgggcaccaacaccagcaaccaggucgccgugcuguaccagggcgugaacugcaccgagguccccguggccauccacgccgaccagcugacgcccaccuggcggguguacuccaccgggagcaacgucuuccagacccgcgccggcugccucaucggggcggagcacgugaacaacuccuacgagugcgacauccccaucggcgccggcaucugcgccagcuaccagacgcagaccaacuccccgcggcgcgcccggagcguggcgucccagagcaucaucgccuacaccaugucccugggggccgagaacagcgucgccuacuccaacaacagcaucgccauccccaccaacuucacgaucuccgugaccaccgagauccugcccgugagcaugaccaagacgagcgucgacugcaccauguacaucugcggcgacuccaccgagugcagcaaccuccugcugcaguacggguccuucugcacccagcucaaccgcgcgcugacgggcaucgccguggagcaggacaagaacacccaggagguguucgcccaggucaagcagaucuacaagacgcccccgaucaaggacuucgggggcuucaacuucagccagauccugcccgaccccuccaagcccagcaagcgguccuucaucgaggaccuccuguucaacaaggugacccuggccgacgccggcuucaucaagcaguacggggacugccucggcgacaucgcggcccgcgaccugaucugcgcccagaaguucaacgggcugaccgugcucccgccccugcugaccgacgagaugaucgcccaguacaccagcgcccuccuggcgggcaccaucacguccggguggaccuucggcgccggcgccgcccugcagauccccuucgcgaugcagauggccuaccgguucaacgggaucggcgucacccagaacgugcucuacgagaaccagaagcugaucgccaaccaguucaacagcgccaucgggaagauccaggacucccugagcuccaccgccagcgcgcucggcaagcugcaggacguggucaaccagaacgcccaggcccugaacacgcucgugaagcagcuguccagcaacuucggggccaucuccagcgugcugaacgacauccucucccgccuggacccgcccgaggccgagguccagaucgaccggcugaucaccggccgccuccagagccugcagaccuacgugacccagcagcugauccgggcggccgagauccgcgccagcgccaaccucgccgcgaccaagauguccgagugcgugcugggccagagcaagcgggucgacuucugcgggaagggcuaccaccugauguccuucccccagagcgcgccccacggggugguguuccuccacgucacguacgugcccgcccaggagaagaacuucaccaccgccccggccaucugccacgacggcaaggcccacuucccccgcgagggggucuucguguccaacggcacccacugguucgugacgcagcggaacuucuacgagccccagaucaucaccaccgacaacaccuucgucagcggcaacugcgacguggugaucgggaucgucaacaacacgguguacgacccccugcagccggagcuggacuccuucaaggaggagcucgacaaguacuucaagaaccacaccagccccgacguggaccugggcgacaucuccgggaucaacgccagcgucgugaacauccagaaggagaucgaccgccugaacgagguggccaagaaccucaacgagucccugaucgaccugcaggagcucggcaaguacgagcaguacaucaaguggcccugguacaucuggcugggcuucaucgccgggcugaucgcgaucgucauggugaccaucaugcucugcugcaugaccagcugcugcuccugccugaagggcugcugcagcugcggguccugcugcaaguucgacgaggacgacagcgagccggugcugaagggcgucaagcuccacuacacgugaugacucgagcugguacugcaugcacgcaaugcuagcugccccuuucccguccuggguaccccgagucucccccgaccucgggucccagguaugcucccaccuccaccugccccacucaccaccucugcuaguuccagacaccucccaagcacgcagcaaugcagcucaaaacgcuuagccuagccacacccccacgggaaacagcagugauuaaccuuuagcaauaaacgaaaguuuaacuaagcuauacuaaccccaggguuggucaauuucgugccagccacacccuggagcuagcaaaaaaaaaaaaaaaaaaaaaaaaaaaaaaaaaaaaaaaaaaaaaaaaaaaaaaaaaaaaaaaaaaaaaaaaaaaaaaaaaaaaaaaaaaaaaaaaaaaa

SEQ ID NO: 26409 - RNA, 4264 nt, Artificial Sequence
  SARS-CoV-2/Wuhan/WIV05/2019__EPI_ISL_402128 spike protein mRNA gc (1-1273)(K986P_V987P_K986P_V987P_L18F_D80A_D215G_L242del_A243del_ L244del_R246I_K417N_E484K_N501Y_D614G_A701V)
agaauaaacuaguauucuucugguccccacagacucagagagaacccgccaccauguucguguuccugguccuccugccccuggugagcucccagugcgugaacuucaccacccgcacgcagcucccgcccgccuacaccaacagcuucacccggggcgucuacuaccccgacaagguguuccgcuccagcgugcugcacuccacccaggaccuguuccuccccuucuucagcaacgucacgugguuccacgccauccacguguccgggaccaacggcaccaagcgguucgcgaacccggugcugcccuucaacgacggggucuacuucgccagcaccgagaaguccaacaucauccgcggcuggaucuucgggacgacccuggacagcaagacccagucccuccugaucgugaacaacgccaccaacguggucaucaaggugugcgaguuccaguucugcaacgaccccuuccugggcguguacuaccacaagaacaacaagagcuggauggaguccgaguuccgggucuacagcuccgccaacaacugcacguucgaguacgugagccagcccuuccucauggaccuggagggcaagcaggggaacuucaagaaccugcgcgaguucguguucaagaacaucgacggcuacuucaagaucuacuccaagcacaccccgaucaaccucguccgggggcugccccagggcuucagcgcccuggagccccucguggaccugcccaucgggaucaacaucacccgcuuccagacccugcacaucuccuaccucacgccgggcgacagcagcuccggcuggaccgcgggggccgccgccuacuacgugggcuaccugcagccccggaccuuccugcucaaguacaacgagaacgggaccaucacggacgcggucgacugcgcccuggacccccugagcgagaccaagugcacccucaaguccuucaccguggagaagggcaucuaccagacgagcaacuuccgcgugcagcccaccgaguccaucguccgguucccgaacaucaccaaccugugccccuucggcgagguguucaacgccacccgcuucgccagcgucuacgccuggaaccggaagcgcaucuccaacugcguggcggacuacagcgugcuguacaacuccgccagcuucuccacguucaagugcuacggggucagccccaccaagcucaacgaccugugcuucaccaacguguacgccgacuccuucgugauccggggcgacgagguccgccagaucgcccccgggcagaccggcaacaucgccgacuacaacuacaagcugccggacgacuucacggggugcgugaucgcguggaacagcaacaaccucgacuccaaggugggcggcaacuacaacuaccuguaccggcuguuccgcaagagcaaccucaagcccuucgagcgggacaucuccaccgagaucuaccaggccgggagcacccccugcaacggcgucaagggguucaacugcuacuucccccugcaguccuacggcuuccagccgaccuacggggugggcuaccagcccuaccgcguggucgugcugagcuucgagcuccugcacgcccccgccacggugugcggccccaagaaguccaccaaccuggucaagaacaagugcgugaacuucaacuucaacgggcucaccggcaccggggugcugaccgagagcaacaagaaguuccugccguuccagcaguucggccgggacaucgccgacacgaccgacgcgguccgcgacccccagacccucgagauccuggacaucacccccugcagcuucgggggcguguccgugaucacgccgggcaccaacaccagcaaccaggucgccgugcuguaccagggggugaacugcaccgagguccccguggccauccacgccgaccagcugacgcccaccuggcgcguguacuccaccggcagcaacgucuuccagacccgggccgggugccucaucggcgcggagcacgugaacaacuccuacgagugcgacauccccaucggcgccgggaucugcgccagcuaccagacgcagaccaacuccccgcgccgggcccgcagcguggcgucccagagcaucaucgccuacaccaugucccugggcgucgagaacagcguggccuacuccaacaacagcaucgccauccccaccaacuucacgaucuccgugaccaccgagauccugcccgucagcaugaccaagacgagcguggacugcaccauguacaucugcggggacuccaccgagugcagcaaccuccugcugcaguacggcuccuucugcacccagcucaaccgggcccugacggggaucgcgguggagcaggacaagaacacccaggaggucuucgcccaggugaagcagaucuacaagacgcccccgaucaaggacuucggcggcuucaacuucagccagauccugcccgaccccuccaagcccagcaagcgcuccuucaucgaggaccuccuguucaacaaggugacccuggccgacgccggguucaucaagcaguacggcgacugccucggggacaucgccgcgcgggaccugaucugcgcccagaaguucaacggccugaccguccucccgccccugcugaccgacgagaugaucgcccaguacaccagcgcccuccuggccgggaccaucacguccggcuggaccuucggcgcgggggccgcccugcagauccccuucgccaugcagauggcguaccgcuucaacggcaucggggugacccagaacgugcucuacgagaaccagaagcugaucgccaaccaguucaacagcgccaucggcaagauccaggacucccugagcuccaccgccagcgcccucgggaagcugcaggacgucgugaaccagaacgcgcaggcccugaacacgcucgugaagcagcuguccagcaacuucggcgccaucuccagcguccugaacgacauccucucccggcuggacccgcccgaggccgaggugcagaucgaccgccugaucaccggccggcuccagagccugcagaccuacgugacccagcagcugauccgcgccgcggagauccgggccagcgccaaccucgccgccaccaagauguccgagugcguccuggggcagagcaagcgcguggacuucugcggcaagggguaccaccugauguccuucccccagagcgcgccccacggcguggucuuccuccacgugacguacguccccgcccaggagaagaacuucaccaccgccccggccaucugccacgacgggaaggcgcacuucccccgggagggcguguucguguccaacggcacccacugguucgucacgcagcgcaacuucuacgagccccagaucaucaccaccgacaacaccuucgugagcgggaacugcgacguggucaucggcaucgugaacaacacgguguacgacccccugcagccggagcuggacuccuucaaggaggagcucgacaaguacuucaagaaccacaccagccccgacgucgaccugggggacaucuccggcaucaacgccagcguggugaacauccagaaggagaucgaccggcugaacgaggucgccaagaaccucaacgagucccugaucgaccugcaggagcucggcaaguacgagcaguacaucaaguggcccugguacaucuggcugggguucaucgccggccugaucgccaucgugauggugaccaucaugcucugcugcaugaccagcugcugcuccugccugaaggggugcugcagcugcggcuccugcugcaaguucgacgaggacgacagcgagccgguccugaagggggugaagcuccacuacacgugaugacucgagcugguacugcaugcacgcaaugcuagcugccccuuucccguccuggguaccccgagucucccccgaccucgggucccagguaugcucccaccuccaccugccccacucaccaccucugcuaguuccagacaccucccaagcacgcagcaaugcagcucaaaacgcuuagccuagccacacccccacgggaaacagcagugauuaaccuuuagcaauaaacgaaaguuuaacuaagcuauacuaaccccaggguuggucaauuucgugccagccacacccuggagcuagcaaaaaaaaaaaaaaaaaaaaaaaaaaaaaaaaaaaaaaaaaaaaaaaaaaaaaaaaaaaaaaaaaaaaaaaaaaaaaaaaaaaaaaaaaaaaaaaaaaaa

SEQ ID NO: 26410 - RNA, 4273 nt, Artificial Sequence
  SARS-CoV-2/Wuhan/WIV05/2019__EPI_ISL_402128 spike protein mRNA gc (1-1273)(K986P_V987P_K986P_V987P_E484K_D614G)
agaauaaacuaguauucuucugguccccacagacucagagagaacccgccaccauguucguguuccugguccuccugccccuggugagcucccagugcgugaaccucaccacccgcacgcagcugccgcccgccuacaccaacagcuucacccggggcgucuacuaccccgacaagguguuccgcuccagcgugcugcacuccacccaggaccucuuccugcccuucuucagcaacgucacgugguuccacgccauccacguguccgggaccaacggcaccaagcgguucgacaacccggugcugcccuucaacgacggggucuacuucgcgagcaccgagaaguccaacaucauccgcggcuggaucuucgggacgacccucgacagcaagacccagucccugcugaucgugaacaacgccaccaacguggucaucaaggugugcgaguuccaguucugcaacgaccccuuccucggcguguacuaccacaagaacaacaagagcuggauggaguccgaguuccgggucuacagcuccgccaacaacugcacguucgaguacgugagccagcccuuccugauggaccuggagggcaagcaggggaacuucaagaaccuccgcgaguucguguucaagaacaucgacggcuacuucaagaucuacuccaagcacaccccgaucaaccugguccgggaccugccccagggguucagcgcccucgagccccugguggaccugcccaucggcaucaacaucacccgcuuccagacccuccuggcccugcaccgguccuaccucacgccgggggacagcagcuccggcuggaccgcgggcgccgccgccuacuacgugggguaccugcagccccgcaccuuccugcucaaguacaacgagaacggcaccaucacggacgcggucgacugcgcccuggacccccugagcgagaccaagugcacccucaaguccuucaccguggagaaggggaucuaccagacgagcaacuuccgggugcagcccaccgaguccaucguccgcuucccgaacaucaccaaccugugccccuucggcgagguguucaacgccacccgguucgccagcgucuacgccuggaaccgcaagcggaucuccaacugcguggcggacuacagcgugcuguacaacuccgccagcuucuccacguucaagugcuacggcgucagccccaccaagcucaacgaccugugcuucaccaacguguacgccgacuccuucgugauccgcggggacgagguccggcagaucgcccccggccagaccgggaagaucgccgacuacaacuacaagcugccggacgacuucacgggcugcgugaucgcguggaacagcaacaaccucgacuccaaggucgggggcaacuacaacuaccuguaccgccuguuccgcaagagcaaccucaagcccuucgagcgggacaucuccaccgagaucuaccaggccggcagcacccccugcaacggggugaagggcuucaacugcuacuucccccugcaguccuacggguuccagccgaccaacggcgugggguaccagcccuaccggguggucgugcugagcuucgagcuccugcacgcccccgccacggugugcggccccaagaaguccaccaaccuggucaagaacaagugcgugaacuucaacuucaacggccucaccgggaccggcgugcugaccgagagcaacaagaaguuccugccguuccagcaguucgggcgcgacaucgccgacacgaccgacgcgguccgcgacccccagacccuggagauccucgacaucacccccugcagcuucggcgggguguccgugaucacgccgggcaccaacaccagcaaccaggucgccgugcuguaccagggcgugaacugcaccgagguccccguggccauccacgccgaccagcugacgcccaccuggcggguguacuccaccgggagcaacgucuuccagacccgcgccggcugccucaucggggcggagcacgugaacaacuccuacgagugcgacauccccaucggcgccggcaucugcgccagcuaccagacgcagaccaacuccccgcggcgcgcccggagcguggcgucccagagcaucaucgccuacaccaugucccugggggccgagaacagcgucgccuacuccaacaacagcaucgccauccccaccaacuucacgaucuccgugaccaccgagauccugcccgugagcaugaccaagacgagcgucgacugcaccauguacaucugcggcgacuccaccgagugcagcaaccuccugcugcaguacggguccuucugcacccagcucaaccgcgcgcugacgggcaucgccguggagcaggacaagaacacccaggagguguucgcccaggucaagcagaucuacaagacgcccccgaucaaggacuucgggggcuucaacuucagccagauccugcccgaccccuccaagcccagcaagcgguccuucaucgaggaccuccuguucaacaaggugacccuggccgacgccggcuucaucaagcaguacggggacugccucggcgacaucgcggcccgcgaccugaucugcgcccagaaguucaacgggcugaccgugcucccgccccugcugaccgacgagaugaucgcccaguacaccagcgcccuccuggcgggcaccaucacguccggguggaccuucggcgccggcgccgcccugcagauccccuucgcgaugcagauggccuaccgguucaacgggaucggcgucacccagaacgugcucuacgagaaccagaagcugaucgccaaccaguucaacagcgccaucgggaagauccaggacucccugagcuccaccgccagcgcgcucggcaagcugcaggacguggucaaccagaacgcccaggcccugaacacgcucgugaagcagcuguccagcaacuucggggccaucuccagcgugcugaacgacauccucucccgccuggacccgcccgaggccgagguccagaucgaccggcugaucaccggccgccuccagagccugcagaccuacgugacccagcagcugauccgggcggccgagauccgcgccagcgccaaccucgccgcgaccaagauguccgagugcgugcugggccagagcaagcgggucgacuucugcgggaagggcuaccaccugauguccuucccccagagcgcgccccacggggugguguuccuccacgucacguacgugcccgcccaggagaagaacuucaccaccgccccggccaucugccacgacggcaaggcccacuucccccgcgagggggucuucguguccaacggcacccacugguucgugacgcagcggaacuucuacgagccccagaucaucaccaccgacaacaccuucgucagcggcaacugcgacguggugaucgggaucgucaacaacacgguguacgacccccugcagccggagcuggacuccuucaaggaggagcucgacaaguacuucaagaaccacaccagccccgacguggaccugggcgacaucuccgggaucaacgccagcgucgugaacauccagaaggagaucgaccgccugaacgagguggccaagaaccucaacgagucccugaucgaccugcaggagcucggcaaguacgagcaguacaucaaguggcccugguacaucuggcugggcuucaucgccgggcugaucgcgaucgucauggugaccaucaugcucugcugcaugaccagcugcugcuccugccugaagggcugcugcagcugcggguccugcugcaaguucgacgaggacgacagcgagccggugcugaagggcgucaagcuccacuacacgugaugacucgagcugguacugcaugcacgcaaugcuagcugccccuuucccguccuggguaccccgagucucccccgaccucgggucccagguaugcucccaccuccaccugccccacucaccaccucugcuaguuccagacaccucccaagcacgcagcaaugcagcucaaaacgcuuagccuagccacacccccacgggaaacagcagugauuaaccuuuagcaauaaacgaaaguuuaacuaagcuauacuaaccccaggguuggucaauuucgugccagccacacccuggagcuagcaaaaaaaaaaaaaaaaaaaaaaaaaaaaaaaaaaaaaaaaaaaaaaaaaaaaaaaaaaaaaaaaaaaaaaaaaaaaaaaaaaaaaaaaaaaaaaaaaaaa

SEQ ID NO: 26411 - RNA, 4273 nt, Artificial Sequence
  SARS-CoV-2/Wuhan/WIV05/2019__EPI_ISL_402128 spike protein mRNA gc (1-1273)(K986P_V987P_K986P_V987P_L18F_T20N_P26S_D138Y_R190S_K417T _E484K_N501Y_D614G_H655Y_T1027I)
agaauaaacuaguauucuucugguccccacagacucagagagaacccgccaccauguucguguuccugguccuccugccccuggugagcucccagugcgugaacuucaccaaccgcacccagcucccgagcgccuacacgaacuccuucacccggggcgucuacuaccccgacaagguguuccgcagcuccgugcugcacagcacccaggaccuguuccuccccuucuucuccaacgucaccugguuccacgccauccacgugagcgggacgaacggcaccaagcgguucgacaaccccgugcugccguucaacgacggggucuacuucgcguccaccgagaaguccaacaucauccgcggcuggaucuucgggaccacgcuggacuccaagacccagagccuccugaucgugaacaacgccaccaacguggucaucaaggugugcgaguuccaguucugcaacuaccccuuccugggcguguacuaccacaagaacaacaaguccuggauggagagcgaguuccgggucuacuccagcgccaacaacugcaccuucgaguacgugucccagcccuuccucauggaccuggagggcaagcaggggaacuucaagaaccugagcgaguucguguucaagaacaucgacggcuacuucaagaucuacuccaagcacacgcccaucaaccucguccgcgaccugccgcagggguucagcgcccuggagccccucguggaccugcccaucggcaucaacaucacccgguuccagacccugcucgcccugcaccgcagcuaccugacccccggggacuccagcuccggcuggacggcgggcgccgccgccuacuacgugggguaccuccagccgcggaccuuccugcugaaguacaacgagaacggcaccaucaccgacgcggucgacugcgcccucgacccccugagcgagacgaagugcacccugaaguccuucaccguggagaaggggaucuaccagaccagcaacuuccgcgugcagcccacggaguccaucguccgguuccccaacaucaccaaccucugcccguucggcgagguguucaacgccacccgcuucgccagcgucuacgccuggaaccggaagcgcaucuccaacugcguggcggacuacagcgugcuguacaacuccgccagcuucuccaccuucaagugcuacggcgucagccccacgaagcugaacgaccucugcuucaccaacguguacgccgacuccuucgugauccgcggggacgagguccggcagaucgcccccggccagaccgggaccaucgccgacuacaacuacaagcugcccgacgacuucacgggcugcgugaucgcguggaacagcaacaaccuggacuccaaggucgggggcaacuacaacuaccucuaccggcuguuccgcaagagcaaccugaagccguucgagcgggacaucuccaccgagaucuaccaggccggcagcacccccugcaacggggugaagggcuucaacugcuacuucccccuccagagcuacggguuccagcccaccuacggcgugggguaccagccguaccgcguggucgugcuguccuucgagcugcuccacgcccccgccacggugugcggccccaagaaguccaccaaccuggucaagaacaagugcgugaacuucaacuucaacggccugaccgggaccggcgugcucaccgagagcaacaagaaguuccugcccuuccagcaguucgggcgggacaucgccgacacgaccgacgcgguccgcgacccgcagacccuggagauccuggacaucacccccugcagcuucggcgggguguccgugaucacgcccggcaccaacaccagcaaccaggucgccgugcucuaccagggcgugaacugcaccgaggucccgguggccauccacgccgaccagcugacgcccaccuggcgcguguacuccaccgggagcaacgucuuccagacccgggccggcugccugaucggggcggaguacgugaacaacuccuacgagugcgacauccccaucggcgccggcaucugcgccagcuaccagacgcagaccaacagcccccgccgggcccgcagcguggcgucccagagcaucaucgccuacaccaugucccucggggccgagaacagcgucgccuacuccaacaacagcaucgccaucccgaccaacuucacgaucagcgugaccaccgagauccugcccguguccaugaccaagacgagcgucgacugcaccauguacaucugcggcgacuccaccgagugcagcaaccugcuccugcaguacggguccuucugcacccagcugaaccgggcgcucacgggcaucgccguggagcaggacaagaacacccaggagguguucgcccaggucaagcagaucuacaagaccccgcccaucaaggacuucgggggcuucaacuucagccagauccugcccgaccccuccaagcccagcaagcgcuccuucaucgaggaccuccuguucaacaaggugacccuggccgacgccggcuucaucaagcaguacggggacugccugggcgacaucgcggcccgggaccucaucugcgcccagaaguucaacgggcugacggugcugcccccgcuccugaccgacgagaugaucgcccaguacaccagcgcccugcucgcgggcaccaucacguccggguggaccuucggcgccggcgccgcccugcagauccccuucgcgaugcagauggccuaccgcuucaacgggaucggcgucacccagaacgugcuguacgagaaccagaagcucaucgccaaccaguucaacagcgccaucgggaagauccaggacucccugagcuccaccgccagcgcgcugggcaagcuccaggacguggucaaccagaacgcccaggcccugaacacgcuggugaagcagcucuccagcaacuucggggccaucuccagcgugcugaacgacauccugagccggcucgacccgcccgaggccgagguccagaucgaccgccugaucaccggccggcugcagucccuccagaccuacgugacccagcagcugauccgcgcggccgagauccgggccagcgccaaccuggccgcgaucaagauguccgagugcgugcucggccagagcaagcgcgucgacuucugcgggaagggcuaccaccugauguccuucccccagagcgcgccccacggggugguguuccugcacgucaccuacgugcccgcccaggagaagaacuucacgaccgcccccgccaucugccacgacggcaaggcccacuucccgcgggagggggucuucguguccaacggcacccacugguucgugacccagcgcaacuucuacgagccccagaucaucacgaccgacaacaccuucgucagcggcaacugcgacguggugaucgggaucgucaacaacaccguguacgacccccuccagcccgagcuggacuccuucaaggaggagcuggacaaguacuucaagaaccacacgagcccggacguggaccucggcgacaucuccgggaucaacgccagcgucgugaacauccagaaggagaucgaccggcugaacgagguggccaagaaccugaacgagucccucaucgaccugcaggagcugggcaaguacgagcaguacaucaaguggcccugguacaucuggcucggcuucaucgccgggcugaucgcgaucgucauggugaccaucaugcugugcugcaugaccagcugcugcuccugccucaagggcugcugcagcugcggguccugcugcaaguucgacgaggacgacagcgagcccgugcugaagggcgucaagcugcacuacaccugaugacucgagcugguacugcaugcacgcaaugcuagcugccccuuucccguccuggguaccccgagucucccccgaccucgggucccagguaugcucccaccuccaccugccccacucaccaccucugcuaguuccagacaccucccaagcacgcagcaaugcagcucaaaacgcuuagccuagccacacccccacgggaaacagcagugauuaaccuuuagcaauaaacgaaaguuuaacuaagcuauacuaaccccaggguuggucaauuucgugccagccacacccuggagcuagcaaaaaaaaaaaaaaaaaaaaaaaaaaaaaaaaaaaaaaaaaaaaaaaaaaaaaaaaaaaaaaaaaaaaaaaaaaaaaaaaaaaaaaaaaaaaaaaaaaaa

SEQ ID NO: 26412 - RNA, 4273 nt, Artificial Sequence
  SARS-CoV-2/Wuhan/WIV05/2019__EPI_ISL_402128 spike protein mRNA gc (1-1273)(K986P_V987P_K986P_V987P_S13I_W152C_L452R_D614G)
agaauaaacuaguauucuucugguccccacagacucagagagaacccgccaccauguucguguuccugguccuccugccccuggugagcauccagugcgugaaccucaccacccgcacgcagcugccgcccgccuacaccaacuccuucacccggggcgucuacuaccccgacaagguguuccgcagcuccgugcugcacagcacccaggaccucuuccugcccuucuucuccaacgucacgugguuccacgccauccacgugagcgggaccaacggcaccaagcgguucgacaacccggugcugcccuucaacgacggggucuacuucgcguccaccgagaaguccaacaucauccgcggcuggaucuucgggacgacccucgacagcaagacccagagccugcugaucgugaacaacgccaccaacguggucaucaaggugugcgaguuccaguucugcaacgaccccuuccucggcguguacuaccacaagaacaacaaguccugcauggagagcgaguuccgggucuacuccagcgccaacaacugcacguucgaguacgugucccagcccuuccugauggaccuggagggcaagcaggggaacuucaagaaccuccgcgaguucguguucaagaacaucgacggcuacuucaagaucuacagcaagcacaccccgaucaaccugguccgggaccugccccagggguucuccgcccucgagccccugguggaccugcccaucggcaucaacaucacccgcuuccagacccuccuggcccugcaccggagcuaccucacgccgggggacuccagcagcggcuggaccgcgggcgccgccgccuacuacgugggguaccugcagccccgcaccuuccugcucaaguacaacgagaacggcaccaucacggacgcggucgacugcgcccuggacccccuguccgagaccaagugcacccucaagagcuucaccguggagaaggggaucuaccagacguccaacuuccgggugcagcccaccgagagcaucguccgcuucccgaacaucaccaaccugugccccuucggcgagguguucaacgccacccgguucgccuccgucuacgccuggaaccgcaagcggaucagcaacugcguggcggacuacuccgugcuguacaacagcgccuccuucagcacguucaagugcuacggcgucucccccaccaagcucaacgaccugugcuucaccaacguguacgccgacagcuucgugauccgcggggacgagguccggcagaucgcccccggccagaccgggaagaucgccgacuacaacuacaagcugccggacgacuucacgggcugcgugaucgcguggaacuccaacaaccucgacagcaaggucgggggcaacuacaacuaccgcuaccggcuguuccgcaaguccaaccugaagcccuucgagcgggacaucagcaccgagaucuaccaggccggcuccacccccugcaacgggguggagggcuucaacugcuacuucccccuccagagcuacggguuccagccgaccaacggcgugggguaccagcccuaccgcguggucgugcuguccuucgagcugcuccacgcccccgccacggugugcggccccaagaaguccaccaaccuggucaagaacaagugcgugaacuucaacuucaacggccugaccgggaccggcgugcucaccgagagcaacaagaaguuccugccguuccagcaguucgggcgcgacaucgccgacacgaccgacgcgguccgggacccccagacccuggagauccuggacaucacccccugcagcuucggcggggugagcgugaucacgccgggcaccaacaccuccaaccaggucgccgugcucuaccagggcgugaacugcaccgagguccccguggccauccacgccgaccagcugacgcccaccuggcgcguguacagcaccggguccaacgucuuccagacccgggccggcugccugaucggggcggagcacgugaacaacagcuacgagugcgacauccccaucggcgccggcaucugcgccuccuaccagacgcagaccaacagcccgcgccgggcccgcuccguggcgagccaguccaucaucgccuacaccaugagccucggggccgagaacuccgucgccuacagcaacaacuccaucgccauccccaccaacuucacgaucagcgugaccaccgagauccugcccguguccaugaccaagacgagcgucgacugcaccauguacaucugcggcgacagcaccgagugcuccaaccugcuccugcaguacgggagcuucugcacccagcugaaccgggcgcucacgggcaucgccguggagcaggacaagaacacccaggagguguucgcccaggucaagcagaucuacaagacgcccccgaucaaggacuucgggggcuucaacuucucccagauccugcccgaccccagcaagcccuccaagcgcagcuucaucgaggaccuccuguucaacaaggugacccuggccgacgccggcuucaucaagcaguacggggacugccugggcgacaucgcggcccgggaccucaucugcgcccagaaguucaacgggcugaccgugcugccgccccuccugaccgacgagaugaucgcccaguacaccuccgcccugcucgcgggcaccaucacgagcggguggaccuucggcgccggcgccgcccugcagauccccuucgcgaugcagauggccuaccgcuucaacgggaucggcgucacccagaacgugcuguacgagaaccagaagcucaucgccaaccaguucaacuccgccaucgggaagauccaggacagccuguccagcaccgccuccgcgcugggcaagcuccaggacguggucaaccagaacgcccaggcccugaacacgcuggugaagcagcucagcuccaacuucggggccaucagcuccgugcugaacgacauccugagccggcucgacccgcccgaggccgagguccagaucgaccgccugaucaccggccggcugcagucccuccagaccuacgugacccagcagcugauccgcgcggccgagauccgggccagcgccaaccuggccgcgaccaagaugagcgagugcgugcucggccaguccaagcgcgucgacuucugcgggaagggcuaccaccugaugagcuucccccaguccgcgccccacggggugguguuccugcacgucacguacgugcccgcccaggagaagaacuucaccaccgccccggccaucugccacgacggcaaggcccacuucccccgggagggggucuucgugagcaacggcacccacugguucgugacgcagcgcaacuucuacgagccccagaucaucaccaccgacaacaccuucgucuccggcaacugcgacguggugaucgggaucgucaacaacacgguguacgacccccuccagccggagcuggacagcuucaaggaggagcuggacaaguacuucaagaaccacaccucccccgacguggaccucggcgacaucagcgggaucaacgccuccgucgugaacauccagaaggagaucgaccggcugaacgagguggccaagaaccugaacgagagccucaucgaccugcaggagcugggcaaguacgagcaguacaucaaguggcccugguacaucuggcucggcuucaucgccgggcugaucgcgaucgucauggugaccaucaugcugugcugcaugaccuccugcugcagcugccucaagggcugcugcuccugcgggagcugcugcaaguucgacgaggacgacuccgagccggugcugaagggcgucaagcugcacuacacgugaugacucgagcugguacugcaugcacgcaaugcuagcugccccuuucccguccuggguaccccgagucucccccgaccucgggucccagguaugcucccaccuccaccugccccacucaccaccucugcuaguuccagacaccucccaagcacgcagcaaugcagcucaaaacgcuuagccuagccacacccccacgggaaacagcagugauuaaccuuuagcaauaaacgaaaguuuaacuaagcuauacuaaccccaggguuggucaauuucgugccagccacacccuggagcuagcaaaaaaaaaaaaaaaaaaaaaaaaaaaaaaaaaaaaaaaaaaaaaaaaaaaaaaaaaaaaaaaaaaaaaaaaaaaaaaaaaaaaaaaaaaaaaaaaaaaa

SEQ ID NO: 26413 - RNA, 4273 nt, Artificial Sequence
  SARS-CoV-2/Wuhan/WIV05/2019__EPI_ISL_402128 spike protein mRNA gc (1-1273)(K986P_V987P)
agaauaaacuaguauucuucugguccccacagacucagagagaacccgccaccauguucguguuccuggugcugcugccccuggugagcagccagugcgugaaccugaccacccggacccagcugccaccagccuacaccaacagcuucacccggggcgucuacuaccccgacaagguguuccggagcagcguccugcacagcacccaggaccuguuccugcccuucuucagcaacgugaccugguuccacgccauccacgugagcggcaccaacggcaccaagcgguucgacaaccccgugcugcccuucaacgacggcguguacuucgccagcaccgagaagagcaacaucauccggggcuggaucuucggcaccacccuggacagcaagacccagagccugcugaucgugaauaacgccaccaacguggugaucaaggugugcgaguuccaguucugcaacgaccccuuccugggcguguacuaccacaagaacaacaagagcuggauggagagcgaguuccggguguacagcagcgccaacaacugcaccuucgaguacgugagccagcccuuccugauggaccuggagggcaagcagggcaacuucaagaaccugcgggaguucguguucaagaacaucgacggcuacuucaagaucuacagcaagcacaccccaaucaaccuggugcgggaucugccccagggcuucucagcccuggagccccugguggaccugcccaucggcaucaacaucacccgguuccagacccugcuggcccugcaccggagcuaccugaccccaggcgacagcagcagcggguggacagcaggcgcggcugcuuacuacgugggcuaccugcagccccggaccuuccugcugaaguacaacgagaacggcaccaucaccgacgccguggacugcgcccuggacccucugagcgagaccaagugcacccugaagagcuucaccguggagaagggcaucuaccagaccagcaacuuccgggugcagcccaccgagagcaucgugcgguuccccaacaucaccaaccugugccccuucggcgagguguucaacgccacccgguucgccagcguguacgccuggaaccggaagcggaucagcaacugcguggccgacuacagcgugcuguacaacagcgccagcuucagcaccuucaagugcuacggcgugagccccaccaagcugaacgaccugugcuucaccaacguguacgccgacagcuucgugauccguggcgacgaggugcggcagaucgcacccggccagacaggcaagaucgccgacuacaacuacaagcugcccgacgacuucaccggcugcgugaucgccuggaacagcaacaaccucgacagcaaggugggcggcaacuacaacuaccuguaccggcuguuccggaagagcaaccugaagcccuucgagcgggacaucagcaccgagaucuaccaagccggcuccaccccuugcaacggcguggagggcuucaacugcuacuucccucugcagagcuacggcuuccagcccaccaacggcgugggcuaccagcccuaccgggugguggugcugagcuucgagcugcugcacgccccagccaccguguguggccccaagaagagcaccaaccuggugaagaacaagugcgugaacuucaacuucaacggccuuaccggcaccggcgugcugaccgagagcaacaagaaauuccugcccuuucagcaguucggccgggacaucgccgacaccaccgacgcugugcgggauccccagacccuggagauccuggacaucaccccuugcagcuucggcggcgugagcgugaucaccccaggcaccaacaccagcaaccagguggccgugcuguaccaggacgugaacugcaccgaggugcccguggccauccacgccgaccagcugacacccaccuggcgggucuacagcaccggcagcaacguguuccagacccgggccgguugccugaucggcgccgagcacgugaacaacagcuacgagugcgacauccccaucggcgccggcaucugugccagcuaccagacccagaccaauucaccccggagggcaaggagcguggccagccagagcaucaucgccuacaccaugagccugggcgccgagaacagcguggccuacagcaacaacagcaucgccauccccaccaacuucaccaucagcgugaccaccgagauucugcccgugagcaugaccaagaccagcguggacugcaccauguacaucugcggcgacagcaccgagugcagcaaccugcugcugcaguacggcagcuucugcacccagcugaaccgggcccugaccggcaucgccguggagcaggacaagaacacccaggagguguucgcccaggugaagcagaucuacaagaccccucccaucaaggacuucggcggcuucaacuucagccagauccugcccgaccccagcaagcccagcaagcggagcuucaucgaggaccugcuguucaacaaggugacccuagccgacgccggcuucaucaagcaguacggcgacugccucggcgacauagccgcccgggaccugaucugcgcccagaaguucaacggccugaccgugcugccuccccugcugaccgacgagaugaucgcccaguacaccagcgcccuguuagccggaaccaucaccagcggcuggacuuucggcgcuggagccgcucugcagauccccuucgccaugcagauggccuaccgguucaacggcaucggcgugacccagaacgugcuguacgagaaccagaagcugaucgccaaccaguucaacagcgccaucggcaagauccaggacagccugagcagcaccgcuagcgcccugggcaagcugcaggacguggugaaccagaacgcccaggcccugaacacccuggugaagcagcugagcagcaacuucggcgccaucagcagcgugcugaacgacauccugagccggcuggacccucccgaggccgaggugcagaucgaccggcugaucacuggccggcugcagagccugcagaccuacgugacccagcagcugauccgggccgccgagauucgggccagcgccaaccuggccgccaccaagaugagcgagugcgugcugggccagagcaagcggguggacuucugcggcaagggcuaccaccugaugagcuuuccccagagcgcaccccacggagugguguuccugcacgugaccuacgugcccgcccaggagaagaacuucaccaccgccccagccaucugccacgacggcaaggcccacuuuccccgggagggcguguucgugagcaacggcacccacugguucgugacccagcggaacuucuacgagccccagaucaucaccaccgacaacaccuucgugagcggcaacugcgacguggugaucggcaucgugaacaacaccguguacgauccccugcagcccgagcuggacagcuucaaggaggagcuggacaaguacuucaagaaucacaccagccccgacguggaccugggcgacaucagcggcaucaacgccagcguggugaacauccagaaggagaucgaucggcugaacgagguggccaagaaccugaacgagagccugaucgaccugcaggagcugggcaaguacgagcaguacaucaaguggcccugguacaucuggcugggcuucaucgccggccugaucgccaucgugauggugaccaucaugcugugcugcaugaccagcugcugcagcugccugaagggcuguugcagcugcggcagcugcugcaaguucgacgaggacgacagcgagcccgugcugaagggcgugaagcugcacuacaccugaugacucgagcugguacugcaugcacgcaaugcuagcugccccuuucccguccuggguaccccgagucucccccgaccucgggucccagguaugcucccaccuccaccugccccacucaccaccucugcuaguuccagacaccucccaagcacgcagcaaugcagcucaaaacgcuuagccuagccacacccccacgggaaacagcagugauuaaccuuuagcaauaaacgaaaguuuaacuaagcuauacuaaccccaggguuggucaauuucgugccagccacacccuggagcuagcaaaaaaaaaaaaaaaaaaaaaaaaaaaaaaaaaaaaaaaaaaaaaaaaaaaaaaaaaaaaaaaaaaaaaaaaaaaaaaaaaaaaaaaaaaaaaaaaaaaa

SEQ ID NO: 26414 - RNA, 4273 nt, Artificial Sequence
  SARS-CoV-2/Wuhan/WIV05/2019__EPI_ISL_402128 spike protein mRNA gc (1-1273)(K986P_V987P_ D614G)
agaauaaacuaguauucuucugguccccacagacucagagagaacccgccaccauguucguguuccuggugcugcugccccuggugagcagccagugcgugaaccugaccacccggacccagcugccaccagccuacaccaacagcuucacccggggcgucuacuaccccgacaagguguuccggagcagcguccugcacagcacccaggaccuguuccugcccuucuucagcaacgugaccugguuccacgccauccacgugagcggcaccaacggcaccaagcgguucgacaaccccgugcugcccuucaacgacggcguguacuucgccagcaccgagaagagcaacaucauccggggcuggaucuucggcaccacccuggacagcaagacccagagccugcugaucgugaauaacgccaccaacguggugaucaaggugugcgaguuccaguucugcaacgaccccuuccugggcguguacuaccacaagaacaacaagagcuggauggagagcgaguuccggguguacagcagcgccaacaacugcaccuucgaguacgugagccagcccuuccugauggaccuggagggcaagcagggcaacuucaagaaccugcgggaguucguguucaagaacaucgacggcuacuucaagaucuacagcaagcacaccccaaucaaccuggugcgggaucugccccagggcuucucagcccuggagccccugguggaccugcccaucggcaucaacaucacccgguuccagacccugcuggcccugcaccggagcuaccugaccccaggcgacagcagcagcggguggacagcaggcgcggcugcuuacuacgugggcuaccugcagccccggaccuuccugcugaaguacaacgagaacggcaccaucaccgacgccguggacugcgcccuggacccucugagcgagaccaagugcacccugaagagcuucaccguggagaagggcaucuaccagaccagcaacuuccgggugcagcccaccgagagcaucgugcgguuccccaacaucaccaaccugugccccuucggcgagguguucaacgccacccgguucgccagcguguacgccuggaaccggaagcggaucagcaacugcguggccgacuacagcgugcuguacaacagcgccagcuucagcaccuucaagugcuacggcgugagccccaccaagcugaacgaccugugcuucaccaacguguacgccgacagcuucgugauccguggcgacgaggugcggcagaucgcacccggccagacaggcaagaucgccgacuacaacuacaagcugcccgacgacuucaccggcugcgugaucgccuggaacagcaacaaccucgacagcaaggugggcggcaacuacaacuaccuguaccggcuguuccggaagagcaaccugaagcccuucgagcgggacaucagcaccgagaucuaccaagccggcuccaccccuugcaacggcguggagggcuucaacugcuacuucccucugcagagcuacggcuuccagcccaccaacggcgugggcuaccagcccuaccgggugguggugcugagcuucgagcugcugcacgccccagccaccguguguggccccaagaagagcaccaaccuggugaagaacaagugcgugaacuucaacuucaacggccuuaccggcaccggcgugcugaccgagagcaacaagaaauuccugcccuuucagcaguucggccgggacaucgccgacaccaccgacgcugugcgggauccccagacccuggagauccuggacaucaccccuugcagcuucggcggcgugagcgugaucaccccaggcaccaacaccagcaaccagguggccgugcuguaccagggcgugaacugcaccgaggugcccguggccauccacgccgaccagcugacacccaccuggcgggucuacagcaccggcagcaacguguuccagacccgggccgguugccugaucggcgccgagcacgugaacaacagcuacgagugcgacauccccaucggcgccggcaucugugccagcuaccagacccagaccaauucaccccggagggcaaggagcguggccagccagagcaucaucgccuacaccaugagccugggcgccgagaacagcguggccuacagcaacaacagcaucgccauccccaccaacuucaccaucagcgugaccaccgagauucugcccgugagcaugaccaagaccagcguggacugcaccauguacaucugcggcgacagcaccgagugcagcaaccugcugcugcaguacggcagcuucugcacccagcugaaccgggcccugaccggcaucgccguggagcaggacaagaacacccaggagguguucgcccaggugaagcagaucuacaagaccccucccaucaaggacuucggcggcuucaacuucagccagauccugcccgaccccagcaagcccagcaagcggagcuucaucgaggaccugcuguucaacaaggugacccuagccgacgccggcuucaucaagcaguacggcgacugccucggcgacauagccgcccgggaccugaucugcgcccagaaguucaacggccugaccgugcugccuccccugcugaccgacgagaugaucgcccaguacaccagcgcccuguuagccggaaccaucaccagcggcuggacuuucggcgcuggagccgcucugcagauccccuucgccaugcagauggccuaccgguucaacggcaucggcgugacccagaacgugcuguacgagaaccagaagcugaucgccaaccaguucaacagcgccaucggcaagauccaggacagccugagcagcaccgcuagcgcccugggcaagcugcaggacguggugaaccagaacgcccaggcccugaacacccuggugaagcagcugagcagcaacuucggcgccaucagcagcgugcugaacgacauccugagccggcuggacccucccgaggccgaggugcagaucgaccggcugaucacuggccggcugcagagccugcagaccuacgugacccagcagcugauccgggccgccgagauucgggccagcgccaaccuggccgccaccaagaugagcgagugcgugcugggccagagcaagcggguggacuucugcggcaagggcuaccaccugaugagcuuuccccagagcgcaccccacggagugguguuccugcacgugaccuacgugcccgcccaggagaagaacuucaccaccgccccagccaucugccacgacggcaaggcccacuuuccccgggagggcguguucgugagcaacggcacccacugguucgugacccagcggaacuucuacgagccccagaucaucaccaccgacaacaccuucgugagcggcaacugcgacguggugaucggcaucgugaacaacaccguguacgauccccugcagcccgagcuggacagcuucaaggaggagcuggacaaguacuucaagaaucacaccagccccgacguggaccugggcgacaucagcggcaucaacgccagcguggugaacauccagaaggagaucgaucggcugaacgagguggccaagaaccugaacgagagccugaucgaccugcaggagcugggcaaguacgagcaguacaucaaguggcccugguacaucuggcugggcuucaucgccggccugaucgccaucgugauggugaccaucaugcugugcugcaugaccagcugcugcagcugccugaagggcuguugcagcugcggcagcugcugcaaguucgacgaggacgacagcgagcccgugcugaagggcgugaagcugcacuacaccugaugacucgagcugguacugcaugcacgcaaugcuagcugccccuuucccguccuggguaccccgagucucccccgaccucgggucccagguaugcucccaccuccaccugccccacucaccaccucugcuaguuccagacaccucccaagcacgcagcaaugcagcucaaaacgcuuagccuagccacacccccacgggaaacagcagugauuaaccuuuagcaauaaacgaaaguuuaacuaagcuauacuaaccccaggguuggucaauuucgugccagccacacccuggagcuagcaaaaaaaaaaaaaaaaaaaaaaaaaaaaaaaaaaaaaaaaaaaaaaaaaaaaaaaaaaaaaaaaaaaaaaaaaaaaaaaaaaaaaaaaaaaaaaaaaaaa

SEQ ID NO: 26415 - RNA, 4273 nt, Artificial Sequence
  SARS-CoV-2/Wuhan/WIV05/2019__EPI_ISL_402128 spike protein mRNA gc (1-1273)(K986P_V987P_A222V_D614G)
agaauaaacuaguauucuucugguccccacagacucagagagaacccgccaccauguucguguuccuggugcugcugccccuggugagcagccagugcgugaaccugaccacccggacccagcugccaccagccuacaccaacagcuucacccggggcgucuacuaccccgacaagguguuccggagcagcguccugcacagcacccaggaccuguuccugcccuucuucagcaacgugaccugguuccacgccauccacgugagcggcaccaacggcaccaagcgguucgacaaccccgugcugcccuucaacgacggcguguacuucgccagcaccgagaagagcaacaucauccggggcuggaucuucggcaccacccuggacagcaagacccagagccugcugaucgugaauaacgccaccaacguggugaucaaggugugcgaguuccaguucugcaacgaccccuuccugggcguguacuaccacaagaacaacaagagcuggauggagagcgaguuccggguguacagcagcgccaacaacugcaccuucgaguacgugagccagcccuuccugauggaccuggagggcaagcagggcaacuucaagaaccugcgggaguucguguucaagaacaucgacggcuacuucaagaucuacagcaagcacaccccaaucaaccuggugcgggaucugccccagggcuucucagugcuggagccccugguggaccugcccaucggcaucaacaucacccgguuccagacccugcuggcccugcaccggagcuaccugaccccaggcgacagcagcagcggguggacagcaggcgcggcugcuuacuacgugggcuaccugcagccccggaccuuccugcugaaguacaacgagaacggcaccaucaccgacgccguggacugcgcccuggacccucugagcgagaccaagugcacccugaagagcuucaccguggagaagggcaucuaccagaccagcaacuuccgggugcagcccaccgagagcaucgugcgguuccccaacaucaccaaccugugccccuucggcgagguguucaacgccacccgguucgccagcguguacgccuggaaccggaagcggaucagcaacugcguggccgacuacagcgugcuguacaacagcgccagcuucagcaccuucaagugcuacggcgugagccccaccaagcugaacgaccugugcuucaccaacguguacgccgacagcuucgugauccguggcgacgaggugcggcagaucgcacccggccagacaggcaagaucgccgacuacaacuacaagcugcccgacgacuucaccggcugcgugaucgccuggaacagcaacaaccucgacagcaaggugggcggcaacuacaacuaccuguaccggcuguuccggaagagcaaccugaagcccuucgagcgggacaucagcaccgagaucuaccaagccggcuccaccccuugcaacggcguggagggcuucaacugcuacuucccucugcagagcuacggcuuccagcccaccaacggcgugggcuaccagcccuaccgggugguggugcugagcuucgagcugcugcacgccccagccaccguguguggccccaagaagagcaccaaccuggugaagaacaagugcgugaacuucaacuucaacggccuuaccggcaccggcgugcugaccgagagcaacaagaaauuccugcccuuucagcaguucggccgggacaucgccgacaccaccgacgcugugcgggauccccagacccuggagauccuggacaucaccccuugcagcuucggcggcgugagcgugaucaccccaggcaccaacaccagcaaccagguggccgugcuguaccagggcgugaacugcaccgaggugcccguggccauccacgccgaccagcugacacccaccuggcgggucuacagcaccggcagcaacguguuccagacccgggccgguugccugaucggcgccgagcacgugaacaacagcuacgagugcgacauccccaucggcgccggcaucugugccagcuaccagacccagaccaauucaccccggagggcaaggagcguggccagccagagcaucaucgccuacaccaugagccugggcgccgagaacagcguggccuacagcaacaacagcaucgccauccccaccaacuucaccaucagcgugaccaccgagauucugcccgugagcaugaccaagaccagcguggacugcaccauguacaucugcggcgacagcaccgagugcagcaaccugcugcugcaguacggcagcuucugcacccagcugaaccgggcccugaccggcaucgccguggagcaggacaagaacacccaggagguguucgcccaggugaagcagaucuacaagaccccucccaucaaggacuucggcggcuucaacuucagccagauccugcccgaccccagcaagcccagcaagcggagcuucaucgaggaccugcuguucaacaaggugacccuagccgacgccggcuucaucaagcaguacggcgacugccucggcgacauagccgcccgggaccugaucugcgcccagaaguucaacggccugaccgugcugccuccccugcugaccgacgagaugaucgcccaguacaccagcgcccuguuagccggaaccaucaccagcggcuggacuuucggcgcuggagccgcucugcagauccccuucgccaugcagauggccuaccgguucaacggcaucggcgugacccagaacgugcuguacgagaaccagaagcugaucgccaaccaguucaacagcgccaucggcaagauccaggacagccugagcagcaccgcuagcgcccugggcaagcugcaggacguggugaaccagaacgcccaggcccugaacacccuggugaagcagcugagcagcaacuucggcgccaucagcagcgugcugaacgacauccugagccggcuggacccucccgaggccgaggugcagaucgaccggcugaucacuggccggcugcagagccugcagaccuacgugacccagcagcugauccgggccgccgagauucgggccagcgccaaccuggccgccaccaagaugagcgagugcgugcugggccagagcaagcggguggacuucugcggcaagggcuaccaccugaugagcuuuccccagagcgcaccccacggagugguguuccugcacgugaccuacgugcccgcccaggagaagaacuucaccaccgccccagccaucugccacgacggcaaggcccacuuuccccgggagggcguguucgugagcaacggcacccacugguucgugacccagcggaacuucuacgagccccagaucaucaccaccgacaacaccuucgugagcggcaacugcgacguggugaucggcaucgugaacaacaccguguacgauccccugcagcccgagcuggacagcuucaaggaggagcuggacaaguacuucaagaaucacaccagccccgacguggaccugggcgacaucagcggcaucaacgccagcguggugaacauccagaaggagaucgaucggcugaacgagguggccaagaaccugaacgagagccugaucgaccugcaggagcugggcaaguacgagcaguacaucaaguggcccugguacaucuggcugggcuucaucgccggccugaucgccaucgugauggugaccaucaugcugugcugcaugaccagcugcugcagcugccugaagggcuguugcagcugcggcagcugcugcaaguucgacgaggacgacagcgagcccgugcugaagggcgugaagcugcacuacaccugaugacucgagcugguacugcaugcacgcaaugcuagcugccccuuucccguccuggguaccccgagucucccccgaccucgggucccagguaugcucccaccuccaccugccccacucaccaccucugcuaguuccagacaccucccaagcacgcagcaaugcagcucaaaacgcuuagccuagccacacccccacgggaaacagcagugauuaaccuuuagcaauaaacgaaaguuuaacuaagcuauacuaaccccaggguuggucaauuucgugccagccacacccuggagcuagcaaaaaaaaaaaaaaaaaaaaaaaaaaaaaaaaaaaaaaaaaaaaaaaaaaaaaaaaaaaaaaaaaaaaaaaaaaaaaaaaaaaaaaaaaaaaaaaaaaaa

SEQ ID NO: 26416 - RNA, 4273 nt, Artificial Sequence
  SARS-CoV-2/Wuhan/WIV05/2019__EPI_ISL_402128 spike protein mRNA gc (1-1273)(K986P_V987P_N439K_D614G)
agaauaaacuaguauucuucugguccccacagacucagagagaacccgccaccauguucguguuccuggugcugcugccccuggugagcagccagugcgugaaccugaccacccggacccagcugccaccagccuacaccaacagcuucacccggggcgucuacuaccccgacaagguguuccggagcagcguccugcacagcacccaggaccuguuccugcccuucuucagcaacgugaccugguuccacgccauccacgugagcggcaccaacggcaccaagcgguucgacaaccccgugcugcccuucaacgacggcguguacuucgccagcaccgagaagagcaacaucauccggggcuggaucuucggcaccacccuggacagcaagacccagagccugcugaucgugaauaacgccaccaacguggugaucaaggugugcgaguuccaguucugcaacgaccccuuccugggcguguacuaccacaagaacaacaagagcuggauggagagcgaguuccggguguacagcagcgccaacaacugcaccuucgaguacgugagccagcccuuccugauggaccuggagggcaagcagggcaacuucaagaaccugcgggaguucguguucaagaacaucgacggcuacuucaagaucuacagcaagcacaccccaaucaaccuggugcgggaucugccccagggcuucucagcccuggagccccugguggaccugcccaucggcaucaacaucacccgguuccagacccugcuggcccugcaccggagcuaccugaccccaggcgacagcagcagcggguggacagcaggcgcggcugcuuacuacgugggcuaccugcagccccggaccuuccugcugaaguacaacgagaacggcaccaucaccgacgccguggacugcgcccuggacccucugagcgagaccaagugcacccugaagagcuucaccguggagaagggcaucuaccagaccagcaacuuccgggugcagcccaccgagagcaucgugcgguuccccaacaucaccaaccugugccccuucggcgagguguucaacgccacccgguucgccagcguguacgccuggaaccggaagcggaucagcaacugcguggccgacuacagcgugcuguacaacagcgccagcuucagcaccuucaagugcuacggcgugagccccaccaagcugaacgaccugugcuucaccaacguguacgccgacagcuucgugauccguggcgacgaggugcggcagaucgcacccggccagacaggcaagaucgccgacuacaacuacaagcugcccgacgacuucaccggcugcgugaucgccuggaacagcaagaaccucgacagcaaggugggcggcaacuacaacuaccuguaccggcuguuccggaagagcaaccugaagcccuucgagcgggacaucagcaccgagaucuaccaagccggcuccaccccuugcaacggcguggagggcuucaacugcuacuucccucugcagagcuacggcuuccagcccaccaacggcgugggcuaccagcccuaccgggugguggugcugagcuucgagcugcugcacgccccagccaccguguguggccccaagaagagcaccaaccuggugaagaacaagugcgugaacuucaacuucaacggccuuaccggcaccggcgugcugaccgagagcaacaagaaauuccugcccuuucagcaguucggccgggacaucgccgacaccaccgacgcugugcgggauccccagacccuggagauccuggacaucaccccuugcagcuucggcggcgugagcgugaucaccccaggcaccaacaccagcaaccagguggccgugcuguaccagggcgugaacugcaccgaggugcccguggccauccacgccgaccagcugacacccaccuggcgggucuacagcaccggcagcaacguguuccagacccgggccgguugccugaucggcgccgagcacgugaacaacagcuacgagugcgacauccccaucggcgccggcaucugugccagcuaccagacccagaccaauucaccccggagggcaaggagcguggccagccagagcaucaucgccuacaccaugagccugggcgccgagaacagcguggccuacagcaacaacagcaucgccauccccaccaacuucaccaucagcgugaccaccgagauucugcccgugagcaugaccaagaccagcguggacugcaccauguacaucugcggcgacagcaccgagugcagcaaccugcugcugcaguacggcagcuucugcacccagcugaaccgggcccugaccggcaucgccguggagcaggacaagaacacccaggagguguucgcccaggugaagcagaucuacaagaccccucccaucaaggacuucggcggcuucaacuucagccagauccugcccgaccccagcaagcccagcaagcggagcuucaucgaggaccugcuguucaacaaggugacccuagccgacgccggcuucaucaagcaguacggcgacugccucggcgacauagccgcccgggaccugaucugcgcccagaaguucaacggccugaccgugcugccuccccugcugaccgacgagaugaucgcccaguacaccagcgcccuguuagccggaaccaucaccagcggcuggacuuucggcgcuggagccgcucugcagauccccuucgccaugcagauggccuaccgguucaacggcaucggcgugacccagaacgugcuguacgagaaccagaagcugaucgccaaccaguucaacagcgccaucggcaagauccaggacagccugagcagcaccgcuagcgcccugggcaagcugcaggacguggugaaccagaacgcccaggcccugaacacccuggugaagcagcugagcagcaacuucggcgccaucagcagcgugcugaacgacauccugagccggcuggacccucccgaggccgaggugcagaucgaccggcugaucacuggccggcugcagagccugcagaccuacgugacccagcagcugauccgggccgccgagauucgggccagcgccaaccuggccgccaccaagaugagcgagugcgugcugggccagagcaagcggguggacuucugcggcaagggcuaccaccugaugagcuuuccccagagcgcaccccacggagugguguuccugcacgugaccuacgugcccgcccaggagaagaacuucaccaccgccccagccaucugccacgacggcaaggcccacuuuccccgggagggcguguucgugagcaacggcacccacugguucgugacccagcggaacuucuacgagccccagaucaucaccaccgacaacaccuucgugagcggcaacugcgacguggugaucggcaucgugaacaacaccguguacgauccccugcagcccgagcuggacagcuucaaggaggagcuggacaaguacuucaagaaucacaccagccccgacguggaccugggcgacaucagcggcaucaacgccagcguggugaacauccagaaggagaucgaucggcugaacgagguggccaagaaccugaacgagagccugaucgaccugcaggagcugggcaaguacgagcaguacaucaaguggcccugguacaucuggcugggcuucaucgccggccugaucgccaucgugauggugaccaucaugcugugcugcaugaccagcugcugcagcugccugaagggcuguugcagcugcggcagcugcugcaaguucgacgaggacgacagcgagcccgugcugaagggcgugaagcugcacuacaccugaugacucgagcugguacugcaugcacgcaaugcuagcugccccuuucccguccuggguaccccgagucucccccgaccucgggucccagguaugcucccaccuccaccugccccacucaccaccucugcuaguuccagacaccucccaagcacgcagcaaugcagcucaaaacgcuuagccuagccacacccccacgggaaacagcagugauuaaccuuuagcaauaaacgaaaguuuaacuaagcuauacuaaccccaggguuggucaauuucgugccagccacacccuggagcuagcaaaaaaaaaaaaaaaaaaaaaaaaaaaaaaaaaaaaaaaaaaaaaaaaaaaaaaaaaaaaaaaaaaaaaaaaaaaaaaaaaaaaaaaaaaaaaaaaaaaa

SEQ ID NO: 26417 - RNA, 4273 nt, Artificial Sequence
  SARS-CoV-2/Wuhan/WIV05/2019__EPI_ISL_402128 spike protein mRNA gc (1-1273)(K986P_V987P_S477N_D614G)
agaauaaacuaguauucuucugguccccacagacucagagagaacccgccaccauguucguguuccuggugcugcugccccuggugagcagccagugcgugaaccugaccacccggacccagcugccaccagccuacaccaacagcuucacccggggcgucuacuaccccgacaagguguuccggagcagcguccugcacagcacccaggaccuguuccugcccuucuucagcaacgugaccugguuccacgccauccacgugagcggcaccaacggcaccaagcgguucgacaaccccgugcugcccuucaacgacggcguguacuucgccagcaccgagaagagcaacaucauccggggcuggaucuucggcaccacccuggacagcaagacccagagccugcugaucgugaauaacgccaccaacguggugaucaaggugugcgaguuccaguucugcaacgaccccuuccugggcguguacuaccacaagaacaacaagagcuggauggagagcgaguuccggguguacagcagcgccaacaacugcaccuucgaguacgugagccagcccuuccugauggaccuggagggcaagcagggcaacuucaagaaccugcgggaguucguguucaagaacaucgacggcuacuucaagaucuacagcaagcacaccccaaucaaccuggugcgggaucugccccagggcuucucagcccuggagccccugguggaccugcccaucggcaucaacaucacccgguuccagacccugcuggcccugcaccggagcuaccugaccccaggcgacagcagcagcggguggacagcaggcgcggcugcuuacuacgugggcuaccugcagccccggaccuuccugcugaaguacaacgagaacggcaccaucaccgacgccguggacugcgcccuggacccucugagcgagaccaagugcacccugaagagcuucaccguggagaagggcaucuaccagaccagcaacuuccgggugcagcccaccgagagcaucgugcgguuccccaacaucaccaaccugugccccuucggcgagguguucaacgccacccgguucgccagcguguacgccuggaaccggaagcggaucagcaacugcguggccgacuacagcgugcuguacaacagcgccagcuucagcaccuucaagugcuacggcgugagccccaccaagcugaacgaccugugcuucaccaacguguacgccgacagcuucgugauccguggcgacgaggugcggcagaucgcacccggccagacaggcaagaucgccgacuacaacuacaagcugcccgacgacuucaccggcugcgugaucgccuggaacagcaacaaccucgacagcaaggugggcggcaacuacaacuaccuguaccggcuguuccggaagagcaaccugaagcccuucgagcgggacaucagcaccgagaucuaccaagccggcaacaccccuugcaacggcguggagggcuucaacugcuacuucccucugcagagcuacggcuuccagcccaccaacggcgugggcuaccagcccuaccgggugguggugcugagcuucgagcugcugcacgccccagccaccguguguggccccaagaagagcaccaaccuggugaagaacaagugcgugaacuucaacuucaacggccuuaccggcaccggcgugcugaccgagagcaacaagaaauuccugcccuuucagcaguucggccgggacaucgccgacaccaccgacgcugugcgggauccccagacccuggagauccuggacaucaccccuugcagcuucggcggcgugagcgugaucaccccaggcaccaacaccagcaaccagguggccgugcuguaccagggcgugaacugcaccgaggugcccguggccauccacgccgaccagcugacacccaccuggcgggucuacagcaccggcagcaacguguuccagacccgggccgguugccugaucggcgccgagcacgugaacaacagcuacgagugcgacauccccaucggcgccggcaucugugccagcuaccagacccagaccaauucaccccggagggcaaggagcguggccagccagagcaucaucgccuacaccaugagccugggcgccgagaacagcguggccuacagcaacaacagcaucgccauccccaccaacuucaccaucagcgugaccaccgagauucugcccgugagcaugaccaagaccagcguggacugcaccauguacaucugcggcgacagcaccgagugcagcaaccugcugcugcaguacggcagcuucugcacccagcugaaccgggcccugaccggcaucgccguggagcaggacaagaacacccaggagguguucgcccaggugaagcagaucuacaagaccccucccaucaaggacuucggcggcuucaacuucagccagauccugcccgaccccagcaagcccagcaagcggagcuucaucgaggaccugcuguucaacaaggugacccuagccgacgccggcuucaucaagcaguacggcgacugccucggcgacauagccgcccgggaccugaucugcgcccagaaguucaacggccugaccgugcugccuccccugcugaccgacgagaugaucgcccaguacaccagcgcccuguuagccggaaccaucaccagcggcuggacuuucggcgcuggagccgcucugcagauccccuucgccaugcagauggccuaccgguucaacggcaucggcgugacccagaacgugcuguacgagaaccagaagcugaucgccaaccaguucaacagcgccaucggcaagauccaggacagccugagcagcaccgcuagcgcccugggcaagcugcaggacguggugaaccagaacgcccaggcccugaacacccuggugaagcagcugagcagcaacuucggcgccaucagcagcgugcugaacgacauccugagccggcuggacccucccgaggccgaggugcagaucgaccggcugaucacuggccggcugcagagccugcagaccuacgugacccagcagcugauccgggccgccgagauucgggccagcgccaaccuggccgccaccaagaugagcgagugcgugcugggccagagcaagcggguggacuucugcggcaagggcuaccaccugaugagcuuuccccagagcgcaccccacggagugguguuccugcacgugaccuacgugcccgcccaggagaagaacuucaccaccgccccagccaucugccacgacggcaaggcccacuuuccccgggagggcguguucgugagcaacggcacccacugguucgugacccagcggaacuucuacgagccccagaucaucaccaccgacaacaccuucgugagcggcaacugcgacguggugaucggcaucgugaacaacaccguguacgauccccugcagcccgagcuggacagcuucaaggaggagcuggacaaguacuucaagaaucacaccagccccgacguggaccugggcgacaucagcggcaucaacgccagcguggugaacauccagaaggagaucgaucggcugaacgagguggccaagaaccugaacgagagccugaucgaccugcaggagcugggcaaguacgagcaguacaucaaguggcccugguacaucuggcugggcuucaucgccggccugaucgccaucgugauggugaccaucaugcugugcugcaugaccagcugcugcagcugccugaagggcuguugcagcugcggcagcugcugcaaguucgacgaggacgacagcgagcccgugcugaagggcgugaagcugcacuacaccugaugacucgagcugguacugcaugcacgcaaugcuagcugccccuuucccguccuggguaccccgagucucccccgaccucgggucccagguaugcucccaccuccaccugccccacucaccaccucugcuaguuccagacaccucccaagcacgcagcaaugcagcucaaaacgcuuagccuagccacacccccacgggaaacagcagugauuaaccuuuagcaauaaacgaaaguuuaacuaagcuauacuaaccccaggguuggucaauuucgugccagccacacccuggagcuagcaaaaaaaaaaaaaaaaaaaaaaaaaaaaaaaaaaaaaaaaaaaaaaaaaaaaaaaaaaaaaaaaaaaaaaaaaaaaaaaaaaaaaaaaaaaaaaaaaaaa

SEQ ID NO: 26418 - RNA, 4273 nt, Artificial Sequence
  SARS-CoV-2/Wuhan/WIV05/2019__EPI_ISL_402128 spike protein mRNA gc (1-1273)(K986P_V987P_N501Y_D614G)
agaauaaacuaguauucuucugguccccacagacucagagagaacccgccaccauguucguguuccuggugcugcugccccuggugagcagccagugcgugaaccugaccacccggacccagcugccaccagccuacaccaacagcuucacccggggcgucuacuaccccgacaagguguuccggagcagcguccugcacagcacccaggaccuguuccugcccuucuucagcaacgugaccugguuccacgccauccacgugagcggcaccaacggcaccaagcgguucgacaaccccgugcugcccuucaacgacggcguguacuucgccagcaccgagaagagcaacaucauccggggcuggaucuucggcaccacccuggacagcaagacccagagccugcugaucgugaauaacgccaccaacguggugaucaaggugugcgaguuccaguucugcaacgaccccuuccugggcguguacuaccacaagaacaacaagagcuggauggagagcgaguuccggguguacagcagcgccaacaacugcaccuucgaguacgugagccagcccuuccugauggaccuggagggcaagcagggcaacuucaagaaccugcgggaguucguguucaagaacaucgacggcuacuucaagaucuacagcaagcacaccccaaucaaccuggugcgggaucugccccagggcuucucagcccuggagccccugguggaccugcccaucggcaucaacaucacccgguuccagacccugcuggcccugcaccggagcuaccugaccccaggcgacagcagcagcggguggacagcaggcgcggcugcuuacuacgugggcuaccugcagccccggaccuuccugcugaaguacaacgagaacggcaccaucaccgacgccguggacugcgcccuggacccucugagcgagaccaagugcacccugaagagcuucaccguggagaagggcaucuaccagaccagcaacuuccgggugcagcccaccgagagcaucgugcgguuccccaacaucaccaaccugugccccuucggcgagguguucaacgccacccgguucgccagcguguacgccuggaaccggaagcggaucagcaacugcguggccgacuacagcgugcuguacaacagcgccagcuucagcaccuucaagugcuacggcgugagccccaccaagcugaacgaccugugcuucaccaacguguacgccgacagcuucgugauccguggcgacgaggugcggcagaucgcacccggccagacaggcaagaucgccgacuacaacuacaagcugcccgacgacuucaccggcugcgugaucgccuggaacagcaacaaccucgacagcaaggugggcggcaacuacaacuaccuguaccggcuguuccggaagagcaaccugaagcccuucgagcgggacaucagcaccgagaucuaccaagccggcuccaccccuugcaacggcguggagggcuucaacugcuacuucccucugcagagcuacggcuuccagcccaccuacggcgugggcuaccagcccuaccgggugguggugcugagcuucgagcugcugcacgccccagccaccguguguggccccaagaagagcaccaaccuggugaagaacaagugcgugaacuucaacuucaacggccuuaccggcaccggcgugcugaccgagagcaacaagaaauuccugcccuuucagcaguucggccgggacaucgccgacaccaccgacgcugugcgggauccccagacccuggagauccuggacaucaccccuugcagcuucggcggcgugagcgugaucaccccaggcaccaacaccagcaaccagguggccgugcuguaccagggcgugaacugcaccgaggugcccguggccauccacgccgaccagcugacacccaccuggcgggucuacagcaccggcagcaacguguuccagacccgggccgguugccugaucggcgccgagcacgugaacaacagcuacgagugcgacauccccaucggcgccggcaucugugccagcuaccagacccagaccaauucaccccggagggcaaggagcguggccagccagagcaucaucgccuacaccaugagccugggcgccgagaacagcguggccuacagcaacaacagcaucgccauccccaccaacuucaccaucagcgugaccaccgagauucugcccgugagcaugaccaagaccagcguggacugcaccauguacaucugcggcgacagcaccgagugcagcaaccugcugcugcaguacggcagcuucugcacccagcugaaccgggcccugaccggcaucgccguggagcaggacaagaacacccaggagguguucgcccaggugaagcagaucuacaagaccccucccaucaaggacuucggcggcuucaacuucagccagauccugcccgaccccagcaagcccagcaagcggagcuucaucgaggaccugcuguucaacaaggugacccuagccgacgccggcuucaucaagcaguacggcgacugccucggcgacauagccgcccgggaccugaucugcgcccagaaguucaacggccugaccgugcugccuccccugcugaccgacgagaugaucgcccaguacaccagcgcccuguuagccggaaccaucaccagcggcuggacuuucggcgcuggagccgcucugcagauccccuucgccaugcagauggccuaccgguucaacggcaucggcgugacccagaacgugcuguacgagaaccagaagcugaucgccaaccaguucaacagcgccaucggcaagauccaggacagccugagcagcaccgcuagcgcccugggcaagcugcaggacguggugaaccagaacgcccaggcccugaacacccuggugaagcagcugagcagcaacuucggcgccaucagcagcgugcugaacgacauccugagccggcuggacccucccgaggccgaggugcagaucgaccggcugaucacuggccggcugcagagccugcagaccuacgugacccagcagcugauccgggccgccgagauucgggccagcgccaaccuggccgccaccaagaugagcgagugcgugcugggccagagcaagcggguggacuucugcggcaagggcuaccaccugaugagcuuuccccagagcgcaccccacggagugguguuccugcacgugaccuacgugcccgcccaggagaagaacuucaccaccgccccagccaucugccacgacggcaaggcccacuuuccccgggagggcguguucgugagcaacggcacccacugguucgugacccagcggaacuucuacgagccccagaucaucaccaccgacaacaccuucgugagcggcaacugcgacguggugaucggcaucgugaacaacaccguguacgauccccugcagcccgagcuggacagcuucaaggaggagcuggacaaguacuucaagaaucacaccagccccgacguggaccugggcgacaucagcggcaucaacgccagcguggugaacauccagaaggagaucgaucggcugaacgagguggccaagaaccugaacgagagccugaucgaccugcaggagcugggcaaguacgagcaguacaucaaguggcccugguacaucuggcugggcuucaucgccggccugaucgccaucgugauggugaccaucaugcugugcugcaugaccagcugcugcagcugccugaagggcuguugcagcugcggcagcugcugcaaguucgacgaggacgacagcgagcccgugcugaagggcgugaagcugcacuacaccugaugacucgagcugguacugcaugcacgcaaugcuagcugccccuuucccguccuggguaccccgagucucccccgaccucgggucccagguaugcucccaccuccaccugccccacucaccaccucugcuaguuccagacaccucccaagcacgcagcaaugcagcucaaaacgcuuagccuagccacacccccacgggaaacagcagugauuaaccuuuagcaauaaacgaaaguuuaacuaagcuauacuaaccccaggguuggucaauuucgugccagccacacccuggagcuagcaaaaaaaaaaaaaaaaaaaaaaaaaaaaaaaaaaaaaaaaaaaaaaaaaaaaaaaaaaaaaaaaaaaaaaaaaaaaaaaaaaaaaaaaaaaaaaaaaaaa

SEQ ID NO: 26419 - RNA, 4267 nt, Artificial Sequence
  SARS-CoV-2/Wuhan/WIV05/2019__EPI_ISL_402128 spike protein mRNA gc (1-1273)(K986P_V987P_H69del_V70del_D614G)
agaauaaacuaguauucuucugguccccacagacucagagagaacccgccaccauguucguguuccuggugcugcugccccuggugagcagccagugcgugaaccugaccacccggacccagcugccaccagccuacaccaacagcuucacccggggcgucuacuaccccgacaagguguuccggagcagcguccugcacagcacccaggaccuguuccugcccuucuucagcaacgugaccugguuccacgccaucagcggcaccaacggcaccaagcgguucgacaaccccgugcugcccuucaacgacggcguguacuucgccagcaccgagaagagcaacaucauccggggcuggaucuucggcaccacccuggacagcaagacccagagccugcugaucgugaauaacgccaccaacguggugaucaaggugugcgaguuccaguucugcaacgaccccuuccugggcguguacuaccacaagaacaacaagagcuggauggagagcgaguuccggguguacagcagcgccaacaacugcaccuucgaguacgugagccagcccuuccugauggaccuggagggcaagcagggcaacuucaagaaccugcgggaguucguguucaagaacaucgacggcuacuucaagaucuacagcaagcacaccccaaucaaccuggugcgggaucugccccagggcuucucagcccuggagccccugguggaccugcccaucggcaucaacaucacccgguuccagacccugcuggcccugcaccggagcuaccugaccccaggcgacagcagcagcggguggacagcaggcgcggcugcuuacuacgugggcuaccugcagccccggaccuuccugcugaaguacaacgagaacggcaccaucaccgacgccguggacugcgcccuggacccucugagcgagaccaagugcacccugaagagcuucaccguggagaagggcaucuaccagaccagcaacuuccgggugcagcccaccgagagcaucgugcgguuccccaacaucaccaaccugugccccuucggcgagguguucaacgccacccgguucgccagcguguacgccuggaaccggaagcggaucagcaacugcguggccgacuacagcgugcuguacaacagcgccagcuucagcaccuucaagugcuacggcgugagccccaccaagcugaacgaccugugcuucaccaacguguacgccgacagcuucgugauccguggcgacgaggugcggcagaucgcacccggccagacaggcaagaucgccgacuacaacuacaagcugcccgacgacuucaccggcugcgugaucgccuggaacagcaacaaccucgacagcaaggugggcggcaacuacaacuaccuguaccggcuguuccggaagagcaaccugaagcccuucgagcgggacaucagcaccgagaucuaccaagccggcuccaccccuugcaacggcguggagggcuucaacugcuacuucccucugcagagcuacggcuuccagcccaccaacggcgugggcuaccagcccuaccgggugguggugcugagcuucgagcugcugcacgccccagccaccguguguggccccaagaagagcaccaaccuggugaagaacaagugcgugaacuucaacuucaacggccuuaccggcaccggcgugcugaccgagagcaacaagaaauuccugcccuuucagcaguucggccgggacaucgccgacaccaccgacgcugugcgggauccccagacccuggagauccuggacaucaccccuugcagcuucggcggcgugagcgugaucaccccaggcaccaacaccagcaaccagguggccgugcuguaccagggcgugaacugcaccgaggugcccguggccauccacgccgaccagcugacacccaccuggcgggucuacagcaccggcagcaacguguuccagacccgggccgguugccugaucggcgccgagcacgugaacaacagcuacgagugcgacauccccaucggcgccggcaucugugccagcuaccagacccagaccaauucaccccggagggcaaggagcguggccagccagagcaucaucgccuacaccaugagccugggcgccgagaacagcguggccuacagcaacaacagcaucgccauccccaccaacuucaccaucagcgugaccaccgagauucugcccgugagcaugaccaagaccagcguggacugcaccauguacaucugcggcgacagcaccgagugcagcaaccugcugcugcaguacggcagcuucugcacccagcugaaccgggcccugaccggcaucgccguggagcaggacaagaacacccaggagguguucgcccaggugaagcagaucuacaagaccccucccaucaaggacuucggcggcuucaacuucagccagauccugcccgaccccagcaagcccagcaagcggagcuucaucgaggaccugcuguucaacaaggugacccuagccgacgccggcuucaucaagcaguacggcgacugccucggcgacauagccgcccgggaccugaucugcgcccagaaguucaacggccugaccgugcugccuccccugcugaccgacgagaugaucgcccaguacaccagcgcccuguuagccggaaccaucaccagcggcuggacuuucggcgcuggagccgcucugcagauccccuucgccaugcagauggccuaccgguucaacggcaucggcgugacccagaacgugcuguacgagaaccagaagcugaucgccaaccaguucaacagcgccaucggcaagauccaggacagccugagcagcaccgcuagcgcccugggcaagcugcaggacguggugaaccagaacgcccaggcccugaacacccuggugaagcagcugagcagcaacuucggcgccaucagcagcgugcugaacgacauccugagccggcuggacccucccgaggccgaggugcagaucgaccggcugaucacuggccggcugcagagccugcagaccuacgugacccagcagcugauccgggccgccgagauucgggccagcgccaaccuggccgccaccaagaugagcgagugcgugcugggccagagcaagcggguggacuucugcggcaagggcuaccaccugaugagcuuuccccagagcgcaccccacggagugguguuccugcacgugaccuacgugcccgcccaggagaagaacuucaccaccgccccagccaucugccacgacggcaaggcccacuuuccccgggagggcguguucgugagcaacggcacccacugguucgugacccagcggaacuucuacgagccccagaucaucaccaccgacaacaccuucgugagcggcaacugcgacguggugaucggcaucgugaacaacaccguguacgauccccugcagcccgagcuggacagcuucaaggaggagcuggacaaguacuucaagaaucacaccagccccgacguggaccugggcgacaucagcggcaucaacgccagcguggugaacauccagaaggagaucgaucggcugaacgagguggccaagaaccugaacgagagccugaucgaccugcaggagcugggcaaguacgagcaguacaucaaguggcccugguacaucuggcugggcuucaucgccggccugaucgccaucgugauggugaccaucaugcugugcugcaugaccagcugcugcagcugccugaagggcuguugcagcugcggcagcugcugcaaguucgacgaggacgacagcgagcccgugcugaagggcgugaagcugcacuacaccugaugacucgagcugguacugcaugcacgcaaugcuagcugccccuuucccguccuggguaccccgagucucccccgaccucgggucccagguaugcucccaccuccaccugccccacucaccaccucugcuaguuccagacaccucccaagcacgcagcaaugcagcucaaaacgcuuagccuagccacacccccacgggaaacagcagugauuaaccuuuagcaauaaacgaaaguuuaacuaagcuauacuaaccccaggguuggucaauuucgugccagccacacccuggagcuagcaaaaaaaaaaaaaaaaaaaaaaaaaaaaaaaaaaaaaaaaaaaaaaaaaaaaaaaaaaaaaaaaaaaaaaaaaaaaaaaaaaaaaaaaaaaaaaaaaaaa

SEQ ID NO: 26420 - RNA, 4273 nt, Artificial Sequence
  SARS-CoV-2/Wuhan/WIV05/2019__EPI_ISL_402128 spike protein mRNA gc (1-1273)(K986P_V987P_Y453F_D614G)
agaauaaacuaguauucuucugguccccacagacucagagagaacccgccaccauguucguguuccuggugcugcugccccuggugagcagccagugcgugaaccugaccacccggacccagcugccaccagccuacaccaacagcuucacccggggcgucuacuaccccgacaagguguuccggagcagcguccugcacagcacccaggaccuguuccugcccuucuucagcaacgugaccugguuccacgccauccacgugagcggcaccaacggcaccaagcgguucgacaaccccgugcugcccuucaacgacggcguguacuucgccagcaccgagaagagcaacaucauccggggcuggaucuucggcaccacccuggacagcaagacccagagccugcugaucgugaauaacgccaccaacguggugaucaaggugugcgaguuccaguucugcaacgaccccuuccugggcguguacuaccacaagaacaacaagagcuggauggagagcgaguuccggguguacagcagcgccaacaacugcaccuucgaguacgugagccagcccuuccugauggaccuggagggcaagcagggcaacuucaagaaccugcgggaguucguguucaagaacaucgacggcuacuucaagaucuacagcaagcacaccccaaucaaccuggugcgggaucugccccagggcuucucagcccuggagccccugguggaccugcccaucggcaucaacaucacccgguuccagacccugcuggcccugcaccggagcuaccugaccccaggcgacagcagcagcggguggacagcaggcgcggcugcuuacuacgugggcuaccugcagccccggaccuuccugcugaaguacaacgagaacggcaccaucaccgacgccguggacugcgcccuggacccucugagcgagaccaagugcacccugaagagcuucaccguggagaagggcaucuaccagaccagcaacuuccgggugcagcccaccgagagcaucgugcgguuccccaacaucaccaaccugugccccuucggcgagguguucaacgccacccgguucgccagcguguacgccuggaaccggaagcggaucagcaacugcguggccgacuacagcgugcuguacaacagcgccagcuucagcaccuucaagugcuacggcgugagccccaccaagcugaacgaccugugcuucaccaacguguacgccgacagcuucgugauccguggcgacgaggugcggcagaucgcacccggccagacaggcaagaucgccgacuacaacuacaagcugcccgacgacuucaccggcugcgugaucgccuggaacagcaacaaccucgacagcaaggugggcggcaacuacaacuaccuguuccggcuguuccggaagagcaaccugaagcccuucgagcgggacaucagcaccgagaucuaccaagccggcuccaccccuugcaacggcguggagggcuucaacugcuacuucccucugcagagcuacggcuuccagcccaccaacggcgugggcuaccagcccuaccgggugguggugcugagcuucgagcugcugcacgccccagccaccguguguggccccaagaagagcaccaaccuggugaagaacaagugcgugaacuucaacuucaacggccuuaccggcaccggcgugcugaccgagagcaacaagaaauuccugcccuuucagcaguucggccgggacaucgccgacaccaccgacgcugugcgggauccccagacccuggagauccuggacaucaccccuugcagcuucggcggcgugagcgugaucaccccaggcaccaacaccagcaaccagguggccgugcuguaccagggcgugaacugcaccgaggugcccguggccauccacgccgaccagcugacacccaccuggcgggucuacagcaccggcagcaacguguuccagacccgggccgguugccugaucggcgccgagcacgugaacaacagcuacgagugcgacauccccaucggcgccggcaucugugccagcuaccagacccagaccaauucaccccggagggcaaggagcguggccagccagagcaucaucgccuacaccaugagccugggcgccgagaacagcguggccuacagcaacaacagcaucgccauccccaccaacuucaccaucagcgugaccaccgagauucugcccgugagcaugaccaagaccagcguggacugcaccauguacaucugcggcgacagcaccgagugcagcaaccugcugcugcaguacggcagcuucugcacccagcugaaccgggcccugaccggcaucgccguggagcaggacaagaacacccaggagguguucgcccaggugaagcagaucuacaagaccccucccaucaaggacuucggcggcuucaacuucagccagauccugcccgaccccagcaagcccagcaagcggagcuucaucgaggaccugcuguucaacaaggugacccuagccgacgccggcuucaucaagcaguacggcgacugccucggcgacauagccgcccgggaccugaucugcgcccagaaguucaacggccugaccgugcugccuccccugcugaccgacgagaugaucgcccaguacaccagcgcccuguuagccggaaccaucaccagcggcuggacuuucggcgcuggagccgcucugcagauccccuucgccaugcagauggccuaccgguucaacggcaucggcgugacccagaacgugcuguacgagaaccagaagcugaucgccaaccaguucaacagcgccaucggcaagauccaggacagccugagcagcaccgcuagcgcccugggcaagcugcaggacguggugaaccagaacgcccaggcccugaacacccuggugaagcagcugagcagcaacuucggcgccaucagcagcgugcugaacgacauccugagccggcuggacccucccgaggccgaggugcagaucgaccggcugaucacuggccggcugcagagccugcagaccuacgugacccagcagcugauccgggccgccgagauucgggccagcgccaaccuggccgccaccaagaugagcgagugcgugcugggccagagcaagcggguggacuucugcggcaagggcuaccaccugaugagcuuuccccagagcgcaccccacggagugguguuccugcacgugaccuacgugcccgcccaggagaagaacuucaccaccgccccagccaucugccacgacggcaaggcccacuuuccccgggagggcguguucgugagcaacggcacccacugguucgugacccagcggaacuucuacgagccccagaucaucaccaccgacaacaccuucgugagcggcaacugcgacguggugaucggcaucgugaacaacaccguguacgauccccugcagcccgagcuggacagcuucaaggaggagcuggacaaguacuucaagaaucacaccagccccgacguggaccugggcgacaucagcggcaucaacgccagcguggugaacauccagaaggagaucgaucggcugaacgagguggccaagaaccugaacgagagccugaucgaccugcaggagcugggcaaguacgagcaguacaucaaguggcccugguacaucuggcugggcuucaucgccggccugaucgccaucgugauggugaccaucaugcugugcugcaugaccagcugcugcagcugccugaagggcuguugcagcugcggcagcugcugcaaguucgacgaggacgacagcgagcccgugcugaagggcgugaagcugcacuacaccugaugacucgagcugguacugcaugcacgcaaugcuagcugccccuuucccguccuggguaccccgagucucccccgaccucgggucccagguaugcucccaccuccaccugccccacucaccaccucugcuaguuccagacaccucccaagcacgcagcaaugcagcucaaaacgcuuagccuagccacacccccacgggaaacagcagugauuaaccuuuagcaauaaacgaaaguuuaacuaagcuauacuaaccccaggguuggucaauuucgugccagccacacccuggagcuagcaaaaaaaaaaaaaaaaaaaaaaaaaaaaaaaaaaaaaaaaaaaaaaaaaaaaaaaaaaaaaaaaaaaaaaaaaaaaaaaaaaaaaaaaaaaaaaaaaaaa

SEQ ID NO: 26421 - RNA, 4273 nt, Artificial Sequence
  SARS-CoV-2/Wuhan/WIV05/2019__EPI_ISL_402128 spike protein mRNA gc (1-1273)(K986P_V987P_D614G_I692V)
agaauaaacuaguauucuucugguccccacagacucagagagaacccgccaccauguucguguuccuggugcugcugccccuggugagcagccagugcgugaaccugaccacccggacccagcugccaccagccuacaccaacagcuucacccggggcgucuacuaccccgacaagguguuccggagcagcguccugcacagcacccaggaccuguuccugcccuucuucagcaacgugaccugguuccacgccauccacgugagcggcaccaacggcaccaagcgguucgacaaccccgugcugcccuucaacgacggcguguacuucgccagcaccgagaagagcaacaucauccggggcuggaucuucggcaccacccuggacagcaagacccagagccugcugaucgugaauaacgccaccaacguggugaucaaggugugcgaguuccaguucugcaacgaccccuuccugggcguguacuaccacaagaacaacaagagcuggauggagagcgaguuccggguguacagcagcgccaacaacugcaccuucgaguacgugagccagcccuuccugauggaccuggagggcaagcagggcaacuucaagaaccugcgggaguucguguucaagaacaucgacggcuacuucaagaucuacagcaagcacaccccaaucaaccuggugcgggaucugccccagggcuucucagcccuggagccccugguggaccugcccaucggcaucaacaucacccgguuccagacccugcuggcccugcaccggagcuaccugaccccaggcgacagcagcagcggguggacagcaggcgcggcugcuuacuacgugggcuaccugcagccccggaccuuccugcugaaguacaacgagaacggcaccaucaccgacgccguggacugcgcccuggacccucugagcgagaccaagugcacccugaagagcuucaccguggagaagggcaucuaccagaccagcaacuuccgggugcagcccaccgagagcaucgugcgguuccccaacaucaccaaccugugccccuucggcgagguguucaacgccacccgguucgccagcguguacgccuggaaccggaagcggaucagcaacugcguggccgacuacagcgugcuguacaacagcgccagcuucagcaccuucaagugcuacggcgugagccccaccaagcugaacgaccugugcuucaccaacguguacgccgacagcuucgugauccguggcgacgaggugcggcagaucgcacccggccagacaggcaagaucgccgacuacaacuacaagcugcccgacgacuucaccggcugcgugaucgccuggaacagcaacaaccucgacagcaaggugggcggcaacuacaacuaccuguaccggcuguuccggaagagcaaccugaagcccuucgagcgggacaucagcaccgagaucuaccaagccggcuccaccccuugcaacggcguggagggcuucaacugcuacuucccucugcagagcuacggcuuccagcccaccaacggcgugggcuaccagcccuaccgggugguggugcugagcuucgagcugcugcacgccccagccaccguguguggccccaagaagagcaccaaccuggugaagaacaagugcgugaacuucaacuucaacggccuuaccggcaccggcgugcugaccgagagcaacaagaaauuccugcccuuucagcaguucggccgggacaucgccgacaccaccgacgcugugcgggauccccagacccuggagauccuggacaucaccccuugcagcuucggcggcgugagcgugaucaccccaggcaccaacaccagcaaccagguggccgugcuguaccagggcgugaacugcaccgaggugcccguggccauccacgccgaccagcugacacccaccuggcgggucuacagcaccggcagcaacguguuccagacccgggccgguugccugaucggcgccgagcacgugaacaacagcuacgagugcgacauccccaucggcgccggcaucugugccagcuaccagacccagaccaauucaccccggagggcaaggagcguggccagccagagcgugaucgccuacaccaugagccugggcgccgagaacagcguggccuacagcaacaacagcaucgccauccccaccaacuucaccaucagcgugaccaccgagauucugcccgugagcaugaccaagaccagcguggacugcaccauguacaucugcggcgacagcaccgagugcagcaaccugcugcugcaguacggcagcuucugcacccagcugaaccgggcccugaccggcaucgccguggagcaggacaagaacacccaggagguguucgcccaggugaagcagaucuacaagaccccucccaucaaggacuucggcggcuucaacuucagccagauccugcccgaccccagcaagcccagcaagcggagcuucaucgaggaccugcuguucaacaaggugacccuagccgacgccggcuucaucaagcaguacggcgacugccucggcgacauagccgcccgggaccugaucugcgcccagaaguucaacggccugaccgugcugccuccccugcugaccgacgagaugaucgcccaguacaccagcgcccuguuagccggaaccaucaccagcggcuggacuuucggcgcuggagccgcucugcagauccccuucgccaugcagauggccuaccgguucaacggcaucggcgugacccagaacgugcuguacgagaaccagaagcugaucgccaaccaguucaacagcgccaucggcaagauccaggacagccugagcagcaccgcuagcgcccugggcaagcugcaggacguggugaaccagaacgcccaggcccugaacacccuggugaagcagcugagcagcaacuucggcgccaucagcagcgugcugaacgacauccugagccggcuggacccucccgaggccgaggugcagaucgaccggcugaucacuggccggcugcagagccugcagaccuacgugacccagcagcugauccgggccgccgagauucgggccagcgccaaccuggccgccaccaagaugagcgagugcgugcugggccagagcaagcggguggacuucugcggcaagggcuaccaccugaugagcuuuccccagagcgcaccccacggagugguguuccugcacgugaccuacgugcccgcccaggagaagaacuucaccaccgccccagccaucugccacgacggcaaggcccacuuuccccgggagggcguguucgugagcaacggcacccacugguucgugacccagcggaacuucuacgagccccagaucaucaccaccgacaacaccuucgugagcggcaacugcgacguggugaucggcaucgugaacaacaccguguacgauccccugcagcccgagcuggacagcuucaaggaggagcuggacaaguacuucaagaaucacaccagccccgacguggaccugggcgacaucagcggcaucaacgccagcguggugaacauccagaaggagaucgaucggcugaacgagguggccaagaaccugaacgagagccugaucgaccugcaggagcugggcaaguacgagcaguacaucaaguggcccugguacaucuggcugggcuucaucgccggccugaucgccaucgugauggugaccaucaugcugugcugcaugaccagcugcugcagcugccugaagggcuguugcagcugcggcagcugcugcaaguucgacgaggacgacagcgagcccgugcugaagggcgugaagcugcacuacaccugaugacucgagcugguacugcaugcacgcaaugcuagcugccccuuucccguccuggguaccccgagucucccccgaccucgggucccagguaugcucccaccuccaccugccccacucaccaccucugcuaguuccagacaccucccaagcacgcagcaaugcagcucaaaacgcuuagccuagccacacccccacgggaaacagcagugauuaaccuuuagcaauaaacgaaaguuuaacuaagcuauacuaaccccaggguuggucaauuucgugccagccacacccuggagcuagcaaaaaaaaaaaaaaaaaaaaaaaaaaaaaaaaaaaaaaaaaaaaaaaaaaaaaaaaaaaaaaaaaaaaaaaaaaaaaaaaaaaaaaaaaaaaaaaaaaaa

SEQ ID NO: 26422 - RNA, 4273 nt, Artificial Sequence
  SARS-CoV-2/Wuhan/WIV05/2019__EPI_ISL_402128 spike protein mRNA gc (1-1273)(K986P_V987P_D614G_M1229I)
agaauaaacuaguauucuucugguccccacagacucagagagaacccgccaccauguucguguuccuggugcugcugccccuggugagcagccagugcgugaaccugaccacccggacccagcugccaccagccuacaccaacagcuucacccggggcgucuacuaccccgacaagguguuccggagcagcguccugcacagcacccaggaccuguuccugcccuucuucagcaacgugaccugguuccacgccauccacgugagcggcaccaacggcaccaagcgguucgacaaccccgugcugcccuucaacgacggcguguacuucgccagcaccgagaagagcaacaucauccggggcuggaucuucggcaccacccuggacagcaagacccagagccugcugaucgugaauaacgccaccaacguggugaucaaggugugcgaguuccaguucugcaacgaccccuuccugggcguguacuaccacaagaacaacaagagcuggauggagagcgaguuccggguguacagcagcgccaacaacugcaccuucgaguacgugagccagcccuuccugauggaccuggagggcaagcagggcaacuucaagaaccugcgggaguucguguucaagaacaucgacggcuacuucaagaucuacagcaagcacaccccaaucaaccuggugcgggaucugccccagggcuucucagcccuggagccccugguggaccugcccaucggcaucaacaucacccgguuccagacccugcuggcccugcaccggagcuaccugaccccaggcgacagcagcagcggguggacagcaggcgcggcugcuuacuacgugggcuaccugcagccccggaccuuccugcugaaguacaacgagaacggcaccaucaccgacgccguggacugcgcccuggacccucugagcgagaccaagugcacccugaagagcuucaccguggagaagggcaucuaccagaccagcaacuuccgggugcagcccaccgagagcaucgugcgguuccccaacaucaccaaccugugccccuucggcgagguguucaacgccacccgguucgccagcguguacgccuggaaccggaagcggaucagcaacugcguggccgacuacagcgugcuguacaacagcgccagcuucagcaccuucaagugcuacggcgugagccccaccaagcugaacgaccugugcuucaccaacguguacgccgacagcuucgugauccguggcgacgaggugcggcagaucgcacccggccagacaggcaagaucgccgacuacaacuacaagcugcccgacgacuucaccggcugcgugaucgccuggaacagcaacaaccucgacagcaaggugggcggcaacuacaacuaccuguaccggcuguuccggaagagcaaccugaagcccuucgagcgggacaucagcaccgagaucuaccaagccggcuccaccccuugcaacggcguggagggcuucaacugcuacuucccucugcagagcuacggcuuccagcccaccaacggcgugggcuaccagcccuaccgggugguggugcugagcuucgagcugcugcacgccccagccaccguguguggccccaagaagagcaccaaccuggugaagaacaagugcgugaacuucaacuucaacggccuuaccggcaccggcgugcugaccgagagcaacaagaaauuccugcccuuucagcaguucggccgggacaucgccgacaccaccgacgcugugcgggauccccagacccuggagauccuggacaucaccccuugcagcuucggcggcgugagcgugaucaccccaggcaccaacaccagcaaccagguggccgugcuguaccagggcgugaacugcaccgaggugcccguggccauccacgccgaccagcugacacccaccuggcgggucuacagcaccggcagcaacguguuccagacccgggccgguugccugaucggcgccgagcacgugaacaacagcuacgagugcgacauccccaucggcgccggcaucugugccagcuaccagacccagaccaauucaccccggagggcaaggagcguggccagccagagcaucaucgccuacaccaugagccugggcgccgagaacagcguggccuacagcaacaacagcaucgccauccccaccaacuucaccaucagcgugaccaccgagauucugcccgugagcaugaccaagaccagcguggacugcaccauguacaucugcggcgacagcaccgagugcagcaaccugcugcugcaguacggcagcuucugcacccagcugaaccgggcccugaccggcaucgccguggagcaggacaagaacacccaggagguguucgcccaggugaagcagaucuacaagaccccucccaucaaggacuucggcggcuucaacuucagccagauccugcccgaccccagcaagcccagcaagcggagcuucaucgaggaccugcuguucaacaaggugacccuagccgacgccggcuucaucaagcaguacggcgacugccucggcgacauagccgcccgggaccugaucugcgcccagaaguucaacggccugaccgugcugccuccccugcugaccgacgagaugaucgcccaguacaccagcgcccuguuagccggaaccaucaccagcggcuggacuuucggcgcuggagccgcucugcagauccccuucgccaugcagauggccuaccgguucaacggcaucggcgugacccagaacgugcuguacgagaaccagaagcugaucgccaaccaguucaacagcgccaucggcaagauccaggacagccugagcagcaccgcuagcgcccugggcaagcugcaggacguggugaaccagaacgcccaggcccugaacacccuggugaagcagcugagcagcaacuucggcgccaucagcagcgugcugaacgacauccugagccggcuggacccucccgaggccgaggugcagaucgaccggcugaucacuggccggcugcagagccugcagaccuacgugacccagcagcugauccgggccgccgagauucgggccagcgccaaccuggccgccaccaagaugagcgagugcgugcugggccagagcaagcggguggacuucugcggcaagggcuaccaccugaugagcuuuccccagagcgcaccccacggagugguguuccugcacgugaccuacgugcccgcccaggagaagaacuucaccaccgccccagccaucugccacgacggcaaggcccacuuuccccgggagggcguguucgugagcaacggcacccacugguucgugacccagcggaacuucuacgagccccagaucaucaccaccgacaacaccuucgugagcggcaacugcgacguggugaucggcaucgugaacaacaccguguacgauccccugcagcccgagcuggacagcuucaaggaggagcuggacaaguacuucaagaaucacaccagccccgacguggaccugggcgacaucagcggcaucaacgccagcguggugaacauccagaaggagaucgaucggcugaacgagguggccaagaaccugaacgagagccugaucgaccugcaggagcugggcaaguacgagcaguacaucaaguggcccugguacaucuggcugggcuucaucgccggccugaucgccaucgugaucgugaccaucaugcugugcugcaugaccagcugcugcagcugccugaagggcuguugcagcugcggcagcugcugcaaguucgacgaggacgacagcgagcccgugcugaagggcgugaagcugcacuacaccugaugacucgagcugguacugcaugcacgcaaugcuagcugccccuuucccguccuggguaccccgagucucccccgaccucgggucccagguaugcucccaccuccaccugccccacucaccaccucugcuaguuccagacaccucccaagcacgcagcaaugcagcucaaaacgcuuagccuagccacacccccacgggaaacagcagugauuaaccuuuagcaauaaacgaaaguuuaacuaagcuauacuaaccccaggguuggucaauuucgugccagccacacccuggagcuagcaaaaaaaaaaaaaaaaaaaaaaaaaaaaaaaaaaaaaaaaaaaaaaaaaaaaaaaaaaaaaaaaaaaaaaaaaaaaaaaaaaaaaaaaaaaaaaaaaaaa

SEQ ID NO: 26423 - RNA, 4267 nt, Artificial Sequence
  SARS-CoV-2/Wuhan/WIV05/2019__EPI_ISL_402128 spike protein mRNA gc (1-1273)(K986P_V987P_H69del_V70del_A222V_Y453F_S477N_D614G_I692V)
agaauaaacuaguauucuucugguccccacagacucagagagaacccgccaccauguucguguuccuggugcugcugccccuggugagcagccagugcgugaaccugaccacccggacccagcugccaccagccuacaccaacagcuucacccggggcgucuacuaccccgacaagguguuccggagcagcguccugcacagcacccaggaccuguuccugcccuucuucagcaacgugaccugguuccacgccaucagcggcaccaacggcaccaagcgguucgacaaccccgugcugcccuucaacgacggcguguacuucgccagcaccgagaagagcaacaucauccggggcuggaucuucggcaccacccuggacagcaagacccagagccugcugaucgugaauaacgccaccaacguggugaucaaggugugcgaguuccaguucugcaacgaccccuuccugggcguguacuaccacaagaacaacaagagcuggauggagagcgaguuccggguguacagcagcgccaacaacugcaccuucgaguacgugagccagcccuuccugauggaccuggagggcaagcagggcaacuucaagaaccugcgggaguucguguucaagaacaucgacggcuacuucaagaucuacagcaagcacaccccaaucaaccuggugcgggaucugccccagggcuucucagugcuggagccccugguggaccugcccaucggcaucaacaucacccgguuccagacccugcuggcccugcaccggagcuaccugaccccaggcgacagcagcagcggguggacagcaggcgcggcugcuuacuacgugggcuaccugcagccccggaccuuccugcugaaguacaacgagaacggcaccaucaccgacgccguggacugcgcccuggacccucugagcgagaccaagugcacccugaagagcuucaccguggagaagggcaucuaccagaccagcaacuuccgggugcagcccaccgagagcaucgugcgguuccccaacaucaccaaccugugccccuucggcgagguguucaacgccacccgguucgccagcguguacgccuggaaccggaagcggaucagcaacugcguggccgacuacagcgugcuguacaacagcgccagcuucagcaccuucaagugcuacggcgugagccccaccaagcugaacgaccugugcuucaccaacguguacgccgacagcuucgugauccguggcgacgaggugcggcagaucgcacccggccagacaggcaagaucgccgacuacaacuacaagcugcccgacgacuucaccggcugcgugaucgccuggaacagcaacaaccucgacagcaaggugggcggcaacuacaacuaccuguuccggcuguuccggaagagcaaccugaagcccuucgagcgggacaucagcaccgagaucuaccaagccggcaacaccccuugcaacggcguggagggcuucaacugcuacuucccucugcagagcuacggcuuccagcccaccaacggcgugggcuaccagcccuaccgggugguggugcugagcuucgagcugcugcacgccccagccaccguguguggccccaagaagagcaccaaccuggugaagaacaagugcgugaacuucaacuucaacggccuuaccggcaccggcgugcugaccgagagcaacaagaaauuccugcccuuucagcaguucggccgggacaucgccgacaccaccgacgcugugcgggauccccagacccuggagauccuggacaucaccccuugcagcuucggcggcgugagcgugaucaccccaggcaccaacaccagcaaccagguggccgugcuguaccagggcgugaacugcaccgaggugcccguggccauccacgccgaccagcugacacccaccuggcgggucuacagcaccggcagcaacguguuccagacccgggccgguugccugaucggcgccgagcacgugaacaacagcuacgagugcgacauccccaucggcgccggcaucugugccagcuaccagacccagaccaauucaccccggagggcaaggagcguggccagccagagcgugaucgccuacaccaugagccugggcgccgagaacagcguggccuacagcaacaacagcaucgccauccccaccaacuucaccaucagcgugaccaccgagauucugcccgugagcaugaccaagaccagcguggacugcaccauguacaucugcggcgacagcaccgagugcagcaaccugcugcugcaguacggcagcuucugcacccagcugaaccgggcccugaccggcaucgccguggagcaggacaagaacacccaggagguguucgcccaggugaagcagaucuacaagaccccucccaucaaggacuucggcggcuucaacuucagccagauccugcccgaccccagcaagcccagcaagcggagcuucaucgaggaccugcuguucaacaaggugacccuagccgacgccggcuucaucaagcaguacggcgacugccucggcgacauagccgcccgggaccugaucugcgcccagaaguucaacggccugaccgugcugccuccccugcugaccgacgagaugaucgcccaguacaccagcgcccuguuagccggaaccaucaccagcggcuggacuuucggcgcuggagccgcucugcagauccccuucgccaugcagauggccuaccgguucaacggcaucggcgugacccagaacgugcuguacgagaaccagaagcugaucgccaaccaguucaacagcgccaucggcaagauccaggacagccugagcagcaccgcuagcgcccugggcaagcugcaggacguggugaaccagaacgcccaggcccugaacacccuggugaagcagcugagcagcaacuucggcgccaucagcagcgugcugaacgacauccugagccggcuggacccucccgaggccgaggugcagaucgaccggcugaucacuggccggcugcagagccugcagaccuacgugacccagcagcugauccgggccgccgagauucgggccagcgccaaccuggccgccaccaagaugagcgagugcgugcugggccagagcaagcggguggacuucugcggcaagggcuaccaccugaugagcuuuccccagagcgcaccccacggagugguguuccugcacgugaccuacgugcccgcccaggagaagaacuucaccaccgccccagccaucugccacgacggcaaggcccacuuuccccgggagggcguguucgugagcaacggcacccacugguucgugacccagcggaacuucuacgagccccagaucaucaccaccgacaacaccuucgugagcggcaacugcgacguggugaucggcaucgugaacaacaccguguacgauccccugcagcccgagcuggacagcuucaaggaggagcuggacaaguacuucaagaaucacaccagccccgacguggaccugggcgacaucagcggcaucaacgccagcguggugaacauccagaaggagaucgaucggcugaacgagguggccaagaaccugaacgagagccugaucgaccugcaggagcugggcaaguacgagcaguacaucaaguggcccugguacaucuggcugggcuucaucgccggccugaucgccaucgugauggugaccaucaugcugugcugcaugaccagcugcugcagcugccugaagggcuguugcagcugcggcagcugcugcaaguucgacgaggacgacagcgagcccgugcugaagggcgugaagcugcacuacaccugaugacucgagcugguacugcaugcacgcaaugcuagcugccccuuucccguccuggguaccccgagucucccccgaccucgggucccagguaugcucccaccuccaccugccccacucaccaccucugcuaguuccagacaccucccaagcacgcagcaaugcagcucaaaacgcuuagccuagccacacccccacgggaaacagcagugauuaaccuuuagcaauaaacgaaaguuuaacuaagcuauacuaaccccaggguuggucaauuucgugccagccacacccuggagcuagcaaaaaaaaaaaaaaaaaaaaaaaaaaaaaaaaaaaaaaaaaaaaaaaaaaaaaaaaaaaaaaaaaaaaaaaaaaaaaaaaaaaaaaaaaaaaaaaaaaaa

SEQ ID NO: 26424 - RNA, 4267 nt, Artificial Sequence
  SARS-CoV-2/Wuhan/WIV05/2019__EPI_ISL_402128 spike protein mRNA gc (1-1273)(K986P_V987P_H69del_V70del_Y453F_D614G_I692V_M1229I)
agaauaaacuaguauucuucugguccccacagacucagagagaacccgccaccauguucguguuccuggugcugcugccccuggugagcagccagugcgugaaccugaccacccggacccagcugccaccagccuacaccaacagcuucacccggggcgucuacuaccccgacaagguguuccggagcagcguccugcacagcacccaggaccuguuccugcccuucuucagcaacgugaccugguuccacgccaucagcggcaccaacggcaccaagcgguucgacaaccccgugcugcccuucaacgacggcguguacuucgccagcaccgagaagagcaacaucauccggggcuggaucuucggcaccacccuggacagcaagacccagagccugcugaucgugaauaacgccaccaacguggugaucaaggugugcgaguuccaguucugcaacgaccccuuccugggcguguacuaccacaagaacaacaagagcuggauggagagcgaguuccggguguacagcagcgccaacaacugcaccuucgaguacgugagccagcccuuccugauggaccuggagggcaagcagggcaacuucaagaaccugcgggaguucguguucaagaacaucgacggcuacuucaagaucuacagcaagcacaccccaaucaaccuggugcgggaucugccccagggcuucucagcccuggagccccugguggaccugcccaucggcaucaacaucacccgguuccagacccugcuggcccugcaccggagcuaccugaccccaggcgacagcagcagcggguggacagcaggcgcggcugcuuacuacgugggcuaccugcagccccggaccuuccugcugaaguacaacgagaacggcaccaucaccgacgccguggacugcgcccuggacccucugagcgagaccaagugcacccugaagagcuucaccguggagaagggcaucuaccagaccagcaacuuccgggugcagcccaccgagagcaucgugcgguuccccaacaucaccaaccugugccccuucggcgagguguucaacgccacccgguucgccagcguguacgccuggaaccggaagcggaucagcaacugcguggccgacuacagcgugcuguacaacagcgccagcuucagcaccuucaagugcuacggcgugagccccaccaagcugaacgaccugugcuucaccaacguguacgccgacagcuucgugauccguggcgacgaggugcggcagaucgcacccggccagacaggcaagaucgccgacuacaacuacaagcugcccgacgacuucaccggcugcgugaucgccuggaacagcaacaaccucgacagcaaggugggcggcaacuacaacuaccuguuccggcuguuccggaagagcaaccugaagcccuucgagcgggacaucagcaccgagaucuaccaagccggcuccaccccuugcaacggcguggagggcuucaacugcuacuucccucugcagagcuacggcuuccagcccaccaacggcgugggcuaccagcccuaccgggugguggugcugagcuucgagcugcugcacgccccagccaccguguguggccccaagaagagcaccaaccuggugaagaacaagugcgugaacuucaacuucaacggccuuaccggcaccggcgugcugaccgagagcaacaagaaauuccugcccuuucagcaguucggccgggacaucgccgacaccaccgacgcugugcgggauccccagacccuggagauccuggacaucaccccuugcagcuucggcggcgugagcgugaucaccccaggcaccaacaccagcaaccagguggccgugcuguaccagggcgugaacugcaccgaggugcccguggccauccacgccgaccagcugacacccaccuggcgggucuacagcaccggcagcaacguguuccagacccgggccgguugccugaucggcgccgagcacgugaacaacagcuacgagugcgacauccccaucggcgccggcaucugugccagcuaccagacccagaccaauucaccccggagggcaaggagcguggccagccagagcgugaucgccuacaccaugagccugggcgccgagaacagcguggccuacagcaacaacagcaucgccauccccaccaacuucaccaucagcgugaccaccgagauucugcccgugagcaugaccaagaccagcguggacugcaccauguacaucugcggcgacagcaccgagugcagcaaccugcugcugcaguacggcagcuucugcacccagcugaaccgggcccugaccggcaucgccguggagcaggacaagaacacccaggagguguucgcccaggugaagcagaucuacaagaccccucccaucaaggacuucggcggcuucaacuucagccagauccugcccgaccccagcaagcccagcaagcggagcuucaucgaggaccugcuguucaacaaggugacccuagccgacgccggcuucaucaagcaguacggcgacugccucggcgacauagccgcccgggaccugaucugcgcccagaaguucaacggccugaccgugcugccuccccugcugaccgacgagaugaucgcccaguacaccagcgcccuguuagccggaaccaucaccagcggcuggacuuucggcgcuggagccgcucugcagauccccuucgccaugcagauggccuaccgguucaacggcaucggcgugacccagaacgugcuguacgagaaccagaagcugaucgccaaccaguucaacagcgccaucggcaagauccaggacagccugagcagcaccgcuagcgcccugggcaagcugcaggacguggugaaccagaacgcccaggcccugaacacccuggugaagcagcugagcagcaacuucggcgccaucagcagcgugcugaacgacauccugagccggcuggacccucccgaggccgaggugcagaucgaccggcugaucacuggccggcugcagagccugcagaccuacgugacccagcagcugauccgggccgccgagauucgggccagcgccaaccuggccgccaccaagaugagcgagugcgugcugggccagagcaagcggguggacuucugcggcaagggcuaccaccugaugagcuuuccccagagcgcaccccacggagugguguuccugcacgugaccuacgugcccgcccaggagaagaacuucaccaccgccccagccaucugccacgacggcaaggcccacuuuccccgggagggcguguucgugagcaacggcacccacugguucgugacccagcggaacuucuacgagccccagaucaucaccaccgacaacaccuucgugagcggcaacugcgacguggugaucggcaucgugaacaacaccguguacgauccccugcagcccgagcuggacagcuucaaggaggagcuggacaaguacuucaagaaucacaccagccccgacguggaccugggcgacaucagcggcaucaacgccagcguggugaacauccagaaggagaucgaucggcugaacgagguggccaagaaccugaacgagagccugaucgaccugcaggagcugggcaaguacgagcaguacaucaaguggcccugguacaucuggcugggcuucaucgccggccugaucgccaucgugaucgugaccaucaugcugugcugcaugaccagcugcugcagcugccugaagggcuguugcagcugcggcagcugcugcaaguucgacgaggacgacagcgagcccgugcugaagggcgugaagcugcacuacaccugaugacucgagcugguacugcaugcacgcaaugcuagcugccccuuucccguccuggguaccccgagucucccccgaccucgggucccagguaugcucccaccuccaccugccccacucaccaccucugcuaguuccagacaccucccaagcacgcagcaaugcagcucaaaacgcuuagccuagccacacccccacgggaaacagcagugauuaaccuuuagcaauaaacgaaaguuuaacuaagcuauacuaaccccaggguuggucaauuucgugccagccacacccuggagcuagcaaaaaaaaaaaaaaaaaaaaaaaaaaaaaaaaaaaaaaaaaaaaaaaaaaaaaaaaaaaaaaaaaaaaaaaaaaaaaaaaaaaaaaaaaaaaaaaaaaaa

SEQ ID NO: 26425 - RNA, 4264 nt, Artificial Sequence
  SARS-CoV-2/Wuhan/WIV05/2019__EPI_ISL_402128 spike protein mRNA gc (1-1273)(K986P_V987P_K986P_V987P_H69del_V70del_Y144del_N501Y_A570 D_D614G_P681H_T716I_S982A_D1118H)
agaauaaacuaguauucuucugguccccacagacucagagagaacccgccaccauguucguguuccuggugcugcugccccuggugagcagccagugcgugaaccugaccacccggacccagcugccaccagccuacaccaacagcuucacccggggcgucuacuaccccgacaagguguuccggagcagcguccugcacagcacccaggaccuguuccugcccuucuucagcaacgugaccugguuccacgccaucagcggcaccaacggcaccaagcgguucgacaaccccgugcugcccuucaacgacggcguguacuucgccagcaccgagaagagcaacaucauccggggcuggaucuucggcaccacccuggacagcaagacccagagccugcugaucgugaauaacgccaccaacguggugaucaaggugugcgaguuccaguucugcaacgaccccuuccugggcguguaccacaagaacaacaagagcuggauggagagcgaguuccggguguacagcagcgccaacaacugcaccuucgaguacgugagccagcccuuccugauggaccuggagggcaagcagggcaacuucaagaaccugcgggaguucguguucaagaacaucgacggcuacuucaagaucuacagcaagcacaccccaaucaaccuggugcgggaucugccccagggcuucucagcccuggagccccugguggaccugcccaucggcaucaacaucacccgguuccagacccugcuggcccugcaccggagcuaccugaccccaggcgacagcagcagcggguggacagcaggcgcggcugcuuacuacgugggcuaccugcagccccggaccuuccugcugaaguacaacgagaacggcaccaucaccgacgccguggacugcgcccuggacccucugagcgagaccaagugcacccugaagagcuucaccguggagaagggcaucuaccagaccagcaacuuccgggugcagcccaccgagagcaucgugcgguuccccaacaucaccaaccugugccccuucggcgagguguucaacgccacccgguucgccagcguguacgccuggaaccggaagcggaucagcaacugcguggccgacuacagcgugcuguacaacagcgccagcuucagcaccuucaagugcuacggcgugagccccaccaagcugaacgaccugugcuucaccaacguguacgccgacagcuucgugauccguggcgacgaggugcggcagaucgcacccggccagacaggcaagaucgccgacuacaacuacaagcugcccgacgacuucaccggcugcgugaucgccuggaacagcaacaaccucgacagcaaggugggcggcaacuacaacuaccuguaccggcuguuccggaagagcaaccugaagcccuucgagcgggacaucagcaccgagaucuaccaagccggcuccaccccuugcaacggcguggagggcuucaacugcuacuucccucugcagagcuacggcuuccagcccaccuacggcgugggcuaccagcccuaccgggugguggugcugagcuucgagcugcugcacgccccagccaccguguguggccccaagaagagcaccaaccuggugaagaacaagugcgugaacuucaacuucaacggccuuaccggcaccggcgugcugaccgagagcaacaagaaauuccugcccuuucagcaguucggccgggacaucgacgacaccaccgacgcugugcgggauccccagacccuggagauccuggacaucaccccuugcagcuucggcggcgugagcgugaucaccccaggcaccaacaccagcaaccagguggccgugcuguaccagggcgugaacugcaccgaggugcccguggccauccacgccgaccagcugacacccaccuggcgggucuacagcaccggcagcaacguguuccagacccgggccgguugccugaucggcgccgagcacgugaacaacagcuacgagugcgacauccccaucggcgccggcaucugugccagcuaccagacccagaccaauucacaccggagggcaaggagcguggccagccagagcaucaucgccuacaccaugagccugggcgccgagaacagcguggccuacagcaacaacagcaucgccauccccaucaacuucaccaucagcgugaccaccgagauucugcccgugagcaugaccaagaccagcguggacugcaccauguacaucugcggcgacagcaccgagugcagcaaccugcugcugcaguacggcagcuucugcacccagcugaaccgggcccugaccggcaucgccguggagcaggacaagaacacccaggagguguucgcccaggugaagcagaucuacaagaccccucccaucaaggacuucggcggcuucaacuucagccagauccugcccgaccccagcaagcccagcaagcggagcuucaucgaggaccugcuguucaacaaggugacccuagccgacgccggcuucaucaagcaguacggcgacugccucggcgacauagccgcccgggaccugaucugcgcccagaaguucaacggccugaccgugcugccuccccugcugaccgacgagaugaucgcccaguacaccagcgcccuguuagccggaaccaucaccagcggcuggacuuucggcgcuggagccgcucugcagauccccuucgccaugcagauggccuaccgguucaacggcaucggcgugacccagaacgugcuguacgagaaccagaagcugaucgccaaccaguucaacagcgccaucggcaagauccaggacagccugagcagcaccgcuagcgcccugggcaagcugcaggacguggugaaccagaacgcccaggcccugaacacccuggugaagcagcugagcagcaacuucggcgccaucagcagcgugcugaacgacauccuggcccggcuggacccucccgaggccgaggugcagaucgaccggcugaucacuggccggcugcagagccugcagaccuacgugacccagcagcugauccgggccgccgagauucgggccagcgccaaccuggccgccaccaagaugagcgagugcgugcugggccagagcaagcggguggacuucugcggcaagggcuaccaccugaugagcuuuccccagagcgcaccccacggagugguguuccugcacgugaccuacgugcccgcccaggagaagaacuucaccaccgccccagccaucugccacgacggcaaggcccacuuuccccgggagggcguguucgugagcaacggcacccacugguucgugacccagcggaacuucuacgagccccagaucaucaccacccacaacaccuucgugagcggcaacugcgacguggugaucggcaucgugaacaacaccguguacgauccccugcagcccgagcuggacagcuucaaggaggagcuggacaaguacuucaagaaucacaccagccccgacguggaccugggcgacaucagcggcaucaacgccagcguggugaacauccagaaggagaucgaucggcugaacgagguggccaagaaccugaacgagagccugaucgaccugcaggagcugggcaaguacgagcaguacaucaaguggcccugguacaucuggcugggcuucaucgccggccugaucgccaucgugauggugaccaucaugcugugcugcaugaccagcugcugcagcugccugaagggcuguugcagcugcggcagcugcugcaaguucgacgaggacgacagcgagcccgugcugaagggcgugaagcugcacuacaccugaugacucgagcugguacugcaugcacgcaaugcuagcugccccuuucccguccuggguaccccgagucucccccgaccucgggucccagguaugcucccaccuccaccugccccacucaccaccucugcuaguuccagacaccucccaagcacgcagcaaugcagcucaaaacgcuuagccuagccacacccccacgggaaacagcagugauuaaccuuuagcaauaaacgaaaguuuaacuaagcuauacuaaccccaggguuggucaauuucgugccagccacacccuggagcuagcaaaaaaaaaaaaaaaaaaaaaaaaaaaaaaaaaaaaaaaaaaaaaaaaaaaaaaaaaaaaaaaaaaaaaaaaaaaaaaaaaaaaaaaaaaaaaaaaaaaa

SEQ ID NO: 26426 - RNA, 4273 nt, Artificial Sequence
  SARS-CoV-2/Wuhan/WIV05/2019__EPI_ISL_402128 spike protein mRNA gc (1-1273)(K986P_V987P_K986P_V987P_K417N_E484K_N501Y_D614G)
agaauaaacuaguauucuucugguccccacagacucagagagaacccgccaccauguucguguuccuggugcugcugccccuggugagcagccagugcgugaaccugaccacccggacccagcugccaccagccuacaccaacagcuucacccggggcgucuacuaccccgacaagguguuccggagcagcguccugcacagcacccaggaccuguuccugcccuucuucagcaacgugaccugguuccacgccauccacgugagcggcaccaacggcaccaagcgguucgacaaccccgugcugcccuucaacgacggcguguacuucgccagcaccgagaagagcaacaucauccggggcuggaucuucggcaccacccuggacagcaagacccagagccugcugaucgugaauaacgccaccaacguggugaucaaggugugcgaguuccaguucugcaacgaccccuuccugggcguguacuaccacaagaacaacaagagcuggauggagagcgaguuccggguguacagcagcgccaacaacugcaccuucgaguacgugagccagcccuuccugauggaccuggagggcaagcagggcaacuucaagaaccugcgggaguucguguucaagaacaucgacggcuacuucaagaucuacagcaagcacaccccaaucaaccuggugcgggaucugccccagggcuucucagcccuggagccccugguggaccugcccaucggcaucaacaucacccgguuccagacccugcuggcccugcaccggagcuaccugaccccaggcgacagcagcagcggguggacagcaggcgcggcugcuuacuacgugggcuaccugcagccccggaccuuccugcugaaguacaacgagaacggcaccaucaccgacgccguggacugcgcccuggacccucugagcgagaccaagugcacccugaagagcuucaccguggagaagggcaucuaccagaccagcaacuuccgggugcagcccaccgagagcaucgugcgguuccccaacaucaccaaccugugccccuucggcgagguguucaacgccacccgguucgccagcguguacgccuggaaccggaagcggaucagcaacugcguggccgacuacagcgugcuguacaacagcgccagcuucagcaccuucaagugcuacggcgugagccccaccaagcugaacgaccugugcuucaccaacguguacgccgacagcuucgugauccguggcgacgaggugcggcagaucgcacccggccagacaggcaacaucgccgacuacaacuacaagcugcccgacgacuucaccggcugcgugaucgccuggaacagcaacaaccucgacagcaaggugggcggcaacuacaacuaccuguaccggcuguuccggaagagcaaccugaagcccuucgagcgggacaucagcaccgagaucuaccaagccggcuccaccccuugcaacggcgugaagggcuucaacugcuacuucccucugcagagcuacggcuuccagcccaccuacggcgugggcuaccagcccuaccgggugguggugcugagcuucgagcugcugcacgccccagccaccguguguggccccaagaagagcaccaaccuggugaagaacaagugcgugaacuucaacuucaacggccuuaccggcaccggcgugcugaccgagagcaacaagaaauuccugcccuuucagcaguucggccgggacaucgccgacaccaccgacgcugugcgggauccccagacccuggagauccuggacaucaccccuugcagcuucggcggcgugagcgugaucaccccaggcaccaacaccagcaaccagguggccgugcuguaccagggcgugaacugcaccgaggugcccguggccauccacgccgaccagcugacacccaccuggcgggucuacagcaccggcagcaacguguuccagacccgggccgguugccugaucggcgccgagcacgugaacaacagcuacgagugcgacauccccaucggcgccggcaucugugccagcuaccagacccagaccaauucaccccggagggcaaggagcguggccagccagagcaucaucgccuacaccaugagccugggcgccgagaacagcguggccuacagcaacaacagcaucgccauccccaccaacuucaccaucagcgugaccaccgagauucugcccgugagcaugaccaagaccagcguggacugcaccauguacaucugcggcgacagcaccgagugcagcaaccugcugcugcaguacggcagcuucugcacccagcugaaccgggcccugaccggcaucgccguggagcaggacaagaacacccaggagguguucgcccaggugaagcagaucuacaagaccccucccaucaaggacuucggcggcuucaacuucagccagauccugcccgaccccagcaagcccagcaagcggagcuucaucgaggaccugcuguucaacaaggugacccuagccgacgccggcuucaucaagcaguacggcgacugccucggcgacauagccgcccgggaccugaucugcgcccagaaguucaacggccugaccgugcugccuccccugcugaccgacgagaugaucgcccaguacaccagcgcccuguuagccggaaccaucaccagcggcuggacuuucggcgcuggagccgcucugcagauccccuucgccaugcagauggccuaccgguucaacggcaucggcgugacccagaacgugcuguacgagaaccagaagcugaucgccaaccaguucaacagcgccaucggcaagauccaggacagccugagcagcaccgcuagcgcccugggcaagcugcaggacguggugaaccagaacgcccaggcccugaacacccuggugaagcagcugagcagcaacuucggcgccaucagcagcgugcugaacgacauccugagccggcuggacccucccgaggccgaggugcagaucgaccggcugaucacuggccggcugcagagccugcagaccuacgugacccagcagcugauccgggccgccgagauucgggccagcgccaaccuggccgccaccaagaugagcgagugcgugcugggccagagcaagcggguggacuucugcggcaagggcuaccaccugaugagcuuuccccagagcgcaccccacggagugguguuccugcacgugaccuacgugcccgcccaggagaagaacuucaccaccgccccagccaucugccacgacggcaaggcccacuuuccccgggagggcguguucgugagcaacggcacccacugguucgugacccagcggaacuucuacgagccccagaucaucaccaccgacaacaccuucgugagcggcaacugcgacguggugaucggcaucgugaacaacaccguguacgauccccugcagcccgagcuggacagcuucaaggaggagcuggacaaguacuucaagaaucacaccagccccgacguggaccugggcgacaucagcggcaucaacgccagcguggugaacauccagaaggagaucgaucggcugaacgagguggccaagaaccugaacgagagccugaucgaccugcaggagcugggcaaguacgagcaguacaucaaguggcccugguacaucuggcugggcuucaucgccggccugaucgccaucgugauggugaccaucaugcugugcugcaugaccagcugcugcagcugccugaagggcuguugcagcugcggcagcugcugcaaguucgacgaggacgacagcgagcccgugcugaagggcgugaagcugcacuacaccugaugacucgagcugguacugcaugcacgcaaugcuagcugccccuuucccguccuggguaccccgagucucccccgaccucgggucccagguaugcucccaccuccaccugccccacucaccaccucugcuaguuccagacaccucccaagcacgcagcaaugcagcucaaaacgcuuagccuagccacacccccacgggaaacagcagugauuaaccuuuagcaauaaacgaaaguuuaacuaagcuauacuaaccccaggguuggucaauuucgugccagccacacccuggagcuagcaaaaaaaaaaaaaaaaaaaaaaaaaaaaaaaaaaaaaaaaaaaaaaaaaaaaaaaaaaaaaaaaaaaaaaaaaaaaaaaaaaaaaaaaaaaaaaaaaaaa

SEQ ID NO: 26427 - RNA, 4264 nt, Artificial Sequence
  SARS-CoV-2/Wuhan/WIV05/2019__EPI_ISL_402128 spike protein mRNA gc (1-1273)(K986P_V987P_K986P_V987P_L18F_D80A_D215G_L242del_A243del_ L244del_R246I_K417N_E484K_N501Y_D614G_A701V)
agaauaaacuaguauucuucugguccccacagacucagagagaacccgccaccauguucguguuccuggugcugcugccccuggugagcagccagugcgugaacuucaccacccggacccagcugccaccagccuacaccaacagcuucacccggggcgucuacuaccccgacaagguguuccggagcagcguccugcacagcacccaggaccuguuccugcccuucuucagcaacgugaccugguuccacgccauccacgugagcggcaccaacggcaccaagcgguucgccaaccccgugcugcccuucaacgacggcguguacuucgccagcaccgagaagagcaacaucauccggggcuggaucuucggcaccacccuggacagcaagacccagagccugcugaucgugaauaacgccaccaacguggugaucaaggugugcgaguuccaguucugcaacgaccccuuccugggcguguacuaccacaagaacaacaagagcuggauggagagcgaguuccggguguacagcagcgccaacaacugcaccuucgaguacgugagccagcccuuccugauggaccuggagggcaagcagggcaacuucaagaaccugcgggaguucguguucaagaacaucgacggcuacuucaagaucuacagcaagcacaccccaaucaaccuggugcggggccugccccagggcuucucagcccuggagccccugguggaccugcccaucggcaucaacaucacccgguuccagacccugcacaucagcuaccugaccccaggcgacagcagcagcggguggacagcaggcgcggcugcuuacuacgugggcuaccugcagccccggaccuuccugcugaaguacaacgagaacggcaccaucaccgacgccguggacugcgcccuggacccucugagcgagaccaagugcacccugaagagcuucaccguggagaagggcaucuaccagaccagcaacuuccgggugcagcccaccgagagcaucgugcgguuccccaacaucaccaaccugugccccuucggcgagguguucaacgccacccgguucgccagcguguacgccuggaaccggaagcggaucagcaacugcguggccgacuacagcgugcuguacaacagcgccagcuucagcaccuucaagugcuacggcgugagccccaccaagcugaacgaccugugcuucaccaacguguacgccgacagcuucgugauccguggcgacgaggugcggcagaucgcacccggccagacaggcaacaucgccgacuacaacuacaagcugcccgacgacuucaccggcugcgugaucgccuggaacagcaacaaccucgacagcaaggugggcggcaacuacaacuaccuguaccggcuguuccggaagagcaaccugaagcccuucgagcgggacaucagcaccgagaucuaccaagccggcuccaccccuugcaacggcgugaagggcuucaacugcuacuucccucugcagagcuacggcuuccagcccaccuacggcgugggcuaccagcccuaccgggugguggugcugagcuucgagcugcugcacgccccagccaccguguguggccccaagaagagcaccaaccuggugaagaacaagugcgugaacuucaacuucaacggccuuaccggcaccggcgugcugaccgagagcaacaagaaauuccugcccuuucagcaguucggccgggacaucgccgacaccaccgacgcugugcgggauccccagacccuggagauccuggacaucaccccuugcagcuucggcggcgugagcgugaucaccccaggcaccaacaccagcaaccagguggccgugcuguaccagggcgugaacugcaccgaggugcccguggccauccacgccgaccagcugacacccaccuggcgggucuacagcaccggcagcaacguguuccagacccgggccgguugccugaucggcgccgagcacgugaacaacagcuacgagugcgacauccccaucggcgccggcaucugugccagcuaccagacccagaccaauucaccccggagggcaaggagcguggccagccagagcaucaucgccuacaccaugagccugggcguggagaacagcguggccuacagcaacaacagcaucgccauccccaccaacuucaccaucagcgugaccaccgagauucugcccgugagcaugaccaagaccagcguggacugcaccauguacaucugcggcgacagcaccgagugcagcaaccugcugcugcaguacggcagcuucugcacccagcugaaccgggcccugaccggcaucgccguggagcaggacaagaacacccaggagguguucgcccaggugaagcagaucuacaagaccccucccaucaaggacuucggcggcuucaacuucagccagauccugcccgaccccagcaagcccagcaagcggagcuucaucgaggaccugcuguucaacaaggugacccuagccgacgccggcuucaucaagcaguacggcgacugccucggcgacauagccgcccgggaccugaucugcgcccagaaguucaacggccugaccgugcugccuccccugcugaccgacgagaugaucgcccaguacaccagcgcccuguuagccggaaccaucaccagcggcuggacuuucggcgcuggagccgcucugcagauccccuucgccaugcagauggccuaccgguucaacggcaucggcgugacccagaacgugcuguacgagaaccagaagcugaucgccaaccaguucaacagcgccaucggcaagauccaggacagccugagcagcaccgcuagcgcccugggcaagcugcaggacguggugaaccagaacgcccaggcccugaacacccuggugaagcagcugagcagcaacuucggcgccaucagcagcgugcugaacgacauccugagccggcuggacccucccgaggccgaggugcagaucgaccggcugaucacuggccggcugcagagccugcagaccuacgugacccagcagcugauccgggccgccgagauucgggccagcgccaaccuggccgccaccaagaugagcgagugcgugcugggccagagcaagcggguggacuucugcggcaagggcuaccaccugaugagcuuuccccagagcgcaccccacggagugguguuccugcacgugaccuacgugcccgcccaggagaagaacuucaccaccgccccagccaucugccacgacggcaaggcccacuuuccccgggagggcguguucgugagcaacggcacccacugguucgugacccagcggaacuucuacgagccccagaucaucaccaccgacaacaccuucgugagcggcaacugcgacguggugaucggcaucgugaacaacaccguguacgauccccugcagcccgagcuggacagcuucaaggaggagcuggacaaguacuucaagaaucacaccagccccgacguggaccugggcgacaucagcggcaucaacgccagcguggugaacauccagaaggagaucgaucggcugaacgagguggccaagaaccugaacgagagccugaucgaccugcaggagcugggcaaguacgagcaguacaucaaguggcccugguacaucuggcugggcuucaucgccggccugaucgccaucgugauggugaccaucaugcugugcugcaugaccagcugcugcagcugccugaagggcuguugcagcugcggcagcugcugcaaguucgacgaggacgacagcgagcccgugcugaagggcgugaagcugcacuacaccugaugacucgagcugguacugcaugcacgcaaugcuagcugccccuuucccguccuggguaccccgagucucccccgaccucgggucccagguaugcucccaccuccaccugccccacucaccaccucugcuaguuccagacaccucccaagcacgcagcaaugcagcucaaaacgcuuagccuagccacacccccacgggaaacagcagugauuaaccuuuagcaauaaacgaaaguuuaacuaagcuauacuaaccccaggguuggucaauuucgugccagccacacccuggagcuagcaaaaaaaaaaaaaaaaaaaaaaaaaaaaaaaaaaaaaaaaaaaaaaaaaaaaaaaaaaaaaaaaaaaaaaaaaaaaaaaaaaaaaaaaaaaaaaaaaaaa

SEQ ID NO: 26428 - RNA, 4273 nt, Artificial Sequence
  SARS-CoV-2/Wuhan/WIV05/2019__EPI_ISL_402128 spike protein mRNA gc (1-1273)(K986P_V987P_K986P_V987P_E484K_D614G)
agaauaaacuaguauucuucugguccccacagacucagagagaacccgccaccauguucguguuccuggugcugcugccccuggugagcagccagugcgugaaccugaccacccggacccagcugccaccagccuacaccaacagcuucacccggggcgucuacuaccccgacaagguguuccggagcagcguccugcacagcacccaggaccuguuccugcccuucuucagcaacgugaccugguuccacgccauccacgugagcggcaccaacggcaccaagcgguucgacaaccccgugcugcccuucaacgacggcguguacuucgccagcaccgagaagagcaacaucauccggggcuggaucuucggcaccacccuggacagcaagacccagagccugcugaucgugaauaacgccaccaacguggugaucaaggugugcgaguuccaguucugcaacgaccccuuccugggcguguacuaccacaagaacaacaagagcuggauggagagcgaguuccggguguacagcagcgccaacaacugcaccuucgaguacgugagccagcccuuccugauggaccuggagggcaagcagggcaacuucaagaaccugcgggaguucguguucaagaacaucgacggcuacuucaagaucuacagcaagcacaccccaaucaaccuggugcgggaucugccccagggcuucucagcccuggagccccugguggaccugcccaucggcaucaacaucacccgguuccagacccugcuggcccugcaccggagcuaccugaccccaggcgacagcagcagcggguggacagcaggcgcggcugcuuacuacgugggcuaccugcagccccggaccuuccugcugaaguacaacgagaacggcaccaucaccgacgccguggacugcgcccuggacccucugagcgagaccaagugcacccugaagagcuucaccguggagaagggcaucuaccagaccagcaacuuccgggugcagcccaccgagagcaucgugcgguuccccaacaucaccaaccugugccccuucggcgagguguucaacgccacccgguucgccagcguguacgccuggaaccggaagcggaucagcaacugcguggccgacuacagcgugcuguacaacagcgccagcuucagcaccuucaagugcuacggcgugagccccaccaagcugaacgaccugugcuucaccaacguguacgccgacagcuucgugauccguggcgacgaggugcggcagaucgcacccggccagacaggcaagaucgccgacuacaacuacaagcugcccgacgacuucaccggcugcgugaucgccuggaacagcaacaaccucgacagcaaggugggcggcaacuacaacuaccuguaccggcuguuccggaagagcaaccugaagcccuucgagcgggacaucagcaccgagaucuaccaagccggcuccaccccuugcaacggcgugaagggcuucaacugcuacuucccucugcagagcuacggcuuccagcccaccaacggcgugggcuaccagcccuaccgggugguggugcugagcuucgagcugcugcacgccccagccaccguguguggccccaagaagagcaccaaccuggugaagaacaagugcgugaacuucaacuucaacggccuuaccggcaccggcgugcugaccgagagcaacaagaaauuccugcccuuucagcaguucggccgggacaucgccgacaccaccgacgcugugcgggauccccagacccuggagauccuggacaucaccccuugcagcuucggcggcgugagcgugaucaccccaggcaccaacaccagcaaccagguggccgugcuguaccagggcgugaacugcaccgaggugcccguggccauccacgccgaccagcugacacccaccuggcgggucuacagcaccggcagcaacguguuccagacccgggccgguugccugaucggcgccgagcacgugaacaacagcuacgagugcgacauccccaucggcgccggcaucugugccagcuaccagacccagaccaauucaccccggagggcaaggagcguggccagccagagcaucaucgccuacaccaugagccugggcgccgagaacagcguggccuacagcaacaacagcaucgccauccccaccaacuucaccaucagcgugaccaccgagauucugcccgugagcaugaccaagaccagcguggacugcaccauguacaucugcggcgacagcaccgagugcagcaaccugcugcugcaguacggcagcuucugcacccagcugaaccgggcccugaccggcaucgccguggagcaggacaagaacacccaggagguguucgcccaggugaagcagaucuacaagaccccucccaucaaggacuucggcggcuucaacuucagccagauccugcccgaccccagcaagcccagcaagcggagcuucaucgaggaccugcuguucaacaaggugacccuagccgacgccggcuucaucaagcaguacggcgacugccucggcgacauagccgcccgggaccugaucugcgcccagaaguucaacggccugaccgugcugccuccccugcugaccgacgagaugaucgcccaguacaccagcgcccuguuagccggaaccaucaccagcggcuggacuuucggcgcuggagccgcucugcagauccccuucgccaugcagauggccuaccgguucaacggcaucggcgugacccagaacgugcuguacgagaaccagaagcugaucgccaaccaguucaacagcgccaucggcaagauccaggacagccugagcagcaccgcuagcgcccugggcaagcugcaggacguggugaaccagaacgcccaggcccugaacacccuggugaagcagcugagcagcaacuucggcgccaucagcagcgugcugaacgacauccugagccggcuggacccucccgaggccgaggugcagaucgaccggcugaucacuggccggcugcagagccugcagaccuacgugacccagcagcugauccgggccgccgagauucgggccagcgccaaccuggccgccaccaagaugagcgagugcgugcugggccagagcaagcggguggacuucugcggcaagggcuaccaccugaugagcuuuccccagagcgcaccccacggagugguguuccugcacgugaccuacgugcccgcccaggagaagaacuucaccaccgccccagccaucugccacgacggcaaggcccacuuuccccgggagggcguguucgugagcaacggcacccacugguucgugacccagcggaacuucuacgagccccagaucaucaccaccgacaacaccuucgugagcggcaacugcgacguggugaucggcaucgugaacaacaccguguacgauccccugcagcccgagcuggacagcuucaaggaggagcuggacaaguacuucaagaaucacaccagccccgacguggaccugggcgacaucagcggcaucaacgccagcguggugaacauccagaaggagaucgaucggcugaacgagguggccaagaaccugaacgagagccugaucgaccugcaggagcugggcaaguacgagcaguacaucaaguggcccugguacaucuggcugggcuucaucgccggccugaucgccaucgugauggugaccaucaugcugugcugcaugaccagcugcugcagcugccugaagggcuguugcagcugcggcagcugcugcaaguucgacgaggacgacagcgagcccgugcugaagggcgugaagcugcacuacaccugaugacucgagcugguacugcaugcacgcaaugcuagcugccccuuucccguccuggguaccccgagucucccccgaccucgggucccagguaugcucccaccuccaccugccccacucaccaccucugcuaguuccagacaccucccaagcacgcagcaaugcagcucaaaacgcuuagccuagccacacccccacgggaaacagcagugauuaaccuuuagcaauaaacgaaaguuuaacuaagcuauacuaaccccaggguuggucaauuucgugccagccacacccuggagcuagcaaaaaaaaaaaaaaaaaaaaaaaaaaaaaaaaaaaaaaaaaaaaaaaaaaaaaaaaaaaaaaaaaaaaaaaaaaaaaaaaaaaaaaaaaaaaaaaaaaaa

SEQ ID NO: 26429 - RNA, 4273 nt, Artificial Sequence
  SARS-CoV-2/Wuhan/WIV05/2019__EPI_ISL_402128 spike protein mRNA gc (1-1273)(K986P_V987P_K986P_V987P_L18F_T20N_P26S_D138Y_R190S_K417T _E484K_N501Y_D614G_H655Y_T1027I)
agaauaaacuaguauucuucugguccccacagacucagagagaacccgccaccauguucguguuccuggugcugcugccccuggugagcagccagugcgugaacuucaccaaccggacccagcugccaagcgccuacaccaacagcuucacccggggcgucuacuaccccgacaagguguuccggagcagcguccugcacagcacccaggaccuguuccugcccuucuucagcaacgugaccugguuccacgccauccacgugagcggcaccaacggcaccaagcgguucgacaaccccgugcugcccuucaacgacggcguguacuucgccagcaccgagaagagcaacaucauccggggcuggaucuucggcaccacccuggacagcaagacccagagccugcugaucgugaauaacgccaccaacguggugaucaaggugugcgaguuccaguucugcaacuaccccuuccugggcguguacuaccacaagaacaacaagagcuggauggagagcgaguuccggguguacagcagcgccaacaacugcaccuucgaguacgugagccagcccuuccugauggaccuggagggcaagcagggcaacuucaagaaccugagcgaguucguguucaagaacaucgacggcuacuucaagaucuacagcaagcacaccccaaucaaccuggugcgggaucugccccagggcuucucagcccuggagccccugguggaccugcccaucggcaucaacaucacccgguuccagacccugcuggcccugcaccggagcuaccugaccccaggcgacagcagcagcggguggacagcaggcgcggcugcuuacuacgugggcuaccugcagccccggaccuuccugcugaaguacaacgagaacggcaccaucaccgacgccguggacugcgcccuggacccucugagcgagaccaagugcacccugaagagcuucaccguggagaagggcaucuaccagaccagcaacuuccgggugcagcccaccgagagcaucgugcgguuccccaacaucaccaaccugugccccuucggcgagguguucaacgccacccgguucgccagcguguacgccuggaaccggaagcggaucagcaacugcguggccgacuacagcgugcuguacaacagcgccagcuucagcaccuucaagugcuacggcgugagccccaccaagcugaacgaccugugcuucaccaacguguacgccgacagcuucgugauccguggcgacgaggugcggcagaucgcacccggccagacaggcaccaucgccgacuacaacuacaagcugcccgacgacuucaccggcugcgugaucgccuggaacagcaacaaccucgacagcaaggugggcggcaacuacaacuaccuguaccggcuguuccggaagagcaaccugaagcccuucgagcgggacaucagcaccgagaucuaccaagccggcuccaccccuugcaacggcgugaagggcuucaacugcuacuucccucugcagagcuacggcuuccagcccaccuacggcgugggcuaccagcccuaccgggugguggugcugagcuucgagcugcugcacgccccagccaccguguguggccccaagaagagcaccaaccuggugaagaacaagugcgugaacuucaacuucaacggccuuaccggcaccggcgugcugaccgagagcaacaagaaauuccugcccuuucagcaguucggccgggacaucgccgacaccaccgacgcugugcgggauccccagacccuggagauccuggacaucaccccuugcagcuucggcggcgugagcgugaucaccccaggcaccaacaccagcaaccagguggccgugcuguaccagggcgugaacugcaccgaggugcccguggccauccacgccgaccagcugacacccaccuggcgggucuacagcaccggcagcaacguguuccagacccgggccgguugccugaucggcgccgaguacgugaacaacagcuacgagugcgacauccccaucggcgccggcaucugugccagcuaccagacccagaccaauucaccccggagggcaaggagcguggccagccagagcaucaucgccuacaccaugagccugggcgccgagaacagcguggccuacagcaacaacagcaucgccauccccaccaacuucaccaucagcgugaccaccgagauucugcccgugagcaugaccaagaccagcguggacugcaccauguacaucugcggcgacagcaccgagugcagcaaccugcugcugcaguacggcagcuucugcacccagcugaaccgggcccugaccggcaucgccguggagcaggacaagaacacccaggagguguucgcccaggugaagcagaucuacaagaccccucccaucaaggacuucggcggcuucaacuucagccagauccugcccgaccccagcaagcccagcaagcggagcuucaucgaggaccugcuguucaacaaggugacccuagccgacgccggcuucaucaagcaguacggcgacugccucggcgacauagccgcccgggaccugaucugcgcccagaaguucaacggccugaccgugcugccuccccugcugaccgacgagaugaucgcccaguacaccagcgcccuguuagccggaaccaucaccagcggcuggacuuucggcgcuggagccgcucugcagauccccuucgccaugcagauggccuaccgguucaacggcaucggcgugacccagaacgugcuguacgagaaccagaagcugaucgccaaccaguucaacagcgccaucggcaagauccaggacagccugagcagcaccgcuagcgcccugggcaagcugcaggacguggugaaccagaacgcccaggcccugaacacccuggugaagcagcugagcagcaacuucggcgccaucagcagcgugcugaacgacauccugagccggcuggacccucccgaggccgaggugcagaucgaccggcugaucacuggccggcugcagagccugcagaccuacgugacccagcagcugauccgggccgccgagauucgggccagcgccaaccuggccgccaucaagaugagcgagugcgugcugggccagagcaagcggguggacuucugcggcaagggcuaccaccugaugagcuuuccccagagcgcaccccacggagugguguuccugcacgugaccuacgugcccgcccaggagaagaacuucaccaccgccccagccaucugccacgacggcaaggcccacuuuccccgggagggcguguucgugagcaacggcacccacugguucgugacccagcggaacuucuacgagccccagaucaucaccaccgacaacaccuucgugagcggcaacugcgacguggugaucggcaucgugaacaacaccguguacgauccccugcagcccgagcuggacagcuucaaggaggagcuggacaaguacuucaagaaucacaccagccccgacguggaccugggcgacaucagcggcaucaacgccagcguggugaacauccagaaggagaucgaucggcugaacgagguggccaagaaccugaacgagagccugaucgaccugcaggagcugggcaaguacgagcaguacaucaaguggcccugguacaucuggcugggcuucaucgccggccugaucgccaucgugauggugaccaucaugcugugcugcaugaccagcugcugcagcugccugaagggcuguugcagcugcggcagcugcugcaaguucgacgaggacgacagcgagcccgugcugaagggcgugaagcugcacuacaccugaugacucgagcugguacugcaugcacgcaaugcuagcugccccuuucccguccuggguaccccgagucucccccgaccucgggucccagguaugcucccaccuccaccugccccacucaccaccucugcuaguuccagacaccucccaagcacgcagcaaugcagcucaaaacgcuuagccuagccacacccccacgggaaacagcagugauuaaccuuuagcaauaaacgaaaguuuaacuaagcuauacuaaccccaggguuggucaauuucgugccagccacacccuggagcuagcaaaaaaaaaaaaaaaaaaaaaaaaaaaaaaaaaaaaaaaaaaaaaaaaaaaaaaaaaaaaaaaaaaaaaaaaaaaaaaaaaaaaaaaaaaaaaaaaaaaa

SEQ ID NO: 26430 - RNA, 4273 nt, Artificial Sequence
  SARS-CoV-2/Wuhan/WIV05/2019__EPI_ISL_402128 spike protein mRNA gc (1-1273)(K986P_V987P_K986P_V987P_S13I_W152C_L452R_D614G)
agaauaaacuaguauucuucugguccccacagacucagagagaacccgccaccauguucguguuccuggugcugcugccccuggugagcauccagugcgugaaccugaccacccggacccagcugccaccagccuacaccaacagcuucacccggggcgucuacuaccccgacaagguguuccggagcagcguccugcacagcacccaggaccuguuccugcccuucuucagcaacgugaccugguuccacgccauccacgugagcggcaccaacggcaccaagcgguucgacaaccccgugcugcccuucaacgacggcguguacuucgccagcaccgagaagagcaacaucauccggggcuggaucuucggcaccacccuggacagcaagacccagagccugcugaucgugaauaacgccaccaacguggugaucaaggugugcgaguuccaguucugcaacgaccccuuccugggcguguacuaccacaagaacaacaagagcugcauggagagcgaguuccggguguacagcagcgccaacaacugcaccuucgaguacgugagccagcccuuccugauggaccuggagggcaagcagggcaacuucaagaaccugcgggaguucguguucaagaacaucgacggcuacuucaagaucuacagcaagcacaccccaaucaaccuggugcgggaucugccccagggcuucucagcccuggagccccugguggaccugcccaucggcaucaacaucacccgguuccagacccugcuggcccugcaccggagcuaccugaccccaggcgacagcagcagcggguggacagcaggcgcggcugcuuacuacgugggcuaccugcagccccggaccuuccugcugaaguacaacgagaacggcaccaucaccgacgccguggacugcgcccuggacccucugagcgagaccaagugcacccugaagagcuucaccguggagaagggcaucuaccagaccagcaacuuccgggugcagcccaccgagagcaucgugcgguuccccaacaucaccaaccugugccccuucggcgagguguucaacgccacccgguucgccagcguguacgccuggaaccggaagcggaucagcaacugcguggccgacuacagcgugcuguacaacagcgccagcuucagcaccuucaagugcuacggcgugagccccaccaagcugaacgaccugugcuucaccaacguguacgccgacagcuucgugauccguggcgacgaggugcggcagaucgcacccggccagacaggcaagaucgccgacuacaacuacaagcugcccgacgacuucaccggcugcgugaucgccuggaacagcaacaaccucgacagcaaggugggcggcaacuacaacuaccgcuaccggcuguuccggaagagcaaccugaagcccuucgagcgggacaucagcaccgagaucuaccaagccggcuccaccccuugcaacggcguggagggcuucaacugcuacuucccucugcagagcuacggcuuccagcccaccaacggcgugggcuaccagcccuaccgggugguggugcugagcuucgagcugcugcacgccccagccaccguguguggccccaagaagagcaccaaccuggugaagaacaagugcgugaacuucaacuucaacggccuuaccggcaccggcgugcugaccgagagcaacaagaaauuccugcccuuucagcaguucggccgggacaucgccgacaccaccgacgcugugcgggauccccagacccuggagauccuggacaucaccccuugcagcuucggcggcgugagcgugaucaccccaggcaccaacaccagcaaccagguggccgugcuguaccagggcgugaacugcaccgaggugcccguggccauccacgccgaccagcugacacccaccuggcgggucuacagcaccggcagcaacguguuccagacccgggccgguugccugaucggcgccgagcacgugaacaacagcuacgagugcgacauccccaucggcgccggcaucugugccagcuaccagacccagaccaauucaccccggagggcaaggagcguggccagccagagcaucaucgccuacaccaugagccugggcgccgagaacagcguggccuacagcaacaacagcaucgccauccccaccaacuucaccaucagcgugaccaccgagauucugcccgugagcaugaccaagaccagcguggacugcaccauguacaucugcggcgacagcaccgagugcagcaaccugcugcugcaguacggcagcuucugcacccagcugaaccgggcccugaccggcaucgccguggagcaggacaagaacacccaggagguguucgcccaggugaagcagaucuacaagaccccucccaucaaggacuucggcggcuucaacuucagccagauccugcccgaccccagcaagcccagcaagcggagcuucaucgaggaccugcuguucaacaaggugacccuagccgacgccggcuucaucaagcaguacggcgacugccucggcgacauagccgcccgggaccugaucugcgcccagaaguucaacggccugaccgugcugccuccccugcugaccgacgagaugaucgcccaguacaccagcgcccuguuagccggaaccaucaccagcggcuggacuuucggcgcuggagccgcucugcagauccccuucgccaugcagauggccuaccgguucaacggcaucggcgugacccagaacgugcuguacgagaaccagaagcugaucgccaaccaguucaacagcgccaucggcaagauccaggacagccugagcagcaccgcuagcgcccugggcaagcugcaggacguggugaaccagaacgcccaggcccugaacacccuggugaagcagcugagcagcaacuucggcgccaucagcagcgugcugaacgacauccugagccggcuggacccucccgaggccgaggugcagaucgaccggcugaucacuggccggcugcagagccugcagaccuacgugacccagcagcugauccgggccgccgagauucgggccagcgccaaccuggccgccaccaagaugagcgagugcgugcugggccagagcaagcggguggacuucugcggcaagggcuaccaccugaugagcuuuccccagagcgcaccccacggagugguguuccugcacgugaccuacgugcccgcccaggagaagaacuucaccaccgccccagccaucugccacgacggcaaggcccacuuuccccgggagggcguguucgugagcaacggcacccacugguucgugacccagcggaacuucuacgagccccagaucaucaccaccgacaacaccuucgugagcggcaacugcgacguggugaucggcaucgugaacaacaccguguacgauccccugcagcccgagcuggacagcuucaaggaggagcuggacaaguacuucaagaaucacaccagccccgacguggaccugggcgacaucagcggcaucaacgccagcguggugaacauccagaaggagaucgaucggcugaacgagguggccaagaaccugaacgagagccugaucgaccugcaggagcugggcaaguacgagcaguacaucaaguggcccugguacaucuggcugggcuucaucgccggccugaucgccaucgugauggugaccaucaugcugugcugcaugaccagcugcugcagcugccugaagggcuguugcagcugcggcagcugcugcaaguucgacgaggacgacagcgagcccgugcugaagggcgugaagcugcacuacaccugaugacucgagcugguacugcaugcacgcaaugcuagcugccccuuucccguccuggguaccccgagucucccccgaccucgggucccagguaugcucccaccuccaccugccccacucaccaccucugcuaguuccagacaccucccaagcacgcagcaaugcagcucaaaacgcuuagccuagccacacccccacgggaaacagcagugauuaaccuuuagcaauaaacgaaaguuuaacuaagcuauacuaaccccaggguuggucaauuucgugccagccacacccuggagcuagcaaaaaaaaaaaaaaaaaaaaaaaaaaaaaaaaaaaaaaaaaaaaaaaaaaaaaaaaaaaaaaaaaaaaaaaaaaaaaaaaaaaaaaaaaaaaaaaaaaaa

SEQ ID NO: 26431 - RNA, 4273 nt, Artificial Sequence
  SARS-CoV-2/Wuhan/WIV05/2019__EPI_ISL_402128 spike protein mRNA gc (1-1273)(K986P_V987P)
agaauaaacuaguauucuucugguccccacagacucagagagaacccgccaccauguucguguuccuggugcugcugccccuggugagcagccagugcgugaaccugaccacccggacccagcugcccccugccuacaccaacagcuucacccggggcguguacuaccccgacaagguguuccggagcagcgugcugcacagcacccaggaccuguuccugcccuucuucagcaacgugaccugguuccacgccauccacgugagcggcaccaacggcaccaagcgguucgacaacccagugcugcccuucaacgacggcguguacuucgccagcaccgagaagucaaacaucauccggggcuggaucuucggcaccacccuggacagcaagacacagagccugcugaucgugaacaacgccaccaacguggugaucaaggugugcgaguuucaguucugcaacgaccccuuccugggcguguacuaccacaagaacaacaagagcuggauggagagcgaguuccgggucuacagcagcgcuaacaauugcaccuucgaguacgugagccagcccuuccugauggaccucgagggcaagcagggcaacuucaagaaccugcgggaguucguguucaagaacaucgauggcuacuucaagaucuacagcaagcacacccccaucaaccuggugcgggaccugccccagggauucagcgcccuggagccucugguggaccugcccaucggcaucaacaucaccagguuccagacccugcuggcccugcaccggagcuaccugacccccggcgacagcagcagcggcuggaccgccggcgccgccgcauacuacgugggcuaccugcagccacggaccuuccugcugaaguacaacgagaacggcaccaucaccgacgccguggacugcgcccuggacccccugagcgagaccaagugcacccuaaagagcuucaccguggagaagggcaucuaccagaccagcaacuuccgggugcagcccacugagagcaucgugcgguuccccaacauuaccaaccugugucccuucggcgagguguucaacgccacccgguucgccagcguguacgccuggaaccggaagcggaucagcaacugcguggccgacuacagcgugcuguacaacagcgccagcuucagcaccuucaagugcuacggcgugagcccuaccaagcugaacgaccugugcuucaccaacguguacgcugacagcuucgugauccggggcgacgaggugcggcagaucgcccccggccagaccggcaagaucgccgacuacaacuacaagcugcccgacgacuucaccggcugcgugaucgccuggaacagcaacaaccuggacagcaaggugggcggcaacuacaacuaccuguaccggcuguuccguaagagcaaccugaagccauucgagcgggacaucagcaccgagaucuaccaggccggcagcacccccugcaacgguguggagggcuuuaacugcuacuucccccugcagagcuacggcuuccagcccaccaacggcgugggcuaccagcccuaccgggugguggugcugagcuucgagcugcugcacgcccccgccaccgugugcggcccuaaaaagagcaccaaccuggugaagaacaagugcgugaacuucaauuucaacggccugaccggcaccggcgugcugaccgagagcaacaagaaguuccugcccuuccagcaguucggccgggauaucgccgacaccaccgacgcagugcgggacccccagacccuggagauccuggacaucaccccaugcagcuucggcggcgugagcgucaucacccccggcacaaacaccagcaaccagguggccgugcuguaccaggacgugaacugcaccgaggugcccguggccauccacgccgaccagcugacccccaccuggcggguguacagcaccggaagcaacguguuccagacccgggccggcugccugaucggcgccgagcacgugaacaacuccuacgagugcgacauccccaucggcgcuggcaucugcgccagcuaccagacccagaccaacagcccccggcgggcccggagcguggccagccagagcaucaucgccuacaccaugagcuuaggcgccgagaacagcguggccuacagcaacaacagcaucgcgaucccuaccaacuucaccaucagcgugaccaccgagauacugcccgugagcaugaccaagaccagcguggacuguaccauguacaucugcggcgacagcaccgagugcagcaaccugcugcugcaguacggcagcuucugcacccagcugaaccgggcccugaccggcaucgccguggagcaggacaagaacacccaagagguguucgcccaggugaagcagaucuacaagacucccccaaucaaggacuucggcggcuucaacuucagccagauccugcccgaccccagcaagcccagcaagcggagcuucaucgaggaccugcuguucaacaaggugacccuggccgacgccggcuucaucaagcaguacggcgauugccugggcgacaucgccgcucgggaccugaucugcgcccagaaguucaacgggcugaccgugcugcccccucugcugaccgacgagaugaucgcccaguacaccagcgcccugcuugccggcaccaucaccagcggcuggaccuucggcgccggcgcagcccugcagauccccuucgccaugcagauggccuaccgguucaacggcaucggcgugacccagaacgugcuguacgagaaccagaagcugaucgccaaccaguucaacagcgccaucggcaagauccaggacagccugagcagcaccgccagcgcccugggcaagcugcaggacguggugaaccagaacgcucaggcccugaacacccuggugaagcagcugagcagcaacuucggcgccaucagcucagugcugaaugacauccugagcaggcuggaucccccagaggccgaggugcagaucgaccggcugaucaccggccggcugcagagccugcagaccuacgugacccagcagcugauccgggccgccgagauccgggccagcgccaaccuggcagccaccaagaugagcgagugcgugcugggccagagcaagcggguggacuuuugcggcaagggcuaccaccugaugagcuucccccagagcgcuccccacggcgugguguuccuccacgugacauacguccccgcccaggagaagaacuucaccaccgcccccgccauuugccacgacggcaaggcccacuucccccgggagggcguguucgugagcaacggaacccacugguucgugacccagcggaacuucuacgagccucagaucaucaccaccgacaacaccuucgugagcggcaacugcgacguggugaucggcaucgugaacaacaccguguacgacccccugcagcccgagcuggacagcuucaaggaggagcuggacaaguacuucaagaaccacaccagcccagacguggaccugggcgacaucagcggcaucaacgccagcguggugaacauccagaaggagaucgaccggcugaacgagguggccaagaaccugaacgagagccugaucgaccugcaggagcugggcaaguacgagcaguacaucaaguggcccugguacaucuggcugggcuucaucgccggccugaucgccaucgugauggugaccaucaugcugugcugcaugaccagcugcuguagcugccugaagggcugcugcagcugcggcagcugcugcaaguucgacgaggacgacagcgagcccgugcugaagggcgugaagcugcacuacaccugaugacucgagcugguacugcaugcacgcaaugcuagcugccccuuucccguccuggguaccccgagucucccccgaccucgggucccagguaugcucccaccuccaccugccccacucaccaccucugcuaguuccagacaccucccaagcacgcagcaaugcagcucaaaacgcuuagccuagccacacccccacgggaaacagcagugauuaaccuuuagcaauaaacgaaaguuuaacuaagcuauacuaaccccaggguuggucaauuucgugccagccacacccuggagcuagcaaaaaaaaaaaaaaaaaaaaaaaaaaaaaaaaaaaaaaaaaaaaaaaaaaaaaaaaaaaaaaaaaaaaaaaaaaaaaaaaaaaaaaaaaaaaaaaaaaaa

SEQ ID NO: 26432 - RNA, 4273 nt, Artificial Sequence
  SARS-CoV-2/Wuhan/WIV05/2019__EPI_ISL_402128 spike protein mRNA gc (1-1273)(K986P_V987P_ D614G)
agaauaaacuaguauucuucugguccccacagacucagagagaacccgccaccauguucguguuccuggugcugcugccccuggugagcagccagugcgugaaccugaccacccggacccagcugcccccugccuacaccaacagcuucacccggggcguguacuaccccgacaagguguuccggagcagcgugcugcacagcacccaggaccuguuccugcccuucuucagcaacgugaccugguuccacgccauccacgugagcggcaccaacggcaccaagcgguucgacaacccagugcugcccuucaacgacggcguguacuucgccagcaccgagaagucaaacaucauccggggcuggaucuucggcaccacccuggacagcaagacacagagccugcugaucgugaacaacgccaccaacguggugaucaaggugugcgaguuucaguucugcaacgaccccuuccugggcguguacuaccacaagaacaacaagagcuggauggagagcgaguuccgggucuacagcagcgcuaacaauugcaccuucgaguacgugagccagcccuuccugauggaccucgagggcaagcagggcaacuucaagaaccugcgggaguucguguucaagaacaucgauggcuacuucaagaucuacagcaagcacacccccaucaaccuggugcgggaccugccccagggauucagcgcccuggagccucugguggaccugcccaucggcaucaacaucaccagguuccagacccugcuggcccugcaccggagcuaccugacccccggcgacagcagcagcggcuggaccgccggcgccgccgcauacuacgugggcuaccugcagccacggaccuuccugcugaaguacaacgagaacggcaccaucaccgacgccguggacugcgcccuggacccccugagcgagaccaagugcacccuaaagagcuucaccguggagaagggcaucuaccagaccagcaacuuccgggugcagcccacugagagcaucgugcgguuccccaacauuaccaaccugugucccuucggcgagguguucaacgccacccgguucgccagcguguacgccuggaaccggaagcggaucagcaacugcguggccgacuacagcgugcuguacaacagcgccagcuucagcaccuucaagugcuacggcgugagcccuaccaagcugaacgaccugugcuucaccaacguguacgcugacagcuucgugauccggggcgacgaggugcggcagaucgcccccggccagaccggcaagaucgccgacuacaacuacaagcugcccgacgacuucaccggcugcgugaucgccuggaacagcaacaaccuggacagcaaggugggcggcaacuacaacuaccuguaccggcuguuccguaagagcaaccugaagccauucgagcgggacaucagcaccgagaucuaccaggccggcagcacccccugcaacgguguggagggcuuuaacugcuacuucccccugcagagcuacggcuuccagcccaccaacggcgugggcuaccagcccuaccgggugguggugcugagcuucgagcugcugcacgcccccgccaccgugugcggcccuaaaaagagcaccaaccuggugaagaacaagugcgugaacuucaauuucaacggccugaccggcaccggcgugcugaccgagagcaacaagaaguuccugcccuuccagcaguucggccgggauaucgccgacaccaccgacgcagugcgggacccccagacccuggagauccuggacaucaccccaugcagcuucggcggcgugagcgucaucacccccggcacaaacaccagcaaccagguggccgugcuguaccagggagugaacugcaccgaggugcccguggccauccacgccgaccagcugacccccaccuggcggguguacagcaccggcagcaacguguuccagacccgggccggcugccugaucggcgccgagcacgugaacaacuccuacgagugcgacauccccaucggcgcuggcaucugcgccagcuaccagacccagaccaacagcccccggcgggcccggagcguggccagccagagcaucaucgccuacaccaugagcuuaggcgccgagaacagcguggccuacagcaacaacagcaucgcgaucccuaccaacuucaccaucagcgugaccaccgagauacugcccgugagcaugaccaagaccagcguggacuguaccauguacaucugcggcgacagcaccgagugcagcaaccugcugcugcaguacggcagcuucugcacccagcugaaccgggcccugaccggcaucgccguggagcaggacaagaacacccaagagguguucgcccaggugaagcagaucuacaagacucccccaaucaaggacuucggcggcuucaacuucagccagauccugcccgaccccagcaagcccagcaagcggagcuucaucgaggaccugcuguucaacaaggugacccuggccgacgccggcuucaucaagcaguacggcgacugccugggggauaucgccgcucgggaccugaucugcgcccagaaguucaacggccugaccgugcugcccccucugcugaccgacgagaugaucgcccaguacaccagcgcccugcuugccggcaccaucaccagcggcuggaccuucggcgccggcgcagcccugcagauccccuucgccaugcagauggccuaccgguucaacggcaucggcgugacccagaacgugcuguacgagaaccagaagcugaucgccaaccaguucaacagcgccaucggcaagauccaggacagccugagcagcaccgccagcgcccugggcaagcugcaggacguggugaaccagaacgcucaggcccugaacacccuggugaagcagcugagcagcaacuucggcgccaucagcucagugcugaaugacauccugagcaggcuggaucccccagaggccgaggugcagaucgaccggcugaucaccggccggcugcagagccugcagaccuacgugacccagcagcugauccgggccgccgagauccgggccagcgccaaccuggcagccaccaagaugagcgagugcgugcugggccagagcaagcggguggacuuuugcggcaagggcuaccaccugaugagcuucccccagagcgcuccccacggcgugguguuccuccacgugacauacguccccgcccaggagaagaacuucaccaccgcccccgccauuugccacgacggcaaggcccacuucccccgggagggaguguucgugagcaacggcacccacugguucgugacccagcggaacuucuacgagccucagaucaucaccaccgacaacaccuucgugagcggcaacugcgacguggugaucggcaucgugaacaacaccguguacgacccccugcagcccgagcuggacagcuucaaggaggagcuggacaaguacuucaagaaccacaccagcccagacguggaccugggcgacaucagcggcaucaacgccagcguggugaacauccagaaggagaucgaccggcugaacgagguggccaagaaccugaacgagagccugaucgaccugcaggagcugggcaaguacgagcaguacaucaaguggcccugguacaucuggcugggcuucaucgccggccugaucgccaucgugauggugaccaucaugcugugcugcaugaccagcugcuguagcugccugaagggcugcugcagcugcggcagcugcugcaaguucgacgaggacgacagcgagcccgugcugaagggcgugaagcugcacuacaccugaugacucgagcugguacugcaugcacgcaaugcuagcugccccuuucccguccuggguaccccgagucucccccgaccucgggucccagguaugcucccaccuccaccugccccacucaccaccucugcuaguuccagacaccucccaagcacgcagcaaugcagcucaaaacgcuuagccuagccacacccccacgggaaacagcagugauuaaccuuuagcaauaaacgaaaguuuaacuaagcuauacuaaccccaggguuggucaauuucgugccagccacacccuggagcuagcaaaaaaaaaaaaaaaaaaaaaaaaaaaaaaaaaaaaaaaaaaaaaaaaaaaaaaaaaaaaaaaaaaaaaaaaaaaaaaaaaaaaaaaaaaaaaaaaaaaa

SEQ ID NO: 26433 - RNA, 4273 nt, Artificial Sequence
  SARS-CoV-2/Wuhan/WIV05/2019__EPI_ISL_402128 spike protein mRNA gc (1-1273)(K986P_V987P_A222V_D614G)
agaauaaacuaguauucuucugguccccacagacucagagagaacccgccaccauguucguguuccuggugcugcugccccuggugagcagccagugcgugaaccugaccacccggacccagcugcccccugccuacaccaacagcuucacccggggcguguacuaccccgacaagguguuccggagcagcgugcugcacagcacccaggaccuguuccugcccuucuucagcaacgugaccugguuccacgccauccacgugagcggcaccaacggcaccaagcgguucgacaacccagugcugcccuucaacgacggcguguacuucgccagcaccgagaagucaaacaucauccggggcuggaucuucggcaccacccuggacagcaagacacagagccugcugaucgugaacaacgccaccaacguggugaucaaggugugcgaguuucaguucugcaacgaccccuuccugggcguguacuaccacaagaacaacaagagcuggauggagagcgaguuccgggucuacagcagcgcuaacaauugcaccuucgaguacgugagccagcccuuccugauggaccucgagggcaagcagggcaacuucaagaaccugcgggaguucguguucaagaacaucgauggcuacuucaagaucuacagcaagcacacccccaucaaccuggugcgggaccugccccagggauucagcgugcuggagccucugguggaccugcccaucggcaucaacaucaccagguuccagacccugcuggcccugcaccggagcuaccugacccccggcgacagcagcagcggcuggaccgccggcgccgccgccuacuacgugggcuaccugcagccacggaccuuccugcugaaguacaacgagaacggcaccaucaccgacgcaguggacugcgcccuggacccccugagcgagaccaagugcacccuaaagagcuucaccguggagaagggcaucuaccagaccagcaacuuccgggugcagcccacugagagcaucgugcgguuccccaacauuaccaaccugugucccuucggcgagguguucaacgccacccgguucgccagcguguacgccuggaaccggaagcggaucagcaacugcguggccgacuacagcgugcuguacaacagcgccagcuucagcaccuucaagugcuacggcgugagcccuaccaagcugaacgaccugugcuucaccaacguguacgccgacagcuucgugauccggggcgacgaggugcggcagaucgcucccggccagaccggcaagaucgccgacuacaacuacaagcugcccgacgacuucaccggcugcgugaucgccuggaacagcaacaaccuggacagcaaggugggcggcaacuacaacuaccuguaccggcuguuccguaagagcaaccugaagccauucgagcgggacaucagcaccgagaucuaccaggccggcagcacccccugcaacgguguggagggcuuuaacugcuacuucccccugcagagcuacggcuuccagcccaccaacggcgugggcuaccagcccuaccgggugguggugcugagcuucgagcugcugcacgcccccgccaccgugugcggcccuaaaaagagcaccaaccuggugaagaacaagugcgugaacuucaauuucaacggccugaccggcaccggcgugcugaccgagagcaacaagaaguuccugcccuuccagcaguucggccgggauaucgccgacaccaccgacgccgugcgggacccccagacccuggagauccuggacaucaccccaugcagcuucggcggcgucagcgugaucacccccggcacaaacaccagcaaccagguggcagugcuguaccagggagugaacugcaccgaggugcccguggccauccacgccgaccagcugacccccaccuggcggguguacagcaccggcagcaacguguuccagacccgggccggcugccugaucggcgccgagcacgugaacaacuccuacgagugcgacauccccaucggcgccggcaucugcgcuagcuaccagacccagaccaacagcccccggcgggcccggagcguggccagccagagcaucaucgccuacaccaugagcuuaggcgccgagaacagcguggccuacagcaacaacagcaucgccaucccuaccaacuucaccaucagcgugaccaccgagauacugcccgugagcaugaccaagaccagcguggacuguaccauguacaucugcggcgacagcaccgagugcagcaaccugcugcugcaguacggcagcuucugcacccagcugaaccgggcgcugaccggcaucgccguggagcaggacaagaacacccaagagguguucgcccaggugaagcagaucuacaagacucccccaaucaaggacuucggcggcuucaacuucagccagauccugcccgaccccagcaagcccagcaagcggagcuucaucgaggaccugcuguucaacaaggugacccuggccgacgccggcuucaucaagcaguacggcgacugccugggggauaucgccgcccgggaccugaucugcgcucagaaguucaacggccugaccgugcugcccccucugcugaccgacgagaugaucgcccaguacaccagcgcccugcuugccggcaccaucaccagcggcuggaccuucggcgccggcgccgcacugcagauccccuucgccaugcagauggccuaccgguucaacggcaucggcgugacccagaacgugcuguacgagaaccagaagcugaucgccaaccaguucaacagcgccaucggcaagauccaggacagccugagcagcaccgccagcgcccugggcaagcugcaggacguggugaaccagaacgcccaggcucugaacacccuggugaagcagcugagcagcaacuucggcgccaucagcucagugcugaaugacauccugagcaggcuggaucccccagaggccgaggugcagaucgaccggcugaucaccggccggcugcagagccugcagaccuacgugacccagcagcugauccgggccgccgagauccgggccagcgccaaccuggccgcaaccaagaugagcgagugcgugcugggccagagcaagcggguggacuuuugcggcaagggcuaccaccugaugagcuucccccagagcgcuccccacggcgugguguuccuccacgucacauacgugcccgcccaggagaagaacuucaccaccgcccccgccauuugccacgacggcaaggcccacuucccccgggagggaguguucgugagcaacggcacccacugguucgugacccagcggaacuucuacgagccucagaucaucaccaccgacaacaccuucgugagcggcaacugcgacguggugaucggcaucgugaacaacaccguguacgacccccugcagcccgagcuggacagcuucaaggaggagcuggacaaguacuucaagaaccacaccagcccagacguggaccugggcgacaucagcggcaucaacgccagcguggugaacauccagaaggagaucgaccggcugaacgagguggccaagaaccugaacgagagccugaucgaccugcaggagcugggcaaguacgagcaguacaucaaguggcccugguacaucuggcugggcuucaucgccggccugaucgccaucgugauggugaccaucaugcugugcugcaugaccagcugcuguagcugccugaagggcugcugcagcugcggcagcugcugcaaguucgacgaggacgacagcgagcccgugcugaagggcgugaagcugcacuacaccugaugacucgagcugguacugcaugcacgcaaugcuagcugccccuuucccguccuggguaccccgagucucccccgaccucgggucccagguaugcucccaccuccaccugccccacucaccaccucugcuaguuccagacaccucccaagcacgcagcaaugcagcucaaaacgcuuagccuagccacacccccacgggaaacagcagugauuaaccuuuagcaauaaacgaaaguuuaacuaagcuauacuaaccccaggguuggucaauuucgugccagccacacccuggagcuagcaaaaaaaaaaaaaaaaaaaaaaaaaaaaaaaaaaaaaaaaaaaaaaaaaaaaaaaaaaaaaaaaaaaaaaaaaaaaaaaaaaaaaaaaaaaaaaaaaaaa

SEQ ID NO: 26434 - RNA, 4273 nt, Artificial Sequence
  SARS-CoV-2/Wuhan/WIV05/2019__EPI_ISL_402128 spike protein mRNA gc (1-1273)(K986P_V987P_N439K_D614G)
agaauaaacuaguauucuucugguccccacagacucagagagaacccgccaccauguucguguuccuggugcugcugccccuggugagcagccagugcgugaaccugaccacccggacccagcugcccccugccuacaccaacagcuucacccggggcguguacuaccccgacaagguguuccggagcagcgugcugcacagcacccaggaccuguuccugcccuucuucagcaacgugaccugguuccacgccauccacgugagcggcaccaacggcaccaagcgguucgacaacccagugcugcccuucaacgacggcguguacuucgccagcaccgagaagucaaacaucauccggggcuggaucuucggcaccacccuggacagcaagacacagagccugcugaucgugaacaacgccaccaacguggugaucaaggugugcgaguuucaguucugcaacgaccccuuccugggcguguacuaccacaagaacaacaagagcuggauggagagcgaguuccgggucuacagcagcgcuaacaauugcaccuucgaguacgugagccagcccuuccugauggaccucgagggcaagcagggcaacuucaagaaccugcgggaguucguguucaagaacaucgauggcuacuucaagaucuacagcaagcacacccccaucaaccuggugcgggaccugccccagggauucagcgcccuggagccucugguggaccugcccaucggcaucaacaucaccagguuccagacccugcuggcccugcaccggagcuaccugacccccggcgacagcagcagcggcuggaccgccggcgccgccgcauacuacgugggcuaccugcagccacggaccuuccugcugaaguacaacgagaacggcaccaucaccgacgccguggacugcgcccuggacccccugagcgagaccaagugcacccuaaagagcuucaccguggagaagggcaucuaccagaccagcaacuuccgggugcagcccacugagagcaucgugcgguuccccaacauuaccaaccugugucccuucggcgagguguucaacgccacccgguucgccagcguguacgccuggaaccggaagcggaucagcaacugcguggccgacuacagcgugcuguacaacagcgccagcuucagcaccuucaagugcuacggcgugagcccuaccaagcugaacgaccugugcuucaccaacguguacgcugacagcuucgugauccggggcgacgaggugcggcagaucgcccccggccagaccggcaagaucgccgacuacaacuacaagcugcccgacgacuucaccggcugcgugaucgccuggaacagcaagaaccuggacagcaaggugggcggcaacuacaacuaccuguaccggcuguuccguaagagcaaccugaagccauucgagcgggacaucagcaccgagaucuaccaggccggcagcacccccugcaacgguguggagggcuuuaacugcuacuucccccugcagagcuacggcuuccagcccaccaacggcgugggcuaccagcccuaccgggugguggugcugagcuucgagcugcugcacgcccccgccaccgugugcggcccuaaaaagagcaccaaccuggugaagaacaagugcgugaacuucaacuucaauggccugaccggcaccggcgugcugaccgagagcaacaagaaguuccugcccuuccagcaguucggccgggauaucgccgacaccaccgacgcagugcgggacccccagacccuggagauccuggacaucaccccaugcagcuucggcggcgugagcgucaucacccccggcacaaacaccagcaaccagguggccgugcuguaccagggagugaacugcaccgaggugcccguggccauccacgccgaccagcugacccccaccuggcggguguacagcaccggcagcaacguguuccagacccgggccggcugccugaucggcgccgagcacgugaacaacuccuacgagugcgacauccccaucggcgcuggcaucugcgccagcuaccagacccagaccaacagcccccggcgggcccggagcguggccagccagagcaucaucgccuacaccaugagcuuaggcgccgagaacagcguggccuacagcaacaacagcaucgcgaucccuaccaacuucaccaucagcgugaccaccgagauacugcccgugagcaugaccaagaccagcguggacuguaccauguacaucugcggcgacagcaccgagugcagcaaccugcugcugcaguacggcagcuucugcacccagcugaaccgggcccugaccggcaucgccguggagcaggacaagaacacccaagagguguucgcccaggugaagcagaucuacaagacucccccaaucaaggacuucggcggcuucaacuucagccagauccugcccgaccccagcaagcccagcaagcggagcuucaucgaggaccugcuguucaacaaggugacccuggccgacgccggcuucaucaagcaguacggcgacugccugggggauaucgccgcucgggaccugaucugcgcccagaaguucaacggccugaccgugcugcccccucugcugaccgacgagaugaucgcccaguacaccagcgcccugcuugccggcaccaucaccagcggcuggaccuucggcgccggcgcagcccugcagauccccuucgccaugcagauggccuaccgguucaacggcaucggcgugacccagaacgugcuguacgagaaccagaagcugaucgccaaccaguucaacagcgccaucggcaagauccaggacagccugagcagcaccgccagcgcccugggcaagcugcaggacguggugaaccagaacgcucaggcccugaacacccuggugaagcagcugagcagcaacuucggcgccaucagcucagugcugaacgacauccugagcaggcuggaucccccagaggccgaggugcagaucgaccggcugaucaccggccggcugcagagccugcagaccuacgugacccagcagcugauccgggccgccgagauccgggccagcgccaaucuggcagccaccaagaugagcgagugcgugcugggccagagcaagcggguggacuuuugcggcaagggcuaccaccugaugagcuucccccagagcgcuccccacggcgugguguuccuccacgugacauacguccccgcccaggagaagaacuucaccaccgcccccgccauuugccacgacggcaaggcccacuucccccgggagggaguguucgugagcaacggcacccacugguucgugacccagcggaacuucuacgagccucagaucaucaccaccgacaacaccuucgugagcggcaacugcgacguggugaucggcaucgugaacaacaccguguacgacccccugcagcccgagcuggacagcuucaaggaggagcuggacaaguacuucaagaaccacaccagcccagacguggaccugggcgacaucagcggcaucaacgccagcguggugaacauccagaaggagaucgaccggcugaacgagguggccaagaaccugaacgagagccugaucgaccugcaggagcugggcaaguacgagcaguacaucaaguggcccugguacaucuggcugggcuucaucgccggccugaucgccaucgugauggugaccaucaugcugugcugcaugaccagcugcuguagcugccugaagggcugcugcagcugcggcagcugcugcaaguucgacgaggacgacagcgagcccgugcugaagggcgugaagcugcacuacaccugaugacucgagcugguacugcaugcacgcaaugcuagcugccccuuucccguccuggguaccccgagucucccccgaccucgggucccagguaugcucccaccuccaccugccccacucaccaccucugcuaguuccagacaccucccaagcacgcagcaaugcagcucaaaacgcuuagccuagccacacccccacgggaaacagcagugauuaaccuuuagcaauaaacgaaaguuuaacuaagcuauacuaaccccaggguuggucaauuucgugccagccacacccuggagcuagcaaaaaaaaaaaaaaaaaaaaaaaaaaaaaaaaaaaaaaaaaaaaaaaaaaaaaaaaaaaaaaaaaaaaaaaaaaaaaaaaaaaaaaaaaaaaaaaaaaaa

SEQ ID NO: 26435 - RNA, 4273 nt, Artificial Sequence
  SARS-CoV-2/Wuhan/WIV05/2019__EPI_ISL_402128 spike protein mRNA gc (1-1273)(K986P_V987P_S477N_D614G)
agaauaaacuaguauucuucugguccccacagacucagagagaacccgccaccauguucguguuccuggugcugcugccccuggugagcagccagugcgugaaccugaccacccggacccagcugcccccugccuacaccaacagcuucacccggggcguguacuaccccgacaagguguuccggagcagcgugcugcacagcacccaggaccuguuccugcccuucuucagcaacgugaccugguuccacgccauccacgugagcggcaccaacggcaccaagcgguucgacaacccagugcugcccuucaacgacggcguguacuucgccagcaccgagaagucaaacaucauccggggcuggaucuucggcaccacccuggacagcaagacacagagccugcugaucgugaacaacgccaccaacguggugaucaaggugugcgaguuucaguucugcaacgaccccuuccugggcguguacuaccacaagaacaacaagagcuggauggagagcgaguuccgggucuacagcagcgcuaacaauugcaccuucgaguacgugagccagcccuuccugauggaccucgagggcaagcagggcaacuucaagaaccugcgggaguucguguucaagaacaucgauggcuacuucaagaucuacagcaagcacacccccaucaaccuggugcgggaccugccccagggauucagcgcccuggagccucugguggaccugcccaucggcaucaacaucaccagguuccagacccugcuggcccugcaccggagcuaccugacccccggcgacagcagcagcggcuggaccgccggcgccgccgcauacuacgugggcuaccugcagccacggaccuuccugcugaaguacaacgagaacggcaccaucaccgacgccguggacugcgcccuggacccccugagcgagaccaagugcacccuaaagagcuucaccguggagaagggcaucuaccagaccagcaacuuccgggugcagcccacugagagcaucgugcgguuccccaacauuaccaaccugugucccuucggcgagguguucaacgccacccgguucgccagcguguacgccuggaaccggaagcggaucagcaacugcguggccgacuacagcgugcuguacaacagcgccagcuucagcaccuucaagugcuacggcgugagcccuaccaagcugaacgaccugugcuucaccaacguguacgcugacagcuucgugauccggggcgacgaggugcggcagaucgcccccggccagaccggcaagaucgccgacuacaacuacaagcugcccgacgacuucaccggcugcgugaucgccuggaacagcaacaaccuggacagcaaggugggcggcaacuacaacuaccuguaccggcuguuccguaagagcaaccugaagccauucgagcgggacaucagcaccgagaucuaccaggccggcaacacccccugcaacgguguggagggcuuuaacugcuacuucccccugcagagcuacggcuuccagcccaccaacggcgugggcuaccagcccuaccgggugguggugcugagcuucgagcugcugcacgcccccgccaccgugugcggcccuaaaaagagcaccaaccuggugaagaacaagugcgugaauuucaacuucaacggccugaccggcaccggcgugcugaccgagagcaacaagaaguuccugcccuuccagcaguucggccgggauaucgccgacaccaccgacgcagugcgggacccccagacccuggagauccuggacaucaccccaugcagcuucggcggcgugagcgucaucacccccggcacaaacaccagcaaccagguggccgugcuguaccagggagugaacugcaccgaggugcccguggccauccacgccgaccagcugacccccaccuggcggguguacagcaccggcagcaacguguuccagacccgggccggcugccugaucggcgccgagcacgugaacaacagcuacgagugcgacauccccaucggcgcuggcaucugcgccuccuaccagacccagaccaacagcccccggcgggcccggagcguggccagccagagcaucaucgccuacaccaugagcuuaggcgccgagaacagcguggccuacagcaacaacagcaucgcgaucccuaccaacuucaccaucagcgugaccaccgagauacugcccgugagcaugaccaagaccagcguggacuguaccauguacaucugcggcgacagcaccgagugcagcaaccugcugcugcaguacggcagcuucugcacccagcugaaccgggcccugaccggcaucgccguggagcaggacaagaacacccaagagguguucgcccaggugaagcagaucuacaagacucccccaaucaaggacuucggcggcuucaacuucagccagauccugcccgaccccagcaagcccagcaagcggagcuucaucgaggaccugcuguucaacaaggugacccuggccgacgccggcuucaucaagcaguacggcgacugccugggggauaucgccgcucgggaccugaucugcgcccagaaguucaacggccugaccgugcugcccccucugcugaccgacgagaugaucgcccaguacaccagcgcccugcuugccggcaccaucaccagcggcuggaccuucggcgccggcgcagcccugcagauccccuucgccaugcagauggccuaccgguucaacggcaucggcgugacccagaacgugcuguacgagaaccagaagcugaucgccaaccaguucaacagcgccaucggcaagauccaggacagccugagcagcaccgccagcgcccugggcaagcugcaggacguggugaaccagaacgcucaggcccugaacacccuggugaagcagcugagcagcaauuucggcgccaucagcagcgugcugaacgacauccugucaaggcuggaucccccagaggccgaggugcagaucgaccggcugaucaccggccggcugcagagccugcagaccuacgugacccagcagcugauccgggccgccgagauccgggccagcgccaaccuggcagccaccaagaugagcgagugcgugcugggccagagcaagcggguggacuuuugcggcaagggcuaccaccugaugagcuucccccagagcgcuccccacggcgugguguuccuccacgugacauacguccccgcccaggagaagaacuucaccaccgcccccgccauuugccacgacggcaaggcccacuucccccgggagggaguguucgugagcaacggcacccacugguucgugacccagcggaacuucuacgagccucagaucaucaccaccgacaacaccuucgugagcggcaacugcgacguggugaucggcaucgugaacaacaccguguacgacccccugcagcccgagcuggacagcuucaaggaggagcuggacaaguacuucaagaaccacaccagcccagacguggaccugggcgacaucagcggcaucaacgccagcguggugaacauccagaaggagaucgaccggcugaacgagguggccaagaaccugaacgagagccugaucgaccugcaggagcugggcaaguacgagcaguacaucaaguggcccugguacaucuggcugggcuucaucgccggccugaucgccaucgugauggugaccaucaugcugugcugcaugaccagcugcuguagcugccugaagggcugcugcagcugcggcagcugcugcaaguucgacgaggacgacagcgagcccgugcugaagggcgugaagcugcacuacaccugaugacucgagcugguacugcaugcacgcaaugcuagcugccccuuucccguccuggguaccccgagucucccccgaccucgggucccagguaugcucccaccuccaccugccccacucaccaccucugcuaguuccagacaccucccaagcacgcagcaaugcagcucaaaacgcuuagccuagccacacccccacgggaaacagcagugauuaaccuuuagcaauaaacgaaaguuuaacuaagcuauacuaaccccaggguuggucaauuucgugccagccacacccuggagcuagcaaaaaaaaaaaaaaaaaaaaaaaaaaaaaaaaaaaaaaaaaaaaaaaaaaaaaaaaaaaaaaaaaaaaaaaaaaaaaaaaaaaaaaaaaaaaaaaaaaaa

SEQ ID NO: 26436 - RNA, 4273 nt, Artificial Sequence
  SARS-CoV-2/Wuhan/WIV05/2019__EPI_ISL_402128 spike protein mRNA gc (1-1273)(K986P_V987P_N501Y_D614G)
agaauaaacuaguauucuucugguccccacagacucagagagaacccgccaccauguucguguuccuggugcugcugccccuggugagcagccagugcgugaaccugaccacccggacccagcugcccccugccuacaccaacagcuucacccggggcguguacuaccccgacaagguguuccggagcagcgugcugcacagcacccaggaccuguuccugcccuucuucagcaacgugaccugguuccacgccauccacgugagcggcaccaacggcaccaagcgguucgacaacccagugcugcccuucaacgacggcguguacuucgccagcaccgagaagucaaacaucauccggggcuggaucuucggcaccacccuggacagcaagacacagagccugcugaucgugaacaacgccaccaacguggugaucaaggugugcgaguuucaguucugcaacgaccccuuccugggcguguacuaccacaagaacaacaagagcuggauggagagcgaguuccgggucuacagcagcgcuaacaauugcaccuucgaguacgugagccagcccuuccugauggaccucgagggcaagcagggcaacuucaagaaccugcgggaguucguguucaagaacaucgauggcuacuucaagaucuacagcaagcacacccccaucaaccuggugcgggaccugccccagggauucagcgcccuggagccucugguggaccugcccaucggcaucaacaucaccagguuccagacccugcuggcccugcaccggagcuaccugacccccggcgacagcagcagcggcuggaccgccggcgccgccgcauacuacgugggcuaccugcagccacggaccuuccugcugaaguacaacgagaacggcaccaucaccgacgccguggacugcgcccuggacccccugagcgagaccaagugcacccuaaagagcuucaccguggagaagggcaucuaccagaccagcaacuuccgggugcagcccacugagagcaucgugcgguuccccaacauuaccaaccugugucccuucggcgagguguucaacgccacccgguucgccagcguguacgccuggaaccggaagcggaucagcaacugcguggccgacuacagcgugcuguacaacagcgccagcuucagcaccuucaagugcuacggcgugagcccuaccaagcugaacgaccugugcuucaccaacguguacgcugacagcuucgugauccggggcgacgaggugcggcagaucgcccccggccagaccggcaagaucgccgacuacaacuacaagcugcccgacgacuucaccggcugcgugaucgccuggaacagcaacaaccuggacagcaaggugggcggcaacuacaacuaccuguaccggcuguuccguaagagcaaccugaagccauucgagcgggacaucagcaccgagaucuaccaggccggcagcacccccugcaacgguguggagggcuuuaacugcuacuucccccugcagagcuacggcuuccagcccaccuacggcgugggcuaccagcccuaccgggugguggugcugagcuucgagcugcugcacgcccccgccaccgugugcggcccuaaaaagagcaccaaccuggugaagaacaagugcgugaacuucaacuucaauggccugaccggcaccggcgugcugaccgagagcaacaagaaguuccugcccuuccagcaguucggccgggauaucgccgacaccaccgacgcagugcgggacccccagacccuggagauccuggacaucaccccaugcagcuucggcggcgugagcgucaucacccccggcacaaacaccagcaaccagguggccgugcuguaccagggagugaacugcaccgaggugcccguggccauccacgccgaccagcugacccccaccuggcggguguacagcaccggcagcaacguguuccagacccgggccggcugccugaucggcgccgagcacgugaacaacuccuacgagugcgacauccccaucggcgcuggcaucugcgccagcuaccagacccagaccaacagcccccggcgggcccggagcguggccagccagagcaucaucgccuacaccaugagcuuaggcgccgagaacagcguggccuacagcaacaacagcaucgcgaucccuaccaacuucaccaucagcgugaccaccgagauacugcccgugagcaugaccaagaccagcguggacuguaccauguacaucugcggcgacagcaccgagugcagcaaccugcugcugcaguacggcagcuucugcacccagcugaaccgggcccugaccggcaucgccguggagcaggacaagaacacccaagagguguucgcccaggugaagcagaucuacaagacucccccaaucaaggacuucggcggcuucaacuucagccagauccugcccgaccccagcaagcccagcaagcggagcuucaucgaggaccugcuguucaacaaggugacccuggccgacgccggcuucaucaagcaguacggcgacugccugggggauaucgccgcucgggaccugaucugcgcccagaaguucaacggccugaccgugcugcccccucugcugaccgacgagaugaucgcccaguacaccagcgcccugcuugccggcaccaucaccagcggcuggaccuucggcgccggcgcagcccugcagauccccuucgccaugcagauggccuaccgguucaacggcaucggcgugacccagaacgugcuguacgagaaccagaagcugaucgccaaccaguucaacagcgccaucggcaagauccaggacagccugagcagcaccgccagcgcccugggcaagcugcaggacguggugaaccagaacgcucaggcccugaacacccuggugaagcagcugagcagcaacuucggcgccaucagcucagugcugaacgacauccugagcaggcuggaucccccagaggccgaggugcagaucgaccggcugaucaccggccggcugcagagccugcagaccuacgugacccagcagcugauccgggccgccgagauccgggccagcgccaaucuggcagccaccaagaugagcgagugcgugcugggccagagcaagcggguggacuuuugcggcaagggcuaccaccugaugagcuucccccagagcgcuccccacggcgugguguuccuccacgugacauacguccccgcccaggagaagaacuucaccaccgcccccgccauuugccacgacggcaaggcccacuucccccgggagggaguguucgugagcaacggcacccacugguucgugacccagcggaacuucuacgagccucagaucaucaccaccgacaacaccuucgugagcggcaacugcgacguggugaucggcaucgugaacaacaccguguacgacccccugcagcccgagcuggacagcuucaaggaggagcuggacaaguacuucaagaaccacaccagcccagacguggaccugggcgacaucagcggcaucaacgccagcguggugaacauccagaaggagaucgaccggcugaacgagguggccaagaaccugaacgagagccugaucgaccugcaggagcugggcaaguacgagcaguacaucaaguggcccugguacaucuggcugggcuucaucgccggccugaucgccaucgugauggugaccaucaugcugugcugcaugaccagcugcuguagcugccugaagggcugcugcagcugcggcagcugcugcaaguucgacgaggacgacagcgagcccgugcugaagggcgugaagcugcacuacaccugaugacucgagcugguacugcaugcacgcaaugcuagcugccccuuucccguccuggguaccccgagucucccccgaccucgggucccagguaugcucccaccuccaccugccccacucaccaccucugcuaguuccagacaccucccaagcacgcagcaaugcagcucaaaacgcuuagccuagccacacccccacgggaaacagcagugauuaaccuuuagcaauaaacgaaaguuuaacuaagcuauacuaaccccaggguuggucaauuucgugccagccacacccuggagcuagcaaaaaaaaaaaaaaaaaaaaaaaaaaaaaaaaaaaaaaaaaaaaaaaaaaaaaaaaaaaaaaaaaaaaaaaaaaaaaaaaaaaaaaaaaaaaaaaaaaaa

SEQ ID NO: 26437 - RNA, 4267 nt, Artificial Sequence
  SARS-CoV-2/Wuhan/WIV05/2019__EPI_ISL_402128 spike protein mRNA gc (1-1273)(K986P_V987P_H69del_V70del_D614G)
agaauaaacuaguauucuucugguccccacagacucagagagaacccgccaccauguucguguuccuggugcugcugccccuggugagcagccagugcgugaaccugaccacccggacccagcugcccccugccuacaccaacagcuucacccggggcguguacuaccccgacaagguguuccggagcagcgugcugcacagcacccaggaccuguuccugcccuucuucagcaacgugaccugguuccacgccaucagcggcaccaacggcaccaagcgguucgacaacccagugcugcccuucaacgacggcguguacuucgccagcaccgagaagucaaacaucauccggggcuggaucuucggcaccacccuggacagcaagacacagagccugcugaucgugaacaacgccaccaacguggugaucaaggugugcgaguuucaguucugcaacgaccccuuccugggcguguacuaccacaagaacaacaagagcuggauggagagcgaguuccggguguacagcagcgcuaacaauugcaccuucgaguacgucagccagcccuuccugauggaccucgagggcaagcagggcaacuucaagaaccugcgggaguucguguucaagaacaucgauggcuacuucaagaucuacagcaagcacacccccaucaaccuggugcgggaccugccccagggauucagcgcccuggagccucugguggaccugcccaucggcaucaacaucaccagguuccagacccugcuggcccugcaccggagcuaccugacccccggcgacagcagcagcggcuggaccgccggcgccgccgcauacuacgugggcuaccugcagccacggaccuuccugcugaaguacaacgagaacggcaccaucaccgacgccguggacugcgcccuggacccccugagcgagaccaagugcacccuaaagagcuucaccguggagaagggcaucuaccagaccagcaacuuccgggugcagcccacugagagcaucgugcgguuccccaacauuaccaaccugugucccuucggcgagguguucaacgccacccgguucgccagcguguacgccuggaaccggaagcggaucagcaacugcguggccgacuacagcgugcuguacaacagcgccagcuucagcaccuucaagugcuacggcgugagcccuaccaagcugaacgaccugugcuucaccaacguguacgcugacagcuucgugauccggggcgacgaggugcggcagaucgcccccggccagaccggcaagaucgccgacuacaacuacaagcugcccgacgacuucaccggcugcgugaucgccuggaacagcaacaaccuggacagcaaggugggcggcaacuacaacuaccuguaccggcuguuccguaagagcaaccugaagccauucgagcgggacaucagcaccgagaucuaccaggccggcagcacccccugcaacgguguggagggcuuuaacugcuacuucccccugcagagcuacggcuuccagcccaccaacggcgugggcuaccagcccuaccgggugguggugcugagcuucgagcugcugcacgcccccgccaccgugugcggcccuaaaaagagcaccaaccuggugaagaacaagugcgugaacuucaauuucaacggccugaccggcaccggcgugcugaccgagagcaacaagaaguuccugcccuuccagcaguucggccgggauaucgccgacaccaccgacgcagugcgggacccccagacccuggagauccuggacaucaccccaugcagcuucggcggcgugagcgugaucacccccggcacaaacaccagcaaccaggucgccgugcuguaccagggagugaacugcaccgaggugcccguggccauccacgccgaccagcugacccccaccuggcggguguacagcaccggcagcaacguguuccagacccgggccggcugccugaucggcgccgagcacgugaacaacuccuacgagugcgacauccccaucggcgcuggcaucugcgccagcuaccagacccagaccaacagcccccggcgggcccggagcguggccagccagagcaucaucgccuacaccaugagcuuaggcgccgagaacagcguggccuacagcaacaacagcaucgcgaucccuaccaacuucaccaucagcgugaccaccgagauacugcccgugagcaugaccaagaccagcguggacuguaccauguacaucugcggcgacagcaccgagugcagcaaccugcugcugcaguacggcagcuucugcacccagcugaaccgggcccugaccggcaucgccguggagcaggacaagaacacccaagagguguucgcccaggugaagcagaucuacaagacucccccaaucaaggacuucggcggcuucaacuucagccagauccugcccgaccccagcaagcccagcaagcggagcuucaucgaggaccugcuguucaacaaggugacccuggccgacgccggcuucaucaagcaguacggcgacugccugggggauaucgccgcucgggaccugaucugcgcccagaaguucaacggccugaccgugcugcccccucugcugaccgacgagaugaucgcccaguacaccagcgcccugcuugccggcaccaucaccagcggcuggaccuucggcgccggcgcagcccugcagauccccuucgccaugcagauggccuaccgguucaacggcaucggcgugacccagaacgugcuguacgagaaccagaagcugaucgccaaccaguucaacagcgccaucggcaagauccaggacagccugagcagcaccgccagcgcccugggcaagcugcaggacguggugaaccagaacgcucaggcccugaacacccuggugaagcagcugagcagcaacuucggcgccaucagcucagugcugaaugacauccugagcaggcuggaucccccagaggccgaggugcagaucgaccggcugaucaccggccggcugcagagccugcagaccuacgugacccagcagcugauccgggccgccgagauccgggccagcgccaaccuggcagccaccaagaugagcgagugcgugcugggccagagcaagcggguggacuuuugcggcaagggcuaccaccugaugagcuucccccagagcgcuccccacggcgugguguuccuccacgugacauacgugcccgcccaggagaagaacuucaccaccgcccccgccauuugccacgacggcaaggcccacuucccccgggagggagucuucgugagcaacggcacccacugguucgugacccagcggaacuucuacgagccucagaucaucaccaccgacaacaccuucgugagcggcaacugcgacguggugaucggcaucgugaacaacaccguguacgacccccugcagcccgagcuggacagcuucaaggaggagcuggacaaguacuucaagaaccacaccagcccagacguggaccugggcgacaucagcggcaucaacgccagcguggugaacauccagaaggagaucgaccggcugaacgagguggccaagaaccugaacgagagccugaucgaccugcaggagcugggcaaguacgagcaguacaucaaguggcccugguacaucuggcugggcuucaucgccggccugaucgccaucgugauggugaccaucaugcugugcugcaugaccagcugcuguagcugccugaagggcugcugcagcugcggcagcugcugcaaguucgacgaggacgacagcgagcccgugcugaagggcgugaagcugcacuacaccugaugacucgagcugguacugcaugcacgcaaugcuagcugccccuuucccguccuggguaccccgagucucccccgaccucgggucccagguaugcucccaccuccaccugccccacucaccaccucugcuaguuccagacaccucccaagcacgcagcaaugcagcucaaaacgcuuagccuagccacacccccacgggaaacagcagugauuaaccuuuagcaauaaacgaaaguuuaacuaagcuauacuaaccccaggguuggucaauuucgugccagccacacccuggagcuagcaaaaaaaaaaaaaaaaaaaaaaaaaaaaaaaaaaaaaaaaaaaaaaaaaaaaaaaaaaaaaaaaaaaaaaaaaaaaaaaaaaaaaaaaaaaaaaaaaaaa

SEQ ID NO: 26438 - RNA, 4273 nt, Artificial Sequence
  SARS-CoV-2/Wuhan/WIV05/2019__EPI_ISL_402128 spike protein mRNA gc (1-1273)(K986P_V987P_Y453F_D614G)
agaauaaacuaguauucuucugguccccacagacucagagagaacccgccaccauguucguguuccuggugcugcugccccuggugagcagccagugcgugaaccugaccacccggacccagcugcccccugccuacaccaacagcuucacccggggcguguacuaccccgacaagguguuccggagcagcgugcugcacagcacccaggaccuguuccugcccuucuucagcaacgugaccugguuccacgccauccacgugagcggcaccaacggcaccaagcgguucgacaacccagugcugcccuucaacgacggcguguacuucgccagcaccgagaagucaaacaucauccggggcuggaucuucggcaccacccuggacagcaagacacagagccugcugaucgugaacaacgccaccaacguggugaucaaggugugcgaguuucaguucugcaacgaccccuuccugggcguguacuaccacaagaacaacaagagcuggauggagagcgaguuccgggucuacagcagcgcuaacaauugcaccuucgaguacgugagccagcccuuccugauggaccucgagggcaagcagggcaacuucaagaaccugcgggaguucguguucaagaacaucgauggcuacuucaagaucuacagcaagcacacccccaucaaccuggugcgggaccugccccagggauucagcgcccuggagccucugguggaccugcccaucggcaucaacaucaccagguuccagacccugcuggcccugcaccggagcuaccugacccccggcgacagcagcagcggcuggaccgccggcgccgccgcauacuacgugggcuaccugcagccacggaccuuccugcugaaguacaacgagaacggcaccaucaccgacgccguggacugcgcccuggacccccugagcgagaccaagugcacccuaaagagcuucaccguggagaagggcaucuaccagaccagcaacuuccgggugcagcccacugagagcaucgugcgguuccccaacauuaccaaccugugucccuucggcgagguguucaacgccacccgguucgccagcguguacgccuggaaccggaagcggaucagcaacugcguggccgacuacagcgugcuguacaacagcgccagcuucagcaccuucaagugcuacggcgugagcccuaccaagcugaacgaccugugcuucaccaacguguacgcugacagcuucgugauccggggcgacgaggugcggcagaucgcccccggccagaccggcaagaucgccgacuacaacuacaagcugcccgacgacuucaccggcugcgugaucgccuggaacagcaacaaccuggacagcaaggugggcggcaacuacaacuaccuguuccggcuguuccguaagagcaaccugaagccauuugagcgggacaucagcaccgagaucuaccaggccggcagcacccccugcaacgguguggagggcuucaacugcuacuucccccugcagagcuacggcuuccagcccaccaacggcgugggcuaccagcccuaccgggugguggugcugagcuucgagcugcugcacgcccccgccaccgugugcggcccuaaaaagagcaccaaccuggugaagaacaagugcgugaacuucaauuucaacggccugaccggcaccggcgugcugaccgagagcaacaagaaguuccugcccuuccagcaguucggccgggauaucgccgacaccaccgacgcagugcgggacccccagacccuggagauccuggacaucaccccaugcagcuucggcggcgugagcgucaucacccccggcacaaacaccagcaaccagguggccgugcuguaccagggagugaacugcaccgaggugcccguggccauccacgccgaccagcugacccccaccuggcggguguacagcaccggcagcaacguguuccagacccgggccggcugccugaucggcgccgagcacgugaacaacuccuacgagugcgacauccccaucggcgcuggcaucugcgccagcuaccagacccagaccaacagcccccggcgggcccggagcguggccagccagagcaucaucgccuacaccaugagcuuaggcgccgagaacagcguggccuacagcaacaacagcaucgcgaucccuaccaacuucaccaucagcgugaccaccgagauacugcccgugagcaugaccaagaccagcguggacuguaccauguacaucugcggcgacagcaccgagugcagcaaccugcugcugcaguacggcagcuucugcacccagcugaaccgggcccugaccggcaucgccguggagcaggacaagaacacccaagagguguucgcccaggugaagcagaucuacaagacucccccaaucaaggacuucggcggcuucaacuucagccagauccugcccgaccccagcaagcccagcaagcggagcuucaucgaggaccugcuguucaacaaggugacccuggccgacgccggcuucaucaagcaguacggcgacugccugggggauaucgccgcucgggaccugaucugcgcccagaaguucaacggccugaccgugcugcccccucugcugaccgacgagaugaucgcccaguacaccagcgcccugcuugccggcaccaucaccagcggcuggaccuucggcgccggcgcagcccugcagauccccuucgccaugcagauggccuaccgguucaacggcaucggcgugacccagaacgugcuguacgagaaccagaagcugaucgccaaccaguucaacagcgccaucggcaagauccaggacagccugagcagcaccgccagcgcccugggcaagcugcaggacguggugaaccagaacgcucaggcccugaacacccuggugaagcagcugagcagcaacuuuggcgccaucagcucagugcugaaugacauccugagcaggcuggaucccccagaggccgaggugcagaucgaccggcugaucaccggccggcugcagagccugcagaccuacgugacccagcagcugauccgggccgccgagauccgggccagcgccaaccuggcagccaccaagaugagcgagugcgugcugggccagagcaagcggguggacuucugcggcaagggcuaccaccugaugagcuucccccagagcgcuccccacggcgugguguuccuccacgugacauacguccccgcccaggagaagaacuucaccaccgcccccgccauuugccacgacggcaaggcccacuucccccgggagggaguguucgugagcaacggcacccacugguucgugacccagcggaacuucuacgagccucagaucaucaccaccgacaacaccuucgugagcggcaacugcgacguggugaucggcaucgugaacaacaccguguacgacccccugcagcccgagcuggacagcuucaaggaggagcuggacaaguacuucaagaaccacaccagcccagacguggaccugggcgacaucagcggcaucaacgccagcguggugaacauccagaaggagaucgaccggcugaacgagguggccaagaaccugaacgagagccugaucgaccugcaggagcugggcaaguacgagcaguacaucaaguggcccugguacaucuggcugggcuucaucgccggccugaucgccaucgugauggugaccaucaugcugugcugcaugaccagcugcuguagcugccugaagggcugcugcagcugcggcagcugcugcaaguucgacgaggacgacagcgagcccgugcugaagggcgugaagcugcacuacaccugaugacucgagcugguacugcaugcacgcaaugcuagcugccccuuucccguccuggguaccccgagucucccccgaccucgggucccagguaugcucccaccuccaccugccccacucaccaccucugcuaguuccagacaccucccaagcacgcagcaaugcagcucaaaacgcuuagccuagccacacccccacgggaaacagcagugauuaaccuuuagcaauaaacgaaaguuuaacuaagcuauacuaaccccaggguuggucaauuucgugccagccacacccuggagcuagcaaaaaaaaaaaaaaaaaaaaaaaaaaaaaaaaaaaaaaaaaaaaaaaaaaaaaaaaaaaaaaaaaaaaaaaaaaaaaaaaaaaaaaaaaaaaaaaaaaaa

SEQ ID NO: 26439 - RNA, 4273 nt, Artificial Sequence
  SARS-CoV-2/Wuhan/WIV05/2019__EPI_ISL_402128 spike protein mRNA gc (1-1273)(K986P_V987P_D614G_I692V)
agaauaaacuaguauucuucugguccccacagacucagagagaacccgccaccauguucguguuccuggugcugcugccccuggugagcagccagugcgugaaccugaccacccggacccagcugcccccugccuacaccaacagcuucacccggggcguguacuaccccgacaagguguuccggagcagcgugcugcacagcacccaggaccuguuccugcccuucuucagcaacgugaccugguuccacgccauccacgugagcggcaccaacggcaccaagcgguucgacaacccagugcugcccuucaacgacggcguguacuucgccagcaccgagaagucaaacaucauccggggcuggaucuucggcaccacccuggacagcaagacacagagccugcugaucgugaacaacgccaccaacguggugaucaaggugugcgaguuucaguucugcaacgaccccuuccugggcguguacuaccacaagaacaacaagagcuggauggagagcgaguuccgggucuacagcagcgcuaacaauugcaccuucgaguacgugagccagcccuuccugauggaccucgagggcaagcagggcaacuucaagaaccugcgggaguucguguucaagaacaucgauggcuacuucaagaucuacagcaagcacacccccaucaaccuggugcgggaccugccccagggauucagcgcccuggagccucugguggaccugcccaucggcaucaacaucaccagguuccagacccugcuggcccugcaccggagcuaccugacccccggcgacagcagcagcggcuggaccgccggcgccgccgcauacuacgugggcuaccugcagccacggaccuuccugcugaaguacaacgagaacggcaccaucaccgacgccguggacugcgcccuggacccccugagcgagaccaagugcacccuaaagagcuucaccguggagaagggcaucuaccagaccagcaacuuccgggugcagcccacugagagcaucgugcgguuccccaacauuaccaaccugugucccuucggcgagguguucaacgccacccgguucgccagcguguacgccuggaaccggaagcggaucagcaacugcguggccgacuacagcgugcuguacaacagcgccagcuucagcaccuucaagugcuacggcgugagcccuaccaagcugaacgaccugugcuucaccaacguguacgcugacagcuucgugauccggggcgacgaggugcggcagaucgcccccggccagaccggcaagaucgccgacuacaacuacaagcugcccgacgacuucaccggcugcgugaucgccuggaacagcaacaaccuggacagcaaggugggcggcaacuacaacuaccuguaccggcuguuccguaagagcaaccugaagccauucgagcgggacaucagcaccgagaucuaccaggccggcagcacccccugcaacgguguggagggcuuuaacugcuacuucccccugcagagcuacggcuuccagcccaccaacggcgugggcuaccagcccuaccgggugguggugcugagcuucgagcugcugcacgcccccgccaccgugugcggcccuaaaaagagcaccaaccuggugaagaacaagugcgugaacuucaauuucaacggccugaccggcaccggcgugcugaccgagagcaacaagaaguuccugcccuuccagcaguucggccgggauaucgccgacaccaccgacgcagugcgggacccccagacccuggagauccuggacaucaccccaugcagcuucggcggcgugagcgucaucacccccggcacaaacaccagcaaccagguggccgugcuguaccagggagugaacugcaccgaggugcccguggccauccacgccgaccagcugacccccaccuggcggguguacagcaccggcagcaacguguuccagacccgggccggcugccugaucggcgccgagcacgugaacaacuccuacgagugcgacauccccaucggcgcuggcaucugcgccagcuaccagacccagaccaacagcccccggcgggcccggagcguggccagccagagcgugaucgccuacaccaugagcuuaggcgccgagaacagcguggccuacagcaacaacagcaucgcgaucccuaccaacuucaccaucagcgugaccaccgagauccugcccgugagcaugaccaagaccagcguggacuguaccauguacauaugcggcgacagcaccgagugcagcaaccugcugcugcaguacggcagcuucugcacccagcugaaccgggcccugaccggcaucgccguggagcaggacaagaacacccaagagguguucgcccaggugaagcagaucuacaagacucccccaaucaaggacuucggcggcuucaacuucagccagauccugcccgaccccagcaagcccagcaagcggagcuucaucgaggaccugcuguucaacaaggugacccuggccgacgccggcuucaucaagcaguacggcgacugccugggggauaucgccgcucgggaccugaucugcgcccagaaguucaacggccugaccgugcugcccccucugcugaccgacgagaugaucgcccaguacaccagcgcccugcuugccggcaccaucaccagcggcuggaccuucggcgccggcgcagcccugcagauccccuucgccaugcagauggccuaccgguucaacggcaucggcgugacccagaacgugcuguacgagaaccagaagcugaucgccaaccaguucaacagcgccaucggcaagauccaggacagccugagcagcaccgccagcgcccugggcaagcugcaggacguggugaaccagaacgcucaggcccugaacacccuggugaagcagcugagcagcaacuucggcgccaucagcucagugcugaaugacauccugagcaggcuggaucccccagaggccgaggugcagaucgaccggcugaucaccggccggcugcagagccugcagaccuacgugacccagcagcugauccgggccgccgagauccgggccagcgccaaccuggcagccaccaagaugagcgagugcgugcugggccagagcaagcggguggacuuuugcggcaagggcuaccaccugaugagcuucccccagagcgcuccccacggcgugguguuccuccacgucacauacgugcccgcccaggagaagaacuucaccaccgcccccgccaucugccacgacggcaaggcccacuucccccgggagggaguguucgugagcaacggcacccacugguucgugacccagcggaacuucuacgagccucagauuaucaccaccgacaacaccuucgugagcggcaacugcgacguggugaucggcaucgugaacaacaccguguacgacccccugcagcccgagcuggacagcuucaaggaggagcuggacaaguacuucaagaaccacaccagcccagacguggaccugggcgacaucagcggcaucaacgccagcguggugaacauccagaaggagaucgaccggcugaacgagguggccaagaaccugaacgagagccugaucgaccugcaggagcugggcaaguacgagcaguacaucaaguggcccugguacaucuggcugggcuucaucgccggccugaucgccaucgugauggugaccaucaugcugugcugcaugaccagcugcuguagcugccugaagggcugcugcagcugcggcagcugcugcaaguucgacgaggacgacagcgagcccgugcugaagggcgugaagcugcacuacaccugaugacucgagcugguacugcaugcacgcaaugcuagcugccccuuucccguccuggguaccccgagucucccccgaccucgggucccagguaugcucccaccuccaccugccccacucaccaccucugcuaguuccagacaccucccaagcacgcagcaaugcagcucaaaacgcuuagccuagccacacccccacgggaaacagcagugauuaaccuuuagcaauaaacgaaaguuuaacuaagcuauacuaaccccaggguuggucaauuucgugccagccacacccuggagcuagcaaaaaaaaaaaaaaaaaaaaaaaaaaaaaaaaaaaaaaaaaaaaaaaaaaaaaaaaaaaaaaaaaaaaaaaaaaaaaaaaaaaaaaaaaaaaaaaaaaaa

SEQ ID NO: 26440 - RNA, 4273 nt, Artificial Sequence
  SARS-CoV-2/Wuhan/WIV05/2019__EPI_ISL_402128 spike protein mRNA gc (1-1273)(K986P_V987P_D614G_M1229I)
agaauaaacuaguauucuucugguccccacagacucagagagaacccgccaccauguucguguuccuggugcugcugccccuggugagcagccagugcgugaaccugaccacccggacccagcugcccccugccuacaccaacagcuucacccggggcguguacuaccccgacaagguguuccggagcagcgugcugcacagcacccaggaccuguuccugcccuucuucagcaacgugaccugguuccacgccauccacgugagcggcaccaacggcaccaagcgguucgacaacccagugcugcccuucaacgacggcguguacuucgccagcaccgagaagucaaacaucauccggggcuggaucuucggcaccacccuggacagcaagacacagagccugcugaucgugaacaacgccaccaacguggugaucaaggugugcgaguuucaguucugcaacgaccccuuccugggcguguacuaccacaagaacaacaagagcuggauggagagcgaguuccgggucuacagcagcgcuaacaauugcaccuucgaguacgugagccagcccuuccugauggaccucgagggcaagcagggcaacuucaagaaccugcgggaguucguguucaagaacaucgauggcuacuucaagaucuacagcaagcacacccccaucaaccuggugcgggaccugccccagggauucagcgcccuggagccucugguggaccugcccaucggcaucaacaucaccagguuccagacccugcuggcccugcaccggagcuaccugacccccggcgacagcagcagcggcuggaccgccggcgccgccgcauacuacgugggcuaccugcagccacggaccuuccugcugaaguacaacgagaacggcaccaucaccgacgccguggacugcgcccuggacccccugagcgagaccaagugcacccuaaagagcuucaccguggagaagggcaucuaccagaccagcaacuuccgggugcagcccacugagagcaucgugcgguuccccaacauuaccaaccugugucccuucggcgagguguucaacgccacccgguucgccagcguguacgccuggaaccggaagcggaucagcaacugcguggccgacuacagcgugcuguacaacagcgccagcuucagcaccuucaagugcuacggcgugagcccuaccaagcugaacgaccugugcuucaccaacguguacgcugacagcuucgugauccggggcgacgaggugcggcagaucgcccccggccagaccggcaagaucgccgacuacaacuacaagcugcccgacgacuucaccggcugcgugaucgccuggaacagcaacaaccuggacagcaaggugggcggcaacuacaacuaccuguaccggcuguuccguaagagcaaccugaagccauucgagcgggacaucagcaccgagaucuaccaggccggcagcacccccugcaacgguguggagggcuuuaacugcuacuucccccugcagagcuacggcuuccagcccaccaacggcgugggcuaccagcccuaccgggugguggugcugagcuucgagcugcugcacgcccccgccaccgugugcggcccuaaaaagagcaccaaccuggugaagaacaagugcgugaacuucaauuucaacggccugaccggcaccggcgugcugaccgagagcaacaagaaguuccugcccuuccagcaguucggccgggauaucgccgacaccaccgacgcagugcgggacccccagacccuggagauccuggacaucaccccaugcagcuucggcggcgugagcgucaucacccccggcacaaacaccagcaaccagguggccgugcuguaccagggagugaacugcaccgaggugcccguggccauccacgccgaccagcugacccccaccuggcggguguacagcaccggcagcaacguguuccagacccgggccggcugccugaucggcgccgagcacgugaacaacuccuacgagugcgacauccccaucggcgcuggcaucugcgccagcuaccagacccagaccaacagcccccggcgggcccggagcguggccagccagagcaucaucgccuacaccaugagcuuaggcgccgagaacagcguggccuacagcaacaacagcaucgcgaucccuaccaacuucaccaucagcgugaccaccgagauacugcccgugagcaugaccaagaccagcguggacuguaccauguacaucugcggcgacagcaccgagugcagcaaccugcugcugcaguacggcagcuucugcacccagcugaaccgggcccugaccggcaucgccguggagcaggacaagaacacccaagagguguucgcccaggugaagcagaucuacaagacucccccaaucaaggacuucggcggcuucaacuucagccagauccugcccgaccccagcaagcccagcaagcggagcuucaucgaggaccugcuguucaacaaggugacccuggccgacgccggcuucaucaagcaguacggcgacugccugggggauaucgccgcucgggaccugaucugcgcccagaaguucaacggccugaccgugcugcccccucugcugaccgacgagaugaucgcccaguacaccagcgcccugcuugccggcaccaucaccagcggcuggaccuucggcgccggcgcagcccugcagauccccuucgccaugcagauggccuaccgguucaacggcaucggcgugacccagaacgugcuguacgagaaccagaagcugaucgccaaccaguucaacagcgccaucggcaagauccaggacagccugagcagcaccgccagcgcccugggcaagcugcaggacguggugaaccagaacgcucaggcccugaacacccuggugaagcagcugagcagcaacuucggcgccaucagcucagugcugaaugacauccugagcaggcuggaucccccagaggccgaggugcagaucgaccggcugaucaccggccggcugcagagccugcagaccuacgugacccagcagcugauccgggccgccgagauccgggccagcgccaaccuggcagccaccaagaugagcgagugcgugcugggccagagcaagcggguggacuuuugcggcaagggcuaccaccugaugagcuucccccagagcgcuccccacggcgugguguuccuccacgugacauacguccccgcccaggagaagaacuucaccaccgcccccgccauuugccacgacggcaaggcccacuucccccgggagggaguguucgugagcaacggcacccacugguucgugacccagcggaacuucuacgagccucagaucaucaccaccgacaacaccuucgugagcggcaacugcgacguggugaucggcaucgugaacaacaccguguacgacccccugcagcccgagcuggacagcuucaaggaggagcuggacaaguacuucaagaaccacaccagcccagacguggaccugggcgacaucagcggcaucaacgccagcguggugaacauccagaaggagaucgaccggcugaacgagguggccaagaaccugaacgagagccugaucgaccugcaggagcugggcaaguacgagcaguacaucaaguggcccugguacaucuggcugggcuucaucgccggccugaucgccaucgugaucgugaccaucaugcugugcugcaugaccagcugcuguagcugccugaagggcugcugcagcugcggcagcugcugcaaguucgacgaggacgacagcgagcccgugcugaagggcgugaagcugcacuacaccugaugacucgagcugguacugcaugcacgcaaugcuagcugccccuuucccguccuggguaccccgagucucccccgaccucgggucccagguaugcucccaccuccaccugccccacucaccaccucugcuaguuccagacaccucccaagcacgcagcaaugcagcucaaaacgcuuagccuagccacacccccacgggaaacagcagugauuaaccuuuagcaauaaacgaaaguuuaacuaagcuauacuaaccccaggguuggucaauuucgugccagccacacccuggagcuagcaaaaaaaaaaaaaaaaaaaaaaaaaaaaaaaaaaaaaaaaaaaaaaaaaaaaaaaaaaaaaaaaaaaaaaaaaaaaaaaaaaaaaaaaaaaaaaaaaaaa

SEQ ID NO: 26441 - RNA, 4267 nt, Artificial Sequence
  SARS-CoV-2/Wuhan/WIV05/2019__EPI_ISL_402128 spike protein mRNA gc (1-1273)(K986P_V987P_H69del_V70del_A222V_Y453F_S477N_D614G_I692V)
agaauaaacuaguauucuucugguccccacagacucagagagaacccgccaccauguucguguuccuggugcugcugccccuggugagcagccagugcgugaaccugaccacccggacccagcugcccccugccuacaccaacagcuucacccggggcguguacuaccccgacaagguguuccggagcagcgugcugcacagcacccaggaccuguuccugcccuucuucagcaacgugaccugguuccacgccaucagcggcaccaacggcaccaagcgguucgacaacccagugcugcccuucaacgacggcguguacuucgccagcaccgagaagucaaacaucauccggggcuggaucuucggcaccacccuggacagcaagacacagagccugcugaucgugaacaacgccaccaacguggugaucaaggugugcgaguuucaguucugcaacgaccccuuccugggcguguacuaccacaagaacaacaagagcuggauggagagcgaguuccggguguacagcagcgcuaacaauugcaccuucgaguacgucagccagcccuuccugauggaccucgagggcaagcagggcaacuucaagaaccugcgggaguucguguucaagaacaucgauggcuacuucaagaucuacagcaagcacacccccaucaaccuggugcgggaccugccccagggauucagcgugcuggagccucugguggaccugcccaucggcaucaacaucaccagguuccagacccugcuggcccugcaccggagcuaccugacccccggcgacagcagcagcggcuggaccgccggcgccgccgccuacuacgugggcuaccugcagccacggaccuuccugcugaaguacaacgagaacggcaccaucaccgacgcaguggacugcgcccuggacccccugagcgagaccaagugcacccuaaagagcuucaccguggagaagggcaucuaccagaccagcaacuuccgggugcagcccacugagagcaucgugcgguuccccaacauuaccaaccugugucccuucggcgagguguucaacgccacccgguucgccagcguguacgccuggaaccggaagcggaucagcaacugcguggccgacuacagcgugcuguacaacagcgccagcuucagcaccuucaagugcuacggcgugagcccuaccaagcugaacgaccugugcuucaccaacguguacgccgacagcuucgugauccggggcgacgaggugcggcagaucgcucccggccagaccggcaagaucgccgacuacaacuacaagcugcccgacgacuucaccggcugcgugaucgccuggaacagcaacaaccuggacagcaaggugggcggcaacuacaacuaccuguuccggcuguuccguaagagcaaccugaagccauuugagcgggacaucagcaccgagaucuaccaggccggcaacacccccugcaacgguguggagggcuucaacugcuacuucccccugcagagcuacggcuuccagcccaccaacggcgugggcuaccagcccuaccgggugguggugcugagcuucgagcugcugcacgcccccgccaccgugugcggcccuaaaaagagcaccaaccuggugaagaacaagugcgugaauuucaacuucaacggccugaccggcaccggcgugcugaccgagagcaacaagaaguuccugcccuuccagcaguucggccgggauaucgccgacaccaccgacgccgugcgggacccccagacccuggagauccuggacaucaccccaugcagcuucggcggcgugagcgucaucacccccggcacaaacaccagcaaccagguggcagugcuguaccagggagugaacugcaccgaggugcccguggccauccacgccgaccagcugacccccaccuggcggguguacagcaccggcagcaacguguuccagacccgggccggcugccugaucggcgccgagcacgugaacaacagcuacgagugcgacauccccaucggcgccggcaucugcgcuuccuaccagacccagaccaacagcccccggcgggcccggagcguggccagccagagcgugaucgccuacaccaugagcuuaggcgccgagaacagcguggccuacagcaacaacagcaucgccaucccuaccaacuucaccaucagcgugaccaccgagauccugcccgugagcaugaccaagaccagcguggacuguaccauguacauaugcggcgacagcaccgagugcagcaaccugcugcugcaguacggcagcuucugcacccagcugaaccgggcgcugaccggcaucgccguggagcaggacaagaacacccaagagguguucgcccaggugaagcagaucuacaagacucccccaaucaaggacuucggcggcuucaacuucagccagauccugcccgaccccagcaagcccagcaagcggagcuucaucgaggaccugcuguucaacaaggugacccuggccgacgccggcuucaucaagcaguacggcgacugccugggggauaucgccgcccgggaccugaucugcgcucagaaguucaacggccugaccgugcugcccccucugcugaccgacgagaugaucgcccaguacaccagcgcccugcuugccggcaccaucaccagcggcuggaccuucggcgccggcgccgcacugcagauccccuucgccaugcagauggccuaccgguucaacggcaucggcgugacccagaacgugcuguacgagaaccagaagcugaucgccaaccaguucaacagcgccaucggcaagauccaggacagccugagcagcaccgccagcgcccugggcaagcugcaggacguggugaaccagaacgcccaggcucugaacacccuggugaagcagcugagcagcaauuuuggcgccaucagcagcgugcugaacgacauccugucaaggcuggaucccccagaggccgaggugcagaucgaccggcugaucaccggccggcugcagagccugcagaccuacgugacccagcagcugauccgggccgccgagauccgggccagcgccaaccuggccgcaaccaagaugagcgagugcgugcugggccagagcaagcggguggacuucugcggcaagggcuaccaccugaugagcuucccccagagcgcuccccacggcgugguguuccuccacgucacauacgugcccgcccaggagaagaacuucaccaccgcccccgccaucugccacgacggcaaggcccacuucccccgggagggaguguucgugagcaacggcacccacugguucgugacccagcggaacuucuacgagccucagauuaucaccaccgacaacaccuucgugagcggcaacugcgacguggugaucggcaucgugaacaacaccguguacgacccccugcagcccgagcuggacagcuucaaggaggagcuggacaaguacuucaagaaccacaccagcccagacguggaccugggcgacaucagcggcaucaacgccagcguggugaacauccagaaggagaucgaccggcugaacgagguggccaagaaccugaacgagagccugaucgaccugcaggagcugggcaaguacgagcaguacaucaaguggcccugguacaucuggcugggcuucaucgccggccugaucgccaucgugauggugaccaucaugcugugcugcaugaccagcugcuguagcugccugaagggcugcugcagcugcggcagcugcugcaaguucgacgaggacgacagcgagcccgugcugaagggcgugaagcugcacuacaccugaugacucgagcugguacugcaugcacgcaaugcuagcugccccuuucccguccuggguaccccgagucucccccgaccucgggucccagguaugcucccaccuccaccugccccacucaccaccucugcuaguuccagacaccucccaagcacgcagcaaugcagcucaaaacgcuuagccuagccacacccccacgggaaacagcagugauuaaccuuuagcaauaaacgaaaguuuaacuaagcuauacuaaccccaggguuggucaauuucgugccagccacacccuggagcuagcaaaaaaaaaaaaaaaaaaaaaaaaaaaaaaaaaaaaaaaaaaaaaaaaaaaaaaaaaaaaaaaaaaaaaaaaaaaaaaaaaaaaaaaaaaaaaaaaaaaa

SEQ ID NO: 26442 - RNA, 4267 nt, Artificial Sequence
  SARS-CoV-2/Wuhan/WIV05/2019__EPI_ISL_402128 spike protein mRNA gc (1-1273)(K986P_V987P_H69del_V70del_Y453F_D614G_I692V_M1229I)
agaauaaacuaguauucuucugguccccacagacucagagagaacccgccaccauguucguguuccuggugcugcugccccuggugagcagccagugcgugaaccugaccacccggacccagcugcccccugccuacaccaacagcuucacccggggcguguacuaccccgacaagguguuccggagcagcgugcugcacagcacccaggaccuguuccugcccuucuucagcaacgugaccugguuccacgccaucagcggcaccaacggcaccaagcgguucgacaacccagugcugcccuucaacgacggcguguacuucgccagcaccgagaagucaaacaucauccggggcuggaucuucggcaccacccuggacagcaagacacagagccugcugaucgugaacaacgccaccaacguggugaucaaggugugcgaguuucaguucugcaacgaccccuuccugggcguguacuaccacaagaacaacaagagcuggauggagagcgaguuccggguguacagcagcgcuaacaauugcaccuucgaguacgucagccagcccuuccugauggaccucgagggcaagcagggcaacuucaagaaccugcgggaguucguguucaagaacaucgauggcuacuucaagaucuacagcaagcacacccccaucaaccuggugcgggaccugccccagggauucagcgcccuggagccucugguggaccugcccaucggcaucaacaucaccagguuccagacccugcuggcccugcaccggagcuaccugacccccggcgacagcagcagcggcuggaccgccggcgccgccgcauacuacgugggcuaccugcagccacggaccuuccugcugaaguacaacgagaacggcaccaucaccgacgccguggacugcgcccuggacccccugagcgagaccaagugcacccuaaagagcuucaccguggagaagggcaucuaccagaccagcaacuuccgggugcagcccacugagagcaucgugcgguuccccaacauuaccaaccugugucccuucggcgagguguucaacgccacccgguucgccagcguguacgccuggaaccggaagcggaucagcaacugcguggccgacuacagcgugcuguacaacagcgccagcuucagcaccuucaagugcuacggcgugagcccuaccaagcugaacgaccugugcuucaccaacguguacgcugacagcuucgugauccggggcgacgaggugcggcagaucgcccccggccagaccggcaagaucgccgacuacaacuacaagcugcccgacgacuucaccggcugcgugaucgccuggaacagcaacaaccuggacagcaaggugggcggcaacuacaacuaccuguuccggcuguuccguaagagcaaccugaagccauuugagcgggacaucagcaccgagaucuaccaggccggcagcacccccugcaacgguguggagggcuucaacugcuacuucccccugcagagcuacggcuuccagcccaccaacggcgugggcuaccagcccuaccgggugguggugcugagcuucgagcugcugcacgcccccgccaccgugugcggcccuaaaaagagcaccaaccuggugaagaacaagugcgugaacuucaauuucaacggccugaccggcaccggcgugcugaccgagagcaacaagaaguuccugcccuuccagcaguucggccgggauaucgccgacaccaccgacgcagugcgggacccccagacccuggagauccuggacaucaccccaugcagcuucggcggcgugagcgugaucacccccggcacaaacaccagcaaccaggucgccgugcuguaccagggagugaacugcaccgaggugcccguggccauccacgccgaccagcugacccccaccuggcggguguacagcaccggcagcaacguguuccagacccgggccggcugccugaucggcgccgagcacgugaacaacuccuacgagugcgacauccccaucggcgcuggcaucugcgccagcuaccagacccagaccaacagcccccggcgggcccggagcguggccagccagagcgugaucgccuacaccaugagcuuaggcgccgagaacagcguggccuacagcaacaacagcaucgcgaucccuaccaacuucaccaucagcgugaccaccgagauccugcccgugagcaugaccaagaccagcguggacuguaccauguacauaugcggcgacagcaccgagugcagcaaccugcugcugcaguacggcagcuucugcacccagcugaaccgggcccugaccggcaucgccguggagcaggacaagaacacccaagagguguucgcccaggugaagcagaucuacaagacucccccaaucaaggacuucggcggcuucaacuucagccagauccugcccgaccccagcaagcccagcaagcggagcuucaucgaggaccugcuguucaacaaggugacccuggccgacgccggcuucaucaagcaguacggcgacugccugggggauaucgccgcucgggaccugaucugcgcccagaaguucaacggccugaccgugcugcccccucugcugaccgacgagaugaucgcccaguacaccagcgcccugcuugccggcaccaucaccagcggcuggaccuucggcgccggcgcagcccugcagauccccuucgccaugcagauggccuaccgguucaacggcaucggcgugacccagaacgugcuguacgagaaccagaagcugaucgccaaccaguucaacagcgccaucggcaagauccaggacagccugagcagcaccgccagcgcccugggcaagcugcaggacguggugaaccagaacgcucaggcccugaacacccuggugaagcagcugagcagcaacuuuggcgccaucagcucagugcugaaugacauccugagcaggcuggaucccccagaggccgaggugcagaucgaccggcugaucaccggccggcugcagagccugcagaccuacgugacccagcagcugauccgggccgccgagauccgggccagcgccaaccuggcagccaccaagaugagcgagugcgugcugggccagagcaagcggguggacuucugcggcaagggcuaccaccugaugagcuucccccagagcgcuccccacggcgugguguuccuccacgugacauacguccccgcccaggagaagaacuucaccaccgcccccgccaucugccacgacggcaaggcccacuucccccgggagggaguguucgugagcaacggcacccacugguucgugacccagcggaacuucuacgagccucagauuaucaccaccgacaacaccuucgugagcggcaacugcgacguggugaucggcaucgugaacaacaccguguacgacccccugcagcccgagcuggacagcuucaaggaggagcuggacaaguacuucaagaaccacaccagcccagacguggaccugggcgacaucagcggcaucaacgccagcguggugaacauccagaaggagaucgaccggcugaacgagguggccaagaaccugaacgagagccugaucgaccugcaggagcugggcaaguacgagcaguacaucaaguggcccugguacaucuggcugggcuucaucgccggccugaucgccaucgugaucgugaccaucaugcugugcugcaugaccagcugcuguagcugccugaagggcugcugcagcugcggcagcugcugcaaguucgacgaggacgacagcgagcccgugcugaagggcgugaagcugcacuacaccugaugacucgagcugguacugcaugcacgcaaugcuagcugccccuuucccguccuggguaccccgagucucccccgaccucgggucccagguaugcucccaccuccaccugccccacucaccaccucugcuaguuccagacaccucccaagcacgcagcaaugcagcucaaaacgcuuagccuagccacacccccacgggaaacagcagugauuaaccuuuagcaauaaacgaaaguuuaacuaagcuauacuaaccccaggguuggucaauuucgugccagccacacccuggagcuagcaaaaaaaaaaaaaaaaaaaaaaaaaaaaaaaaaaaaaaaaaaaaaaaaaaaaaaaaaaaaaaaaaaaaaaaaaaaaaaaaaaaaaaaaaaaaaaaaaaaa

SEQ ID NO: 26443 - RNA, 4264 nt, Artificial Sequence
  SARS-CoV-2/Wuhan/WIV05/2019__EPI_ISL_402128 spike protein mRNA gc (1-1273)(K986P_V987P_K986P_V987P_H69del_V70del_Y144del_N501Y_A570 D_D614G_P681H_T716I_S982A_D1118H)
agaauaaacuaguauucuucugguccccacagacucagagagaacccgccaccauguucguguuccuggugcugcugccccuggugagcagccagugcgugaaccugaccacccggacccagcugcccccugccuacaccaacagcuucacccggggcguguacuaccccgacaagguguuccggagcagcgugcugcacagcacccaggaccuguuccugcccuucuucagcaacgugaccugguuccacgccaucagcggcaccaacggcaccaagcgguucgacaacccagugcugcccuucaacgacggcguguacuucgccagcaccgagaagucaaacaucauccggggcuggaucuucggcaccacccuggacagcaagacacagagccugcugaucgugaacaacgccaccaacguggugaucaaggugugcgaguuucaguucugcaacgaccccuuccugggcguguaccacaagaacaacaagagcuggauggagagcgaguuccggguguacagcagcgcuaacaauugcaccuucgaguacgucagccagcccuuccugauggaccucgagggcaagcagggcaacuucaagaaccugcgggaguucguguucaagaacaucgauggcuacuucaagaucuacagcaagcacacccccaucaaccuggugcgggaccugccccagggauucagcgcccuggagccucugguggaccugcccaucggcaucaacaucaccagguuccagacccugcuggcccugcaccggagcuaccugacccccggcgacagcagcagcggcuggaccgccggcgccgccgcauacuacgugggcuaccugcagccacggaccuuccugcugaaguacaacgagaacggcaccaucaccgacgccguggacugcgcccuggacccccugagcgagaccaagugcacccuaaagagcuucaccguggagaagggcaucuaccagaccagcaacuuccgggugcagcccacugagagcaucgugcgguuccccaacauuaccaaccugugucccuucggcgagguguucaacgccacccgguucgccagcguguacgccuggaaccggaagcggaucagcaacugcguggccgacuacagcgugcuguacaacagcgccagcuucagcaccuucaagugcuacggcgugagcccuaccaagcugaacgaccugugcuucaccaacguguacgcugacagcuucgugauccggggcgacgaggugcggcagaucgcccccggccagaccggcaagaucgccgacuacaacuacaagcugcccgacgacuucaccggcugcgugaucgccuggaacagcaacaaccuggacagcaaggugggcggcaacuacaacuaccuguaccggcuguuccguaagagcaaccugaagccauucgagcgggacaucagcaccgagaucuaccaggccggcagcacccccugcaacgguguggagggcuuuaacugcuacuucccccugcagagcuacggcuuccagcccaccuacggcgugggcuaccagcccuaccgggugguggugcugagcuucgagcugcugcacgcccccgccaccgugugcggcccuaaaaagagcaccaaccuggugaagaacaagugcgugaacuucaacuucaauggccugaccggcaccggcgugcugaccgagagcaacaagaaguuccugcccuuccagcaguucggccgggauaucgacgacaccaccgacgccgugcgggacccccagacccuggagauccuggacaucaccccaugcagcuucggcggcgugagcgugaucacccccggcacaaacaccagcaaccaggucgcagugcuguaccagggagugaacugcaccgaggugcccguggccauccacgccgaccagcugacccccaccuggcggguguacagcaccggcagcaacguguuccagacccgggccggcugccugaucggcgccgagcacgugaacaacuccuacgagugcgacauccccaucggcgccggcaucugcgcuagcuaccagacccagaccaacagccaccggcgggcccggagcguggccagccagagcaucaucgccuacaccaugagcuuaggcgccgagaacagcguggccuacagcaacaacagcaucgccauccccaucaacuucaccauaagcgugaccaccgagauccugccugugagcaugaccaagaccagcguggacuguaccauguacaucugcggcgacagcaccgagugcagcaaccugcugcugcaguacggcagcuucugcacccagcugaaccgggcgcugaccggcaucgccguggagcaggacaagaacacccaagagguguucgcccaggugaagcagaucuacaagaccccacccaucaaggacuucggcggcuucaacuucagccagauccugcccgaccccagcaagcccagcaagcggagcuucaucgaggaccugcuguucaacaaggugacucuggccgacgccggcuucaucaagcaguacggcgauugccugggggacaucgccgcccgggaccugaucugcgcucagaaguucaacggccugaccgugcugccuccccugcugaccgacgagaugaucgcccaguacaccagcgcccugcuugccggcaccaucaccagcggcuggaccuucggcgccggcgccgcacugcagauccccuucgccaugcagauggccuaccgguucaacggcaucggcgugacccagaacgugcuguacgagaaccagaagcugaucgccaaccaguucaacagcgccaucggcaagauccaggacagccugagcagcaccgccagcgcccugggcaagcugcaggacguggugaaccagaacgcccaggcucugaacacccuggugaagcagcugagcagcaacuucggcgccaucagcucagugcugaacgacauccuggccaggcuggacccacccgaggccgaggugcagaucgaccggcugaucaccggccggcugcagagccugcagaccuacgugacccagcagcugauccgggccgccgagauucgggccagcgccaaucuggcagccaccaagaugagcgagugcgugcugggccagagcaagcggguggacuuuugcggcaagggcuaccaccugaugagcuucccccagagcgcuccccacggcgugguguuccuccacgugaccuacgugcccgcccaggagaagaacuucacaaccgcccccgccaucugccacgacggcaaggcccacuucccccgggagggagucuucgugagcaacggcacccacugguucgugacccagcggaacuucuacgagccccagaucaucaccacccacaacaccuucgugagcggcaacugcgacguggugaucggcaucgugaacaacaccguguacgacccucugcagcccgagcuggacagcuucaaggaggagcuggacaaguacuucaagaaccacaccagccccgacguggaucugggcgacaucagcggcaucaacgccagcguggugaacauccagaaggagaucgaccggcugaacgagguggccaagaaccugaacgagagccugaucgaccugcaggagcugggcaaguacgagcaguacaucaaguggccaugguacaucuggcugggcuucaucgccggccugaucgccaucgugauggugaccaucaugcugugcugcaugaccagcugcuguagcugccugaagggcugcugcagcugcggcagcugcugcaaguucgacgaggacgacagcgagcccgugcugaagggcgugaagcugcacuacaccugaugacucgagcugguacugcaugcacgcaaugcuagcugccccuuucccguccuggguaccccgagucucccccgaccucgggucccagguaugcucccaccuccaccugccccacucaccaccucugcuaguuccagacaccucccaagcacgcagcaaugcagcucaaaacgcuuagccuagccacacccccacgggaaacagcagugauuaaccuuuagcaauaaacgaaaguuuaacuaagcuauacuaaccccaggguuggucaauuucgugccagccacacccuggagcuagcaaaaaaaaaaaaaaaaaaaaaaaaaaaaaaaaaaaaaaaaaaaaaaaaaaaaaaaaaaaaaaaaaaaaaaaaaaaaaaaaaaaaaaaaaaaaaaaaaaaa

SEQ ID NO: 26444 - RNA, 4273 nt, Artificial Sequence
  SARS-CoV-2/Wuhan/WIV05/2019__EPI_ISL_402128 spike protein mRNA gc (1-1273)(K986P_V987P_K986P_V987P_K417N_E484K_N501Y_D614G)
agaauaaacuaguauucuucugguccccacagacucagagagaacccgccaccauguucguguuccuggugcugcugccccuggugagcagccagugcgugaaccugaccacccggacccagcugcccccugccuacaccaacagcuucacccggggcguguacuaccccgacaagguguuccggagcagcgugcugcacagcacccaggaccuguuccugcccuucuucagcaacgugaccugguuccacgccauccacgugagcggcaccaacggcaccaagcgguucgacaacccagugcugcccuucaacgacggcguguacuucgccagcaccgagaagucaaacaucauccggggcuggaucuucggcaccacccuggacagcaagacacagagccugcugaucgugaacaacgccaccaacguggugaucaaggugugcgaguuucaguucugcaacgaccccuuccugggcguguacuaccacaagaacaacaagagcuggauggagagcgaguuccgggucuacagcagcgcuaacaauugcaccuucgaguacgugagccagcccuuccugauggaccucgagggcaagcagggcaacuucaagaaccugcgggaguucguguucaagaacaucgauggcuacuucaagaucuacagcaagcacacccccaucaaccuggugcgggaccugccccagggauucagcgcccuggagccucugguggaccugcccaucggcaucaacaucaccagguuccagacccugcuggcccugcaccggagcuaccugacccccggcgacagcagcagcggcuggaccgccggcgccgccgcauacuacgugggcuaccugcagccacggaccuuccugcugaaguacaacgagaacggcaccaucaccgacgccguggacugcgcccuggacccccugagcgagaccaagugcacccuaaagagcuucaccguggagaagggcaucuaccagaccagcaacuuccgggugcagcccacugagagcaucgugcgguuccccaacauuaccaaccugugucccuucggcgagguguucaacgccacccgguucgccagcguguacgccuggaaccggaagcggaucagcaacugcguggccgacuacagcgugcuguacaacagcgccagcuucagcaccuucaagugcuacggcgugagcccuaccaagcugaacgaccugugcuucaccaacguguacgcugacagcuucgugauccggggcgacgaggugcggcagaucgcccccggccagaccggcaacaucgccgacuacaacuacaagcugcccgacgacuucaccggcugcgugaucgccuggaacagcaacaaccuggacagcaaggugggcggcaacuacaacuaccuguaccggcuguuccguaagagcaaccugaagccauucgagcgggacaucagcaccgagaucuaccaggccggcagcacccccugcaacggugugaagggcuuuaacugcuacuucccccugcagagcuacggcuuccagcccaccuacggcgugggcuaccagcccuaccgggugguggugcugagcuucgagcugcugcacgcccccgccaccgugugcggcccuaaaaagagcaccaaccuggugaagaacaagugcgugaacuucaauuucaacggccugaccggcaccggcgugcugaccgagagcaacaagaaguuccugcccuuccagcaguucggccgggauaucgccgacaccaccgacgcagugcgggacccccagacccuggagauccuggacaucaccccaugcagcuucggcggcgugagcgucaucacccccggcacaaacaccagcaaccagguggccgugcuguaccagggagugaacugcaccgaggugcccguggccauccacgccgaccagcugacccccaccuggcggguguacagcaccggcagcaacguguuccagacccgggccggcugccugaucggcgccgagcacgugaacaacuccuacgagugcgacauccccaucggcgcuggcaucugcgccagcuaccagacccagaccaacagcccccggcgggcccggagcguggccagccagagcaucaucgccuacaccaugagcuuaggcgccgagaacagcguggccuacagcaacaacagcaucgcgaucccuaccaacuucaccaucagcgugaccaccgagauacugcccgugagcaugaccaagaccagcguggacuguaccauguacaucugcggcgacagcaccgagugcagcaaccugcugcugcaguacggcagcuucugcacccagcugaaccgggcccugaccggcaucgccguggagcaggacaagaacacccaagagguguucgcccaggugaagcagaucuacaagacucccccaaucaaggacuucggcggcuucaacuucagccagauccugcccgaccccagcaagcccagcaagcggagcuucaucgaggaccugcuguucaacaaggugacccuggccgacgccggcuucaucaagcaguacggcgacugccugggggauaucgccgcucgggaccugaucugcgcccagaaguucaacggccugaccgugcugcccccucugcugaccgacgagaugaucgcccaguacaccagcgcccugcuugccggcaccaucaccagcggcuggaccuucggcgccggcgcagcccugcagauccccuucgccaugcagauggccuaccgguucaacggcaucggcgugacccagaacgugcuguacgagaaccagaagcugaucgccaaccaguucaacagcgccaucggcaagauccaggacagccugagcagcaccgccagcgcccugggcaagcugcaggacguggugaaccagaacgcucaggcccugaacacccuggugaagcagcugagcagcaacuucggcgccaucagcucagugcugaaugacauccugagcaggcuggaucccccagaggccgaggugcagaucgaccggcugaucaccggccggcugcagagccugcagaccuacgugacccagcagcugauccgggccgccgagauccgggccagcgccaaccuggcagccaccaagaugagcgagugcgugcugggccagagcaagcggguggacuuuugcggcaagggcuaccaccugaugagcuucccccagagcgcuccccacggcgugguguuccuccacgugacauacguccccgcccaggagaagaacuucaccaccgcccccgccauuugccacgacggcaaggcccacuucccccgggagggaguguucgugagcaacggcacccacugguucgugacccagcggaacuucuacgagccucagaucaucaccaccgacaacaccuucgugagcggcaacugcgacguggugaucggcaucgugaacaacaccguguacgacccccugcagcccgagcuggacagcuucaaggaggagcuggacaaguacuucaagaaccacaccagcccagacguggaccugggcgacaucagcggcaucaacgccagcguggugaacauccagaaggagaucgaccggcugaacgagguggccaagaaccugaacgagagccugaucgaccugcaggagcugggcaaguacgagcaguacaucaaguggcccugguacaucuggcugggcuucaucgccggccugaucgccaucgugauggugaccaucaugcugugcugcaugaccagcugcuguagcugccugaagggcugcugcagcugcggcagcugcugcaaguucgacgaggacgacagcgagcccgugcugaagggcgugaagcugcacuacaccugaugacucgagcugguacugcaugcacgcaaugcuagcugccccuuucccguccuggguaccccgagucucccccgaccucgggucccagguaugcucccaccuccaccugccccacucaccaccucugcuaguuccagacaccucccaagcacgcagcaaugcagcucaaaacgcuuagccuagccacacccccacgggaaacagcagugauuaaccuuuagcaauaaacgaaaguuuaacuaagcuauacuaaccccaggguuggucaauuucgugccagccacacccuggagcuagcaaaaaaaaaaaaaaaaaaaaaaaaaaaaaaaaaaaaaaaaaaaaaaaaaaaaaaaaaaaaaaaaaaaaaaaaaaaaaaaaaaaaaaaaaaaaaaaaaaaa

SEQ ID NO: 26445 - RNA, 4264 nt, Artificial Sequence
  SARS-CoV-2/Wuhan/WIV05/2019__EPI_ISL_402128 spike protein mRNA gc (1-1273)(K986P_V987P_K986P_V987P_L18F_D80A_D215G_L242del_A243del_ L244del_R246I_K417N_E484K_N501Y_D614G_A701V)
agaauaaacuaguauucuucugguccccacagacucagagagaacccgccaccauguucguguuccuggugcugcugccccuggugagcagccagugcgugaacuucaccacccggacccagcugcccccugccuacaccaacagcuucacccggggcguguacuaccccgacaagguguuccggagcagcgugcugcacagcacccaggaccuguuccugcccuucuucagcaacgugaccugguuccacgccauccacgugagcggcaccaacggcaccaagcgguucgccaacccagugcugcccuucaacgacggcguguacuucgccagcaccgagaagucaaacaucauccggggcuggaucuuuggcaccacccuggacagcaagacacagagccugcugaucgugaacaacgcuaccaacguggugaucaaggugugcgaguuccaguucugcaacgaccccuuccugggcguguacuaccacaagaacaacaagagcuggauggagagcgaguuccgggucuacagcagcgccaacaauugcaccuucgaguacgugagccagcccuuccugauggaccuggagggcaagcagggcaacuucaagaaccuccgggaguucguguucaagaacaucgacggcuacuucaagaucuacagcaagcacacccccaucaaccuggugcggggacugccccagggcuucagcgcccuggagccucugguggaucugcccaucggcaucaacaucaccagguuccagacccugcacaucagcuaccugacccccggcgacagcagcagcggcuggaccgccggcgccgccgcauacuacgugggcuaccugcagccacggaccuuccugcugaaguacaacgagaacggcaccaucaccgacgccguggacugcgcccuggacccccugagcgagaccaagugcacccuuaagagcuucaccguggagaagggcaucuaccagaccagcaacuuccgggugcagcccacugagagcauugugcgguuccccaacaucaccaaccugugucccuucggcgagguguucaacgccacccgguucgccagcguguacgccuggaaccggaagcggaucagcaacugcguggccgacuacagcgugcuguacaacagcgccagcuucagcaccuucaagugcuacggcgugagcccuaccaagcugaacgaccugugcuucaccaacguguacgcugacagcuucgugauccggggcgacgaggugcggcagaucgcccccggccagaccggcaacaucgccgacuacaacuacaagcugcccgacgacuucaccggcugcgugaucgccuggaacagcaacaaccuggacagcaaggugggcggcaacuacaacuaccuguaccggcuauuccguaagagcaaccugaagccauuugagcgggacaucagcaccgagaucuaccaggccgguagcacccccugcaacggcgugaagggcuucaacugcuacuucccccugcagagcuacggcuuccagcccaccuacggcgugggcuaccagcccuaccgggugguggugcugagcuucgagcugcugcacgcccccgccaccgugugcggcccuaaaaagagcaccaaccuggugaagaacaagugcgugaacuucaauuucaacggccugaccggcaccggcgugcugaccgagagcaacaagaaguuccugcccuuccagcaguucggccgggacaucgccgacaccaccgaugcagugcgggacccccagacccuggagauccuggacaucaccccaugcagcuucggcggcgugagcgucaucacccccggaacaaacaccagcaaccagguggccgugcuguaccagggcgugaacugcaccgaggugcccguggccauccacgccgaccagcugacccccaccuggcggguguacagcaccggcagcaacguguuccagacccgggccggcugccugaucggcgccgagcacgugaacaacuccuacgagugcgacauccccaucggcgcuggcaucugcgccagcuaccagacccagaccaacagcccccggcgggcccggagcguggccagccagagcaucaucgccuacaccaugagccugggcguggagaacagcguggccuacagcaacaacagcaucgccaucccuaccaacuucaccauaagcgugaccaccgagauccugcccgugagcaugaccaagaccagcguggacuguaccauguacaucugcggcgacagcaccgagugcagcaaccuguuacugcaguacggcagcuucugcacccagcugaaccgggcgcugaccggcaucgccguggagcaggacaagaacacccaagagguguucgcccaggugaagcagaucuacaagacucccccaaucaaggacuucggcggcuucaacuucagccagauccugcccgaccccagcaagcccagcaagcggagcuucaucgaggaccugcuguucaacaaggugacccuggccgacgccggcuucaucaagcaguacggggacugccugggcgacaucgccgcccgggaccugaucugcgcucagaaguucaacggccugaccgugcugcccccucugcugaccgaugagaugaucgcccaguacaccagcgcccugcuggccggcaccaucaccagcggcuggaccuucggcgccggcgccgcacugcagauccccuucgccaugcagauggccuaccgguucaacggcaucggcgugacccagaacgugcuguacgagaaccagaagcugaucgccaaccaguucaacagcgccaucggcaagauccaggacagccugagcagcaccgccagcgcccugggcaagcugcaggacguggugaaccagaacgcccaggcucugaacacccuggugaagcagcugagcagcaacuuuggcgccaucagcucagugcugaaugacauccugagccggcuggaucccccagaggccgaggugcagaucgacaggcugaucaccggccggcugcagagccugcagaccuacgugacccagcagcugauccgggccgccgagauucgggccagcgccaaccuggccgcaaccaagaugagcgagugcgugcugggccagagcaagcggguggacuucugcggcaagggcuaccaccugaugagcuucccccagagcgcuccccacggcgugguguuccugcacgucacauacgugcccgcccaggagaagaacuucaccaccgcccccgccaucugccacgacggaaaggcccacuucccccgggagggcguguucgugagcaacggcacccacugguucgugacccagcggaacuucuacgagccucagaucaucaccaccgacaacaccuucgugagcggcaacugcgacguggugaucggcaucgugaacaacaccguguacgacccccugcagcccgagcuggacagcuucaaggaggagcucgacaaguacuucaagaaccacaccagcccagacguggaccugggcgacaucagcggcaucaacgccagcguggugaacauccagaaggagaucgaccggcugaacgagguggccaagaaccugaacgagagccugaucgaccugcaggagcugggcaaguacgagcaguacaucaaguggcccugguacaucuggcugggcuucaucgccggccugaucgccaucgugauggugaccaucaugcugugcugcaugaccagcugcuguagcugccugaagggcugcugcagcugcggcagcugcugcaaguucgacgaggacgacagcgagcccgugcugaagggcgugaagcugcacuacaccugaugacucgagcugguacugcaugcacgcaaugcuagcugccccuuucccguccuggguaccccgagucucccccgaccucgggucccagguaugcucccaccuccaccugccccacucaccaccucugcuaguuccagacaccucccaagcacgcagcaaugcagcucaaaacgcuuagccuagccacacccccacgggaaacagcagugauuaaccuuuagcaauaaacgaaaguuuaacuaagcuauacuaaccccaggguuggucaauuucgugccagccacacccuggagcuagcaaaaaaaaaaaaaaaaaaaaaaaaaaaaaaaaaaaaaaaaaaaaaaaaaaaaaaaaaaaaaaaaaaaaaaaaaaaaaaaaaaaaaaaaaaaaaaaaaaaa

SEQ ID NO: 26446 - RNA, 4273 nt, Artificial Sequence
  SARS-CoV-2/Wuhan/WIV05/2019__EPI_ISL_402128 spike protein mRNA gc (1-1273)(K986P_V987P_K986P_V987P_E484K_D614G)
agaauaaacuaguauucuucugguccccacagacucagagagaacccgccaccauguucguguuccuggugcugcugccccuggugagcagccagugcgugaaccugaccacccggacccagcugcccccugccuacaccaacagcuucacccggggcguguacuaccccgacaagguguuccggagcagcgugcugcacagcacccaggaccuguuccugcccuucuucagcaacgugaccugguuccacgccauccacgugagcggcaccaacggcaccaagcgguucgacaacccagugcugcccuucaacgacggcguguacuucgccagcaccgagaagucaaacaucauccggggcuggaucuucggcaccacccuggacagcaagacacagagccugcugaucgugaacaacgccaccaacguggugaucaaggugugcgaguuucaguucugcaacgaccccuuccugggcguguacuaccacaagaacaacaagagcuggauggagagcgaguuccgggucuacagcagcgcuaacaauugcaccuucgaguacgugagccagcccuuccugauggaccucgagggcaagcagggcaacuucaagaaccugcgggaguucguguucaagaacaucgauggcuacuucaagaucuacagcaagcacacccccaucaaccuggugcgggaccugccccagggauucagcgcccuggagccucugguggaccugcccaucggcaucaacaucaccagguuccagacccugcuggcccugcaccggagcuaccugacccccggcgacagcagcagcggcuggaccgccggcgccgccgcauacuacgugggcuaccugcagccacggaccuuccugcugaaguacaacgagaacggcaccaucaccgacgccguggacugcgcccuggacccccugagcgagaccaagugcacccuaaagagcuucaccguggagaagggcaucuaccagaccagcaacuuccgggugcagcccacugagagcaucgugcgguuccccaacauuaccaaccugugucccuucggcgagguguucaacgccacccgguucgccagcguguacgccuggaaccggaagcggaucagcaacugcguggccgacuacagcgugcuguacaacagcgccagcuucagcaccuucaagugcuacggcgugagcccuaccaagcugaacgaccugugcuucaccaacguguacgcugacagcuucgugauccggggcgacgaggugcggcagaucgcccccggccagaccggcaagaucgccgacuacaacuacaagcugcccgacgacuucaccggcugcgugaucgccuggaacagcaacaaccuggacagcaaggugggcggcaacuacaacuaccuguaccggcuguuccguaagagcaaccugaagccauucgagcgggacaucagcaccgagaucuaccaggccggcagcacccccugcaacggugugaagggcuuuaacugcuacuucccccugcagagcuacggcuuccagcccaccaacggcgugggcuaccagcccuaccgggugguggugcugagcuucgagcugcugcacgcccccgccaccgugugcggcccuaaaaagagcaccaaccuggugaagaacaagugcgugaacuucaauuucaacggccugaccggcaccggcgugcugaccgagagcaacaagaaguuccugcccuuccagcaguucggccgggauaucgccgacaccaccgacgcagugcgggacccccagacccuggagauccuggacaucaccccaugcagcuucggcggcgugagcgucaucacccccggcacaaacaccagcaaccagguggccgugcuguaccagggagugaacugcaccgaggugcccguggccauccacgccgaccagcugacccccaccuggcggguguacagcaccggcagcaacguguuccagacccgggccggcugccugaucggcgccgagcacgugaacaacuccuacgagugcgacauccccaucggcgcuggcaucugcgccagcuaccagacccagaccaacagcccccggcgggcccggagcguggccagccagagcaucaucgccuacaccaugagcuuaggcgccgagaacagcguggccuacagcaacaacagcaucgcgaucccuaccaacuucaccaucagcgugaccaccgagauacugcccgugagcaugaccaagaccagcguggacuguaccauguacaucugcggcgacagcaccgagugcagcaaccugcugcugcaguacggcagcuucugcacccagcugaaccgggcccugaccggcaucgccguggagcaggacaagaacacccaagagguguucgcccaggugaagcagaucuacaagacucccccaaucaaggacuucggcggcuucaacuucagccagauccugcccgaccccagcaagcccagcaagcggagcuucaucgaggaccugcuguucaacaaggugacccuggccgacgccggcuucaucaagcaguacggcgacugccugggggauaucgccgcucgggaccugaucugcgcccagaaguucaacggccugaccgugcugcccccucugcugaccgacgagaugaucgcccaguacaccagcgcccugcuugccggcaccaucaccagcggcuggaccuucggcgccggcgcagcccugcagauccccuucgccaugcagauggccuaccgguucaacggcaucggcgugacccagaacgugcuguacgagaaccagaagcugaucgccaaccaguucaacagcgccaucggcaagauccaggacagccugagcagcaccgccagcgcccugggcaagcugcaggacguggugaaccagaacgcucaggcccugaacacccuggugaagcagcugagcagcaacuucggcgccaucagcucagugcugaaugacauccugagcaggcuggaucccccagaggccgaggugcagaucgaccggcugaucaccggccggcugcagagccugcagaccuacgugacccagcagcugauccgggccgccgagauccgggccagcgccaaccuggcagccaccaagaugagcgagugcgugcugggccagagcaagcggguggacuuuugcggcaagggcuaccaccugaugagcuucccccagagcgcuccccacggcgugguguuccuccacgugacauacguccccgcccaggagaagaacuucaccaccgcccccgccauuugccacgacggcaaggcccacuucccccgggagggaguguucgugagcaacggcacccacugguucgugacccagcggaacuucuacgagccucagaucaucaccaccgacaacaccuucgugagcggcaacugcgacguggugaucggcaucgugaacaacaccguguacgacccccugcagcccgagcuggacagcuucaaggaggagcuggacaaguacuucaagaaccacaccagcccagacguggaccugggcgacaucagcggcaucaacgccagcguggugaacauccagaaggagaucgaccggcugaacgagguggccaagaaccugaacgagagccugaucgaccugcaggagcugggcaaguacgagcaguacaucaaguggcccugguacaucuggcugggcuucaucgccggccugaucgccaucgugauggugaccaucaugcugugcugcaugaccagcugcuguagcugccugaagggcugcugcagcugcggcagcugcugcaaguucgacgaggacgacagcgagcccgugcugaagggcgugaagcugcacuacaccugaugacucgagcugguacugcaugcacgcaaugcuagcugccccuuucccguccuggguaccccgagucucccccgaccucgggucccagguaugcucccaccuccaccugccccacucaccaccucugcuaguuccagacaccucccaagcacgcagcaaugcagcucaaaacgcuuagccuagccacacccccacgggaaacagcagugauuaaccuuuagcaauaaacgaaaguuuaacuaagcuauacuaaccccaggguuggucaauuucgugccagccacacccuggagcuagcaaaaaaaaaaaaaaaaaaaaaaaaaaaaaaaaaaaaaaaaaaaaaaaaaaaaaaaaaaaaaaaaaaaaaaaaaaaaaaaaaaaaaaaaaaaaaaaaaaaa

SEQ ID NO: 26447 - RNA, 4273 nt, Artificial Sequence
  SARS-CoV-2/Wuhan/WIV05/2019__EPI_ISL_402128 spike protein mRNA gc (1-1273)(K986P_V987P_K986P_V987P_L18F_T20N_P26S_D138Y_R190S_K417T _E484K_N501Y_D614G_H655Y_T1027I)
agaauaaacuaguauucuucugguccccacagacucagagagaacccgccaccauguucguguuccuggugcugcugccccuggugagcagccagugcgugaacuucaccaaccggacccagcugcccagcgccuacaccaacagcuucacccggggcguguacuacccugacaagguguuccggagcagcgugcugcacagcacccaggaccuguuccugcccuucuucagcaacgugaccugguuccacgccauccacgugagcggcaccaacggcaccaagcgguucgacaaccccgugcugccauucaacgacggcguguacuucgccagcaccgagaagucaaacaucauccggggcuggaucuuuggcaccacccuggacagcaagacccagagccugcugaucgugaacaacgccacaaacguggugaucaaggugugcgaguuccaguucugcaacuaccccuuccugggcguguacuaccacaagaacaacaagagcuggauggagagcgaguuccgggucuacagcagcgcuaauaacugcaccuucgaguacgugagccagcccuuccugauggaccuggagggcaagcagggcaacuucaagaaccucagcgaguucguguucaagaacaucgacggcuacuucaagaucuacagcaagcacacccccaucaaccuggugcgggaucugccccagggauucagcgcccuggagccccugguggaccugccuaucggcaucaacaucacccgguuccagacccugcuggcccugcacaggagcuaccugacccccggcgacagcagcagcggcuggaccgccggcgccgccgcauacuacgugggcuaccugcagccccggaccuuccugcugaaguacaacgagaacggcaccaucaccgacgccguggacugcgcccuggacccacugagcgagaccaagugcacccuaaagagcuucaccguggagaagggcaucuaccagaccagcaacuuccgggugcagcccaccgagagcaucgugcgguuccccaacauuacuaaccugugucccuucggcgagguguucaacgccacccgguucgccagcguguacgccuggaaccggaagcggaucagcaacugcguggccgacuacagcgugcuguacaacagcgccagcuucagcaccuucaagugcuacggcgugagccccaccaagcugaacgaccugugcuucaccaacguguacgcugacagcuucgugauccggggcgacgaggugcggcagaucgccccuggccagaccggcaccaucgccgacuacaacuacaagcugcccgacgacuucaccggcugcgugaucgccuggaacagcaacaaccuggacagcaaggugggcggcaacuacaacuaccuguaccggcuguuccguaagagcaaccugaagcccuuugagcgggacaucagcaccgagaucuaccaggccggcagcaccccaugcaacggugugaagggcuucaacugcuacuucccccugcagagcuacggcuuccagcccaccuacggcgugggcuaccagcccuaccgggugguggugcugagcuucgagcugcugcacgcccccgccaccgugugcggccccaaaaagagcaccaaccuggugaagaacaagugcgugaacuucaauuucaacggccugaccggcaccggcgugcugaccgagagcaacaagaaguuccugccuuuccagcaguucggccgggacaucgccgauaccaccgacgcagugcgggacccccagacccuggagauccuggacaucacccccugcagcuucggcggcgugagcgucaucaccccaggcacaaacaccagcaaccagguggccgugcuguaccagggagugaacugcaccgaggugcccguggccauccacgccgaccagcugacccccaccuggcggguguacuccaccggcagcaacguguuccagacccgggccggcugccugaucggcgccgaguacgugaacaacagcuacgagugcgacauccccaucggcgcuggcaucugcgccagcuaccagacccagaccaacagcccccggcgggcccggagcguggccagccagagcaucaucgccuacaccaugagccugggcgccgagaacagcguggccuacagcaacaacagcaucgcgauccccaccaacuucaccaucagcgugaccaccgagauauuaccugugagcaugaccaagaccagcguggacuguaccauguacaucugcggcgacagcaccgagugcagcaaccugcugcugcaguacggcagcuucugcacccagcugaaccgggcccugaccggcaucgccguggagcaggacaagaacacccaagagguguucgcccaggugaagcagaucuacaagacuccacccaucaaggacuucggcggcuucaacuucagccagauccugcccgaccccagcaagcccagcaagcggagcuucaucgaggaccugcuguucaacaaggugacccuggccgacgccggcuucaucaagcaguacggcgacugccugggggacaucgccgcucgggaucugaucugcgcccagaaguucaacggccugaccgugcugccuccccugcugaccgacgagaugaucgcccaguacaccagcgcccugcuggccggcaccaucaccagcggcuggaccuucggcgccggcgcagcccuucagauccccuucgccaugcagauggccuaccgguucaacggcaucggcgugacccagaacgugcuguacgagaaccagaagcugaucgccaaccaguucaacagcgccaucggcaagauccaggacagccugagcagcaccgccagcgcccugggcaagcugcaggacguggugaaccagaacgcucaggcccugaacacccuggugaagcagcugagcucaaacuuuggcgccaucagcagcgugcugaaugacauccugagccggcuggacccacccgaggccgaggugcagaucgacaggcugaucaccggccggcugcagagccugcagaccuacgugacccagcagcugauccgggccgccgagauccgggccagcgccaaccuggcagccauuaagaugagcgagugcgugcugggccagagcaagcggguggacuucugcggcaagggcuaccaccugaugagcuucccccagagcgcuccccacggcgugguguuccugcacgugaccuacguccccgcccaggagaagaacuucacaaccgcccccgccaucugccacgacggcaaggcccacuucccccgggagggaguguucgugagcaacggcacccacugguucgugacccagcggaacuucuacgagccccagaucaucaccaccgacaacaccuucgugagcggcaacugcgacguggugaucggcaucgugaacaacaccguguacgacccucuccagcccgagcuggacagcuucaaggaggagcuggacaaguacuucaagaaccacaccagccccgacguggaccugggcgauaucagcggcaucaacgccagcguggugaacauccagaaggagaucgaccggcugaacgagguggccaagaaccugaacgagagccugaucgaccugcaggagcugggcaaguacgagcaguacaucaaguggccaugguacaucuggcugggcuucaucgccggccugaucgccaucgugauggugaccaucaugcugugcugcaugaccagcugcuguagcugccugaagggcugcugcagcugcggcagcugcugcaaguucgacgaggacgacagcgagcccgugcugaagggcgugaagcugcacuacaccugaugacucgagcugguacugcaugcacgcaaugcuagcugccccuuucccguccuggguaccccgagucucccccgaccucgggucccagguaugcucccaccuccaccugccccacucaccaccucugcuaguuccagacaccucccaagcacgcagcaaugcagcucaaaacgcuuagccuagccacacccccacgggaaacagcagugauuaaccuuuagcaauaaacgaaaguuuaacuaagcuauacuaaccccaggguuggucaauuucgugccagccacacccuggagcuagcaaaaaaaaaaaaaaaaaaaaaaaaaaaaaaaaaaaaaaaaaaaaaaaaaaaaaaaaaaaaaaaaaaaaaaaaaaaaaaaaaaaaaaaaaaaaaaaaaaaa

SEQ ID NO: 26448 - RNA, 4273 nt, Artificial Sequence
  SARS-CoV-2/Wuhan/WIV05/2019__EPI_ISL_402128 spike protein mRNA gc (1-1273)(K986P_V987P_K986P_V987P_S13I_W152C_L452R_D614G)
agaauaaacuaguauucuucugguccccacagacucagagagaacccgccaccauguucguguuccuggugcugcugccccuggugagcauccagugcgugaaccugaccacccggacccagcugcccccugccuacaccaacagcuucacccggggcguguacuaccccgacaagguguuccggagcagcgugcugcacagcacccaggaccuguuccugcccuucuucagcaacgugaccugguuccacgccauccacgugagcggcaccaacggcaccaagcgguucgacaacccagugcugcccuucaacgacggcguguacuucgccagcaccgagaagucaaacaucauccggggcuggaucuucggcaccacccuggacagcaagacacagagccugcugaucgugaacaacgccaccaacguggugaucaaggugugcgaguuucaguucugcaacgaccccuuccugggcguguacuaccacaagaacaacaagagcugcauggagagcgaguuccgggucuacagcagcgcuaacaauugcaccuucgaguacgugagccagcccuuccugauggaccucgagggcaagcagggcaacuucaagaaccugcgggaguucguguucaagaacaucgauggcuacuucaagaucuacagcaagcacacccccaucaaccuggugcgggaccugccccagggauucagcgcccuggagccucugguggaccugcccaucggcaucaacaucaccagguuccagacccugcuggcccugcaccggagcuaccugacccccggcgacagcagcagcggcuggaccgccggcgccgccgcauacuacgugggcuaccugcagccacggaccuuccugcugaaguacaacgagaacggcaccaucaccgacgccguggacugcgcccuggacccccugagcgagaccaaguguacccuaaagagcuucaccguggagaagggcaucuaccagaccagcaacuuccgggugcagcccacugagagcauugugcgguuccccaacaucaccaaccugugccccuucggcgagguguucaacgccacccgguucgccagcguguacgccuggaaccggaagcggaucagcaacugcguggccgacuacagcgugcuguacaacagcgccagcuucagcaccuucaagugcuacggcgugagcccuaccaagcugaacgaccugugcuucaccaacguguacgcugacagcuucgugauccggggcgacgaggugcggcagaucgcccccggccagaccggcaagaucgccgacuacaacuacaagcugcccgacgacuucaccggcugcgugaucgccuggaacagcaacaaccuggacagcaaggugggcggcaacuacaacuaccgguaccggcuguuccguaagagcaaccugaagccauucgagcgggacaucagcaccgagaucuaccaggccggcagcacccccugcaacgguguggagggcuuuaacugcuacuucccccugcagagcuacggcuuccagcccaccaacggcgugggcuaccagcccuaccgggugguggugcugagcuucgagcugcugcacgcccccgccaccgugugcggcccuaaaaagagcaccaaccuggugaagaacaagugcgugaacuucaauuucaacggccugaccggcaccggcgugcugaccgagagcaacaagaaguuccugcccuuccagcaguucggccgggauaucgccgacaccaccgacgcagugcgggacccccagacccuggagauccuggacaucaccccaugcagcuucggcggcgugagcgucaucacccccggcacaaacaccagcaaccagguggccgugcuguaccagggagugaacugcaccgaggugcccguggccauccacgccgaccagcugacccccaccuggcggguguacagcaccggcagcaacguguuccagacccgggccggcugccugaucggcgccgagcacgugaacaacagcuacgagugcgacauccccaucggcgcuggcaucugugccuccuaccagacccagaccaacagcccccggcgggcccggagcguggccagccagagcaucaucgccuacaccaugagccugggcgccgagaacagcguggccuacagcaacaacagcaucgcgaucccuaccaacuucaccauaagcgugaccaccgagaucuuacccgugagcaugaccaagaccagcguggacugcaccauguacaucugcggcgacagcaccgagugcagcaaccugcugcugcaguacggcagcuucugcacccagcugaaccgggcccugaccggcaucgccguggagcaggacaagaacacccaagagguguucgcccaggugaagcagaucuacaagacucccccaaucaaggacuucggcggcuucaacuucagccagauccugcccgaccccagcaagcccagcaagcggagcuucaucgaggaccugcuguucaacaaggugacccuggccgacgccggcuucaucaagcaguacggcgacugccugggggauaucgccgcucgggaccugaucugcgcccagaaguucaacggccugaccgugcugcccccucugcugaccgacgagaugaucgcccaguacaccagcgcccugcuggccggcaccaucaccagcggcuggaccuucggcgccggcgcagcccuucagauccccuucgccaugcagauggccuacagguucaacggcaucggcgugacccagaacgugcuguacgagaaccagaagcugaucgccaaccaguucaacagcgccaucggcaagauccaggacagccugagcagcaccgccagcgcccugggcaagcugcaggacguggugaaccagaacgcucaggcccugaacacccuggugaagcagcugagcagcaacuucggcgccaucagcagcgugcugaaugacauccugucacggcuggaucccccagaggccgaggugcagaucgaccggcugaucaccggccggcugcagagccugcagaccuacgugacccagcagcugauccgggccgccgagauucgggccagcgccaaccuggcagccaccaagaugagcgagugcgugcugggccagagcaagcggguggacuuuugcggcaagggcuaccaccugaugagcuucccccagagcgcuccccacggcgugguguuccugcacgugacauacguccccgcccaggagaagaacuucaccaccgcccccgccaucugccacgacggcaaggcccacuucccccgggagggaguguucgugagcaacggcacccacugguucgugacccagcggaacuucuacgagccucagaucaucaccaccgacaacaccuucgugagcggcaacugcgacguggugaucggcaucgugaacaacaccguguacgacccccuccagcccgagcuggacagcuucaaggaggagcuggacaaguacuucaagaaccacaccagcccagacguggaccugggcgacaucagcggcaucaacgccagcguggugaacauccagaaggagaucgaccggcugaacgagguggccaagaaccugaacgagagccugaucgaccugcaggagcugggcaaguacgagcaguacaucaaguggcccugguacaucuggcugggcuucaucgccggccugaucgccaucgugauggugaccaucaugcugugcugcaugaccagcuguugcagcugccugaagggcugcugcagcugcggcagcugcugcaaguucgacgaggacgacagcgagcccgugcugaagggcgugaagcugcacuacaccugaugacucgagcugguacugcaugcacgcaaugcuagcugccccuuucccguccuggguaccccgagucucccccgaccucgggucccagguaugcucccaccuccaccugccccacucaccaccucugcuaguuccagacaccucccaagcacgcagcaaugcagcucaaaacgcuuagccuagccacacccccacgggaaacagcagugauuaaccuuuagcaauaaacgaaaguuuaacuaagcuauacuaaccccaggguuggucaauuucgugccagccacacccuggagcuagcaaaaaaaaaaaaaaaaaaaaaaaaaaaaaaaaaaaaaaaaaaaaaaaaaaaaaaaaaaaaaaaaaaaaaaaaaaaaaaaaaaaaaaaaaaaaaaaaaaaa

SEQ ID NO: 26449 - RNA, 4273 nt, Artificial Sequence
  SARS-CoV-2/Wuhan/WIV05/2019__EPI_ISL_402128 spike protein mRNA gc mod (1-1273)(K986P_V987P)
agaauaaacuaguauucuucugguccccacagacucagagagaacccgccaccauguucguguuucuggugcugcugccccugguguccagccagugugugaaccugaccaccagaacacagcugccuccagccuacaccaacagcuucaccagaggcguguacuaccccgacaagguguucagauccagcgugcugcacucuacccaggaccuguuccugccuuucuucagcaacgugaccugguuccacgccauccacguguccggcaccaauggcaccaagagauucgacaaccccgugcugcccuucaacgacgggguguacuuugccagcaccgagaaguccaacaucaucagaggcuggaucuucggcaccacacuggacagcaagacccagagccugcugaucgugaacaacgccaccaacguggucaucaaagugugcgaguuccaguucugcaacgaccccuuccugggcgucuacuaccacaagaacaacaagagcuggauggaaagcgaguuccggguguacagcagcgccaacaacugcaccuucgaguacgugucccagccuuuccugauggaccuggaaggcaagcagggcaacuucaagaaccugcgcgaguucguguucaagaacaucgacggcuacuucaaaaucuacagcaagcacaccccuaucaaccucgugcgggaucugccucagggcuucucugcucuggaaccccugguggaucugcccaucggcaucaacaucacccgguuucagacacugcuggcccugcacagaagcuaccugacaccuggcgauagcagcagcggauggacagcuggugccgccgcuuacuaugugggcuaccugcagccuagaaccuuccugcugaaguacaacgagaacggcaccaucaccgacgccguggauugugcucuggauccucugagcgagacaaagugcacccugaaguccuucaccguggaaaagggcaucuaccagaccagcaacuuccgggugcagcccaccgaauccaucgugcgguuccccaauaucaccaaucugugccccuucggcgagguguucaaugccaccagauucgccucuguguacgccuggaaccggaagcggaucagcaauugcguggccgacuacuccgugcuguacaacuccgccagcuucagcaccuucaagugcuacggcguguccccuaccaagcugaacgaccugugcuucacaaacguguacgccgacagcuucgugauccggggagaugaagugcggcagauugccccuggacagacaggcaagaucgccgacuacaacuacaagcugcccgacgacuucaccggcugugugauugccuggaacagcaacaaccuggacuccaaagucggcggcaacuacaauuaccuguaccggcuguuccggaaguccaaucugaagcccuucgagcgggacaucagcaccgaaaucuaucaggccggcagcaccccuugcaacggcguggaaggcuucaacugcuacuucccacugcaguccuacggcuuucagcccacaaauggcgugggcuaucagcccuacagagugguggugcugagcuucgaacugcugcaugcuccugccacagugugcggcccuaagaaaagcaccaaucucgugaagaacaaaugcgugaacuucaacuucaacggccugaccggcaccggcgugcugacagagagcaacaagaaguuccugccauuccagcaguuuggccgggauaucgccgauaccacagacgccguuagagauccccagacacuggaaauccuggacaucaccccaugcagcuucggcggagugucugugaucaccccuggcaccaacaccagcaaucagguggcagugcuguaccaggacgugaacuguaccgaagugcccguggccauucacgccgaucagcugacaccuacauggcggguguacuccaccggcagcaauguguuucagaccagagccggcugucugaucggagccgagcacgugaacaauagcuacgagugcgacauccccaucggcgcuggcaucugugccagcuaccagacacagacaaacagccccagacgggcuagaagcguggccagccagagcaucauugccuacacaaugucucugggcgccgagaacagcguggccuacuccaacaacucuaucgcuauccccaccaacuucaccaucagcgugaccaccgagauccugccuguguccaugaccaagaccagcguggacugcaccauguacaucugcggcgauuccaccgagugcuccaaccugcugcugcaguacggcagcuucugcacccagcugaauagagcccugacagggaucgccguggaacaggacaagaacacccaagagguguucgcccaagugaagcaaaucuacaagaccccuccuaucaaggacuucggcggcuucaauuucagccagauucugcccgauccuagcaagcccagcaagcggagcuucaucgaggaccugcuguucaacaaagugacacuggccgacgccggcuucaucaagcaguauggcgauugucugggcgacauugccgccagggaucugauuugcgcccagaaguuuaacggacugacagugcugccuccucugcugaccgaugagaugaucgcccaguacacaucugcccugcuggccggcacaaucacaagcggcuggacauuuggagcuggcgccgcucugcagauccccuuugcuaugcagauggccuaccgguucaacggcaucggagugacccagaaugugcuguacgagaaccagaagcugaucgccaaccaguucaacagcgccaucggcaagauccaggacagccugagcagcacagcaagcgcccugggaaagcugcaggacguggucaaccagaaugcccaggcacugaacacccuggucaagcagcuguccuccaacuucggcgccaucagcucugugcugaacgauauccugagcagacuggacccuccugaggccgaggugcagaucgacagacugaucacaggcagacugcagagccuccagacauacgugacccagcagcugaucagagccgccgagauuagagccucugccaaucuggccgccaccaagaugucugagugugugcugggccagagcaagagaguggacuuuugcggcaagggcuaccaccugaugagcuucccucagucugccccucacggcgugguguuucugcacgugacauaugugcccgcucaagagaagaauuucaccaccgcuccagccaucugccacgacggcaaagcccacuuuccuagagaaggcguguucguguccaacggcacccauugguucgugacacagcggaacuucuacgagccccagaucaucaccaccgacaacaccuucgugucuggcaacugcgacguugugaucggcauugugaacaauaccguguacgacccucugcagcccgagcuggacagcuucaaagaggaacuggacaaguacuuuaagaaccacacaagccccgacguggaccugggcgauaucagcggaaucaaugccagcgucgugaacauccagaaagagaucgaccggcugaacgagguggccaagaaucugaacgagagccugaucgaccugcaagaacuggggaaguacgagcaguacaucaaguggcccugguacaucuggcugggcuuuaucgccggacugauugccaucgugauggucacaaucaugcuguguugcaugaccagcugcuguagcugccugaagggcuguuguagcuguggcagcugcugcaaguucgacgaggacgauucugagcccgugcugaagggcgugaaacugcacuacaccugaugacucgagcugguacugcaugcacgcaaugcuagcugccccuuucccguccuggguaccccgagucucccccgaccucgggucccagguaugcucccaccuccaccugccccacucaccaccucugcuaguuccagacaccucccaagcacgcagcaaugcagcucaaaacgcuuagccuagccacacccccacgggaaacagcagugauuaaccuuuagcaauaaacgaaaguuuaacuaagcuauacuaaccccaggguuggucaauuucgugccagccacacccuggagcuagcaaaaaaaaaaaaaaaaaaaaaaaaaaaaaaaaaaaaaaaaaaaaaaaaaaaaaaaaaaaaaaaaaaaaaaaaaaaaaaaaaaaaaaaaaaaaaaaaaaaa

SEQ ID NO: 26450 - RNA, 4273 nt, Artificial Sequence
  SARS-CoV-2/Wuhan/WIV05/2019__EPI_ISL_402128 spike protein mRNA gc mod (1-1273)(K986P_V987P_ D614G)
agaauaaacuaguauucuucugguccccacagacucagagagaacccgccaccauguucguguuucuggugcugcugccccugguguccagccagugugugaaccugaccaccagaacacagcugccuccagccuacaccaacagcuucaccagaggcguguacuaccccgacaagguguucagauccagcgugcugcacucuacccaggaccuguuccugccuuucuucagcaacgugaccugguuccacgccauccacguguccggcaccaauggcaccaagagauucgacaaccccgugcugcccuucaacgacgggguguacuuugccagcaccgagaaguccaacaucaucagaggcuggaucuucggcaccacacuggacagcaagacccagagccugcugaucgugaacaacgccaccaacguggucaucaaagugugcgaguuccaguucugcaacgaccccuuccugggcgucuacuaccacaagaacaacaagagcuggauggaaagcgaguuccggguguacagcagcgccaacaacugcaccuucgaguacgugucccagccuuuccugauggaccuggaaggcaagcagggcaacuucaagaaccugcgcgaguucguguucaagaacaucgacggcuacuucaaaaucuacagcaagcacaccccuaucaaccucgugcgggaucugccucagggcuucucugcucuggaaccccugguggaucugcccaucggcaucaacaucacccgguuucagacacugcuggcccugcacagaagcuaccugacaccuggcgauagcagcagcggauggacagcuggugccgccgcuuacuaugugggcuaccugcagccuagaaccuuccugcugaaguacaacgagaacggcaccaucaccgacgccguggauugugcucuggauccucugagcgagacaaagugcacccugaaguccuucaccguggaaaagggcaucuaccagaccagcaacuuccgggugcagcccaccgaauccaucgugcgguuccccaauaucaccaaucugugccccuucggcgagguguucaaugccaccagauucgccucuguguacgccuggaaccggaagcggaucagcaauugcguggccgacuacuccgugcuguacaacuccgccagcuucagcaccuucaagugcuacggcguguccccuaccaagcugaacgaccugugcuucacaaacguguacgccgacagcuucgugauccggggagaugaagugcggcagauugccccuggacagacaggcaagaucgccgacuacaacuacaagcugcccgacgacuucaccggcugugugauugccuggaacagcaacaaccuggacuccaaagucggcggcaacuacaauuaccuguaccggcuguuccggaaguccaaucugaagcccuucgagcgggacaucagcaccgaaaucuaucaggccggcagcaccccuugcaacggcguggaaggcuucaacugcuacuucccacugcaguccuacggcuuucagcccacaaauggcgugggcuaucagcccuacagagugguggugcugagcuucgaacugcugcaugcuccugccacagugugcggcccuaagaaaagcaccaaucucgugaagaacaaaugcgugaacuucaacuucaacggccugaccggcaccggcgugcugacagagagcaacaagaaguuccugccauuccagcaguuuggccgggauaucgccgauaccacagacgccguuagagauccccagacacuggaaauccuggacaucaccccaugcagcuucggcggagugucugugaucaccccuggcaccaacaccagcaaucagguggcagugcuguaccagggcgugaacuguaccgaagugcccguggccauucacgccgaucagcugacaccuacauggcggguguacuccaccggcagcaauguguuucagaccagagccggcugucugaucggagccgagcacgugaacaauagcuacgagugcgacauccccaucggcgcuggcaucugugccagcuaccagacacagacaaacagccccagacgggcuagaagcguggccagccagagcaucauugccuacacaaugucucugggcgccgagaacagcguggccuacuccaacaacucuaucgcuauccccaccaacuucaccaucagcgugaccaccgagauccugccuguguccaugaccaagaccagcguggacugcaccauguacaucugcggcgauuccaccgagugcuccaaccugcugcugcaguacggcagcuucugcacccagcugaauagagcccugacagggaucgccguggaacaggacaagaacacccaagagguguucgcccaagugaagcaaaucuacaagaccccuccuaucaaggacuucggcggcuucaauuucagccagauucugcccgauccuagcaagcccagcaagcggagcuucaucgaggaccugcuguucaacaaagugacacuggccgacgccggcuucaucaagcaguauggcgauugucugggcgacauugccgccagggaucugauuugcgcccagaaguuuaacggacugacagugcugccuccucugcugaccgaugagaugaucgcccaguacacaucugcccugcuggccggcacaaucacaagcggcuggacauuuggagcuggcgccgcucugcagauccccuuugcuaugcagauggccuaccgguucaacggcaucggagugacccagaaugugcuguacgagaaccagaagcugaucgccaaccaguucaacagcgccaucggcaagauccaggacagccugagcagcacagcaagcgcccugggaaagcugcaggacguggucaaccagaaugcccaggcacugaacacccuggucaagcagcuguccuccaacuucggcgccaucagcucugugcugaacgauauccugagcagacuggacccuccugaggccgaggugcagaucgacagacugaucacaggcagacugcagagccuccagacauacgugacccagcagcugaucagagccgccgagauuagagccucugccaaucuggccgccaccaagaugucugagugugugcugggccagagcaagagaguggacuuuugcggcaagggcuaccaccugaugagcuucccucagucugccccucacggcgugguguuucugcacgugacauaugugcccgcucaagagaagaauuucaccaccgcuccagccaucugccacgacggcaaagcccacuuuccuagagaaggcguguucguguccaacggcacccauugguucgugacacagcggaacuucuacgagccccagaucaucaccaccgacaacaccuucgugucuggcaacugcgacguugugaucggcauugugaacaauaccguguacgacccucugcagcccgagcuggacagcuucaaagaggaacuggacaaguacuuuaagaaccacacaagccccgacguggaccugggcgauaucagcggaaucaaugccagcgucgugaacauccagaaagagaucgaccggcugaacgagguggccaagaaucugaacgagagccugaucgaccugcaagaacuggggaaguacgagcaguacaucaaguggcccugguacaucuggcugggcuuuaucgccggacugauugccaucgugauggucacaaucaugcuguguugcaugaccagcugcuguagcugccugaagggcuguuguagcuguggcagcugcugcaaguucgacgaggacgauucugagcccgugcugaagggcgugaaacugcacuacaccugaugacucgagcugguacugcaugcacgcaaugcuagcugccccuuucccguccuggguaccccgagucucccccgaccucgggucccagguaugcucccaccuccaccugccccacucaccaccucugcuaguuccagacaccucccaagcacgcagcaaugcagcucaaaacgcuuagccuagccacacccccacgggaaacagcagugauuaaccuuuagcaauaaacgaaaguuuaacuaagcuauacuaaccccaggguuggucaauuucgugccagccacacccuggagcuagcaaaaaaaaaaaaaaaaaaaaaaaaaaaaaaaaaaaaaaaaaaaaaaaaaaaaaaaaaaaaaaaaaaaaaaaaaaaaaaaaaaaaaaaaaaaaaaaaaaaa

SEQ ID NO: 26451 - RNA, 4273 nt, Artificial Sequence
  SARS-CoV-2/Wuhan/WIV05/2019__EPI_ISL_402128 spike protein mRNA gc mod (1-1273)(K986P_V987P_A222V_D614G)
agaauaaacuaguauucuucugguccccacagacucagagagaacccgccaccauguucguguuucuggugcugcugccccugguguccagccagugugugaaccugaccaccagaacacagcugccuccagccuacaccaacagcuucaccagaggcguguacuaccccgacaagguguucagauccagcgugcugcacucuacccaggaccuguuccugccuuucuucagcaacgugaccugguuccacgccauccacguguccggcaccaauggcaccaagagauucgacaaccccgugcugcccuucaacgacgggguguacuuugccagcaccgagaaguccaacaucaucagaggcuggaucuucggcaccacacuggacagcaagacccagagccugcugaucgugaacaacgccaccaacguggucaucaaagugugcgaguuccaguucugcaacgaccccuuccugggcgucuacuaccacaagaacaacaagagcuggauggaaagcgaguuccggguguacagcagcgccaacaacugcaccuucgaguacgugucccagccuuuccugauggaccuggaaggcaagcagggcaacuucaagaaccugcgcgaguucguguucaagaacaucgacggcuacuucaaaaucuacagcaagcacaccccuaucaaccucgugcgggaucugccucagggcuucucugugcuggaaccccugguggaucugcccaucggcaucaacaucacccgguuucagacacugcuggcccugcacagaagcuaccugacaccuggcgauagcagcagcggauggacagcuggugccgccgcuuacuaugugggcuaccugcagccuagaaccuuccugcugaaguacaacgagaacggcaccaucaccgacgccguggauugugcucuggauccucugagcgagacaaagugcacccugaaguccuucaccguggaaaagggcaucuaccagaccagcaacuuccgggugcagcccaccgaauccaucgugcgguuccccaauaucaccaaucugugccccuucggcgagguguucaaugccaccagauucgccucuguguacgccuggaaccggaagcggaucagcaauugcguggccgacuacuccgugcuguacaacuccgccagcuucagcaccuucaagugcuacggcguguccccuaccaagcugaacgaccugugcuucacaaacguguacgccgacagcuucgugauccggggagaugaagugcggcagauugccccuggacagacaggcaagaucgccgacuacaacuacaagcugcccgacgacuucaccggcugugugauugccuggaacagcaacaaccuggacuccaaagucggcggcaacuacaauuaccuguaccggcuguuccggaaguccaaucugaagcccuucgagcgggacaucagcaccgaaaucuaucaggccggcagcaccccuugcaacggcguggaaggcuucaacugcuacuucccacugcaguccuacggcuuucagcccacaaauggcgugggcuaucagcccuacagagugguggugcugagcuucgaacugcugcaugcuccugccacagugugcggcccuaagaaaagcaccaaucucgugaagaacaaaugcgugaacuucaacuucaacggccugaccggcaccggcgugcugacagagagcaacaagaaguuccugccauuccagcaguuuggccgggauaucgccgauaccacagacgccguuagagauccccagacacuggaaauccuggacaucaccccaugcagcuucggcggagugucugugaucaccccuggcaccaacaccagcaaucagguggcagugcuguaccagggcgugaacuguaccgaagugcccguggccauucacgccgaucagcugacaccuacauggcggguguacuccaccggcagcaauguguuucagaccagagccggcugucugaucggagccgagcacgugaacaauagcuacgagugcgacauccccaucggcgcuggcaucugugccagcuaccagacacagacaaacagccccagacgggcuagaagcguggccagccagagcaucauugccuacacaaugucucugggcgccgagaacagcguggccuacuccaacaacucuaucgcuauccccaccaacuucaccaucagcgugaccaccgagauccugccuguguccaugaccaagaccagcguggacugcaccauguacaucugcggcgauuccaccgagugcuccaaccugcugcugcaguacggcagcuucugcacccagcugaauagagcccugacagggaucgccguggaacaggacaagaacacccaagagguguucgcccaagugaagcaaaucuacaagaccccuccuaucaaggacuucggcggcuucaauuucagccagauucugcccgauccuagcaagcccagcaagcggagcuucaucgaggaccugcuguucaacaaagugacacuggccgacgccggcuucaucaagcaguauggcgauugucugggcgacauugccgccagggaucugauuugcgcccagaaguuuaacggacugacagugcugccuccucugcugaccgaugagaugaucgcccaguacacaucugcccugcuggccggcacaaucacaagcggcuggacauuuggagcuggcgccgcucugcagauccccuuugcuaugcagauggccuaccgguucaacggcaucggagugacccagaaugugcuguacgagaaccagaagcugaucgccaaccaguucaacagcgccaucggcaagauccaggacagccugagcagcacagcaagcgcccugggaaagcugcaggacguggucaaccagaaugcccaggcacugaacacccuggucaagcagcuguccuccaacuucggcgccaucagcucugugcugaacgauauccugagcagacuggacccuccugaggccgaggugcagaucgacagacugaucacaggcagacugcagagccuccagacauacgugacccagcagcugaucagagccgccgagauuagagccucugccaaucuggccgccaccaagaugucugagugugugcugggccagagcaagagaguggacuuuugcggcaagggcuaccaccugaugagcuucccucagucugccccucacggcgugguguuucugcacgugacauaugugcccgcucaagagaagaauuucaccaccgcuccagccaucugccacgacggcaaagcccacuuuccuagagaaggcguguucguguccaacggcacccauugguucgugacacagcggaacuucuacgagccccagaucaucaccaccgacaacaccuucgugucuggcaacugcgacguugugaucggcauugugaacaauaccguguacgacccucugcagcccgagcuggacagcuucaaagaggaacuggacaaguacuuuaagaaccacacaagccccgacguggaccugggcgauaucagcggaaucaaugccagcgucgugaacauccagaaagagaucgaccggcugaacgagguggccaagaaucugaacgagagccugaucgaccugcaagaacuggggaaguacgagcaguacaucaaguggcccugguacaucuggcugggcuuuaucgccggacugauugccaucgugauggucacaaucaugcuguguugcaugaccagcugcuguagcugccugaagggcuguuguagcuguggcagcugcugcaaguucgacgaggacgauucugagcccgugcugaagggcgugaaacugcacuacaccugaugacucgagcugguacugcaugcacgcaaugcuagcugccccuuucccguccuggguaccccgagucucccccgaccucgggucccagguaugcucccaccuccaccugccccacucaccaccucugcuaguuccagacaccucccaagcacgcagcaaugcagcucaaaacgcuuagccuagccacacccccacgggaaacagcagugauuaaccuuuagcaauaaacgaaaguuuaacuaagcuauacuaaccccaggguuggucaauuucgugccagccacacccuggagcuagcaaaaaaaaaaaaaaaaaaaaaaaaaaaaaaaaaaaaaaaaaaaaaaaaaaaaaaaaaaaaaaaaaaaaaaaaaaaaaaaaaaaaaaaaaaaaaaaaaaaa

SEQ ID NO: 26452 - RNA, 4273 nt, Artificial Sequence
  SARS-CoV-2/Wuhan/WIV05/2019__EPI_ISL_402128 spike protein mRNA gc mod (1-1273)(K986P_V987P_N439K_D614G)
agaauaaacuaguauucuucugguccccacagacucagagagaacccgccaccauguucguguuucuggugcugcugccccugguguccagccagugugugaaccugaccaccagaacacagcugccuccagccuacaccaacagcuucaccagaggcguguacuaccccgacaagguguucagauccagcgugcugcacucuacccaggaccuguuccugccuuucuucagcaacgugaccugguuccacgccauccacguguccggcaccaauggcaccaagagauucgacaaccccgugcugcccuucaacgacgggguguacuuugccagcaccgagaaguccaacaucaucagaggcuggaucuucggcaccacacuggacagcaagacccagagccugcugaucgugaacaacgccaccaacguggucaucaaagugugcgaguuccaguucugcaacgaccccuuccugggcgucuacuaccacaagaacaacaagagcuggauggaaagcgaguuccggguguacagcagcgccaacaacugcaccuucgaguacgugucccagccuuuccugauggaccuggaaggcaagcagggcaacuucaagaaccugcgcgaguucguguucaagaacaucgacggcuacuucaaaaucuacagcaagcacaccccuaucaaccucgugcgggaucugccucagggcuucucugcucuggaaccccugguggaucugcccaucggcaucaacaucacccgguuucagacacugcuggcccugcacagaagcuaccugacaccuggcgauagcagcagcggauggacagcuggugccgccgcuuacuaugugggcuaccugcagccuagaaccuuccugcugaaguacaacgagaacggcaccaucaccgacgccguggauugugcucuggauccucugagcgagacaaagugcacccugaaguccuucaccguggaaaagggcaucuaccagaccagcaacuuccgggugcagcccaccgaauccaucgugcgguuccccaauaucaccaaucugugccccuucggcgagguguucaaugccaccagauucgccucuguguacgccuggaaccggaagcggaucagcaauugcguggccgacuacuccgugcuguacaacuccgccagcuucagcaccuucaagugcuacggcguguccccuaccaagcugaacgaccugugcuucacaaacguguacgccgacagcuucgugauccggggagaugaagugcggcagauugccccuggacagacaggcaagaucgccgacuacaacuacaagcugcccgacgacuucaccggcugugugauugccuggaacagcaagaaccuggacuccaaagucggcggcaacuacaauuaccuguaccggcuguuccggaaguccaaucugaagcccuucgagcgggacaucagcaccgaaaucuaucaggccggcagcaccccuugcaacggcguggaaggcuucaacugcuacuucccacugcaguccuacggcuuucagcccacaaauggcgugggcuaucagcccuacagagugguggugcugagcuucgaacugcugcaugcuccugccacagugugcggcccuaagaaaagcaccaaucucgugaagaacaaaugcgugaacuucaacuucaacggccugaccggcaccggcgugcugacagagagcaacaagaaguuccugccauuccagcaguuuggccgggauaucgccgauaccacagacgccguuagagauccccagacacuggaaauccuggacaucaccccaugcagcuucggcggagugucugugaucaccccuggcaccaacaccagcaaucagguggcagugcuguaccagggcgugaacuguaccgaagugcccguggccauucacgccgaucagcugacaccuacauggcggguguacuccaccggcagcaauguguuucagaccagagccggcugucugaucggagccgagcacgugaacaauagcuacgagugcgacauccccaucggcgcuggcaucugugccagcuaccagacacagacaaacagccccagacgggcuagaagcguggccagccagagcaucauugccuacacaaugucucugggcgccgagaacagcguggccuacuccaacaacucuaucgcuauccccaccaacuucaccaucagcgugaccaccgagauccugccuguguccaugaccaagaccagcguggacugcaccauguacaucugcggcgauuccaccgagugcuccaaccugcugcugcaguacggcagcuucugcacccagcugaauagagcccugacagggaucgccguggaacaggacaagaacacccaagagguguucgcccaagugaagcaaaucuacaagaccccuccuaucaaggacuucggcggcuucaauuucagccagauucugcccgauccuagcaagcccagcaagcggagcuucaucgaggaccugcuguucaacaaagugacacuggccgacgccggcuucaucaagcaguauggcgauugucugggcgacauugccgccagggaucugauuugcgcccagaaguuuaacggacugacagugcugccuccucugcugaccgaugagaugaucgcccaguacacaucugcccugcuggccggcacaaucacaagcggcuggacauuuggagcuggcgccgcucugcagauccccuuugcuaugcagauggccuaccgguucaacggcaucggagugacccagaaugugcuguacgagaaccagaagcugaucgccaaccaguucaacagcgccaucggcaagauccaggacagccugagcagcacagcaagcgcccugggaaagcugcaggacguggucaaccagaaugcccaggcacugaacacccuggucaagcagcuguccuccaacuucggcgccaucagcucugugcugaacgauauccugagcagacuggacccuccugaggccgaggugcagaucgacagacugaucacaggcagacugcagagccuccagacauacgugacccagcagcugaucagagccgccgagauuagagccucugccaaucuggccgccaccaagaugucugagugugugcugggccagagcaagagaguggacuuuugcggcaagggcuaccaccugaugagcuucccucagucugccccucacggcgugguguuucugcacgugacauaugugcccgcucaagagaagaauuucaccaccgcuccagccaucugccacgacggcaaagcccacuuuccuagagaaggcguguucguguccaacggcacccauugguucgugacacagcggaacuucuacgagccccagaucaucaccaccgacaacaccuucgugucuggcaacugcgacguugugaucggcauugugaacaauaccguguacgacccucugcagcccgagcuggacagcuucaaagaggaacuggacaaguacuuuaagaaccacacaagccccgacguggaccugggcgauaucagcggaaucaaugccagcgucgugaacauccagaaagagaucgaccggcugaacgagguggccaagaaucugaacgagagccugaucgaccugcaagaacuggggaaguacgagcaguacaucaaguggcccugguacaucuggcugggcuuuaucgccggacugauugccaucgugauggucacaaucaugcuguguugcaugaccagcugcuguagcugccugaagggcuguuguagcuguggcagcugcugcaaguucgacgaggacgauucugagcccgugcugaagggcgugaaacugcacuacaccugaugacucgagcugguacugcaugcacgcaaugcuagcugccccuuucccguccuggguaccccgagucucccccgaccucgggucccagguaugcucccaccuccaccugccccacucaccaccucugcuaguuccagacaccucccaagcacgcagcaaugcagcucaaaacgcuuagccuagccacacccccacgggaaacagcagugauuaaccuuuagcaauaaacgaaaguuuaacuaagcuauacuaaccccaggguuggucaauuucgugccagccacacccuggagcuagcaaaaaaaaaaaaaaaaaaaaaaaaaaaaaaaaaaaaaaaaaaaaaaaaaaaaaaaaaaaaaaaaaaaaaaaaaaaaaaaaaaaaaaaaaaaaaaaaaaaa

SEQ ID NO: 26453 - RNA, 4273 nt, Artificial Sequence
  SARS-CoV-2/Wuhan/WIV05/2019__EPI_ISL_402128 spike protein mRNA gc mod (1-1273)(K986P_V987P_S477N_D614G)
agaauaaacuaguauucuucugguccccacagacucagagagaacccgccaccauguucguguuucuggugcugcugccccugguguccagccagugugugaaccugaccaccagaacacagcugccuccagccuacaccaacagcuucaccagaggcguguacuaccccgacaagguguucagauccagcgugcugcacucuacccaggaccuguuccugccuuucuucagcaacgugaccugguuccacgccauccacguguccggcaccaauggcaccaagagauucgacaaccccgugcugcccuucaacgacgggguguacuuugccagcaccgagaaguccaacaucaucagaggcuggaucuucggcaccacacuggacagcaagacccagagccugcugaucgugaacaacgccaccaacguggucaucaaagugugcgaguuccaguucugcaacgaccccuuccugggcgucuacuaccacaagaacaacaagagcuggauggaaagcgaguuccggguguacagcagcgccaacaacugcaccuucgaguacgugucccagccuuuccugauggaccuggaaggcaagcagggcaacuucaagaaccugcgcgaguucguguucaagaacaucgacggcuacuucaaaaucuacagcaagcacaccccuaucaaccucgugcgggaucugccucagggcuucucugcucuggaaccccugguggaucugcccaucggcaucaacaucacccgguuucagacacugcuggcccugcacagaagcuaccugacaccuggcgauagcagcagcggauggacagcuggugccgccgcuuacuaugugggcuaccugcagccuagaaccuuccugcugaaguacaacgagaacggcaccaucaccgacgccguggauugugcucuggauccucugagcgagacaaagugcacccugaaguccuucaccguggaaaagggcaucuaccagaccagcaacuuccgggugcagcccaccgaauccaucgugcgguuccccaauaucaccaaucugugccccuucggcgagguguucaaugccaccagauucgccucuguguacgccuggaaccggaagcggaucagcaauugcguggccgacuacuccgugcuguacaacuccgccagcuucagcaccuucaagugcuacggcguguccccuaccaagcugaacgaccugugcuucacaaacguguacgccgacagcuucgugauccggggagaugaagugcggcagauugccccuggacagacaggcaagaucgccgacuacaacuacaagcugcccgacgacuucaccggcugugugauugccuggaacagcaacaaccuggacuccaaagucggcggcaacuacaauuaccuguaccggcuguuccggaaguccaaucugaagcccuucgagcgggacaucagcaccgaaaucuaucaggccggcaacaccccuugcaacggcguggaaggcuucaacugcuacuucccacugcaguccuacggcuuucagcccacaaauggcgugggcuaucagcccuacagagugguggugcugagcuucgaacugcugcaugcuccugccacagugugcggcccuaagaaaagcaccaaucucgugaagaacaaaugcgugaacuucaacuucaacggccugaccggcaccggcgugcugacagagagcaacaagaaguuccugccauuccagcaguuuggccgggauaucgccgauaccacagacgccguuagagauccccagacacuggaaauccuggacaucaccccaugcagcuucggcggagugucugugaucaccccuggcaccaacaccagcaaucagguggcagugcuguaccagggcgugaacuguaccgaagugcccguggccauucacgccgaucagcugacaccuacauggcggguguacuccaccggcagcaauguguuucagaccagagccggcugucugaucggagccgagcacgugaacaauagcuacgagugcgacauccccaucggcgcuggcaucugugccagcuaccagacacagacaaacagccccagacgggcuagaagcguggccagccagagcaucauugccuacacaaugucucugggcgccgagaacagcguggccuacuccaacaacucuaucgcuauccccaccaacuucaccaucagcgugaccaccgagauccugccuguguccaugaccaagaccagcguggacugcaccauguacaucugcggcgauuccaccgagugcuccaaccugcugcugcaguacggcagcuucugcacccagcugaauagagcccugacagggaucgccguggaacaggacaagaacacccaagagguguucgcccaagugaagcaaaucuacaagaccccuccuaucaaggacuucggcggcuucaauuucagccagauucugcccgauccuagcaagcccagcaagcggagcuucaucgaggaccugcuguucaacaaagugacacuggccgacgccggcuucaucaagcaguauggcgauugucugggcgacauugccgccagggaucugauuugcgcccagaaguuuaacggacugacagugcugccuccucugcugaccgaugagaugaucgcccaguacacaucugcccugcuggccggcacaaucacaagcggcuggacauuuggagcuggcgccgcucugcagauccccuuugcuaugcagauggccuaccgguucaacggcaucggagugacccagaaugugcuguacgagaaccagaagcugaucgccaaccaguucaacagcgccaucggcaagauccaggacagccugagcagcacagcaagcgcccugggaaagcugcaggacguggucaaccagaaugcccaggcacugaacacccuggucaagcagcuguccuccaacuucggcgccaucagcucugugcugaacgauauccugagcagacuggacccuccugaggccgaggugcagaucgacagacugaucacaggcagacugcagagccuccagacauacgugacccagcagcugaucagagccgccgagauuagagccucugccaaucuggccgccaccaagaugucugagugugugcugggccagagcaagagaguggacuuuugcggcaagggcuaccaccugaugagcuucccucagucugccccucacggcgugguguuucugcacgugacauaugugcccgcucaagagaagaauuucaccaccgcuccagccaucugccacgacggcaaagcccacuuuccuagagaaggcguguucguguccaacggcacccauugguucgugacacagcggaacuucuacgagccccagaucaucaccaccgacaacaccuucgugucuggcaacugcgacguugugaucggcauugugaacaauaccguguacgacccucugcagcccgagcuggacagcuucaaagaggaacuggacaaguacuuuaagaaccacacaagccccgacguggaccugggcgauaucagcggaaucaaugccagcgucgugaacauccagaaagagaucgaccggcugaacgagguggccaagaaucugaacgagagccugaucgaccugcaagaacuggggaaguacgagcaguacaucaaguggcccugguacaucuggcugggcuuuaucgccggacugauugccaucgugauggucacaaucaugcuguguugcaugaccagcugcuguagcugccugaagggcuguuguagcuguggcagcugcugcaaguucgacgaggacgauucugagcccgugcugaagggcgugaaacugcacuacaccugaugacucgagcugguacugcaugcacgcaaugcuagcugccccuuucccguccuggguaccccgagucucccccgaccucgggucccagguaugcucccaccuccaccugccccacucaccaccucugcuaguuccagacaccucccaagcacgcagcaaugcagcucaaaacgcuuagccuagccacacccccacgggaaacagcagugauuaaccuuuagcaauaaacgaaaguuuaacuaagcuauacuaaccccaggguuggucaauuucgugccagccacacccuggagcuagcaaaaaaaaaaaaaaaaaaaaaaaaaaaaaaaaaaaaaaaaaaaaaaaaaaaaaaaaaaaaaaaaaaaaaaaaaaaaaaaaaaaaaaaaaaaaaaaaaaaa

SEQ ID NO: 26454 - RNA, 4273 nt, Artificial Sequence
  SARS-CoV-2/Wuhan/WIV05/2019__EPI_ISL_402128 spike protein mRNA gc mod (1-1273)(K986P_V987P_N501Y_D614G)
agaauaaacuaguauucuucugguccccacagacucagagagaacccgccaccauguucguguuucuggugcugcugccccugguguccagccagugugugaaccugaccaccagaacacagcugccuccagccuacaccaacagcuucaccagaggcguguacuaccccgacaagguguucagauccagcgugcugcacucuacccaggaccuguuccugccuuucuucagcaacgugaccugguuccacgccauccacguguccggcaccaauggcaccaagagauucgacaaccccgugcugcccuucaacgacgggguguacuuugccagcaccgagaaguccaacaucaucagaggcuggaucuucggcaccacacuggacagcaagacccagagccugcugaucgugaacaacgccaccaacguggucaucaaagugugcgaguuccaguucugcaacgaccccuuccugggcgucuacuaccacaagaacaacaagagcuggauggaaagcgaguuccggguguacagcagcgccaacaacugcaccuucgaguacgugucccagccuuuccugauggaccuggaaggcaagcagggcaacuucaagaaccugcgcgaguucguguucaagaacaucgacggcuacuucaaaaucuacagcaagcacaccccuaucaaccucgugcgggaucugccucagggcuucucugcucuggaaccccugguggaucugcccaucggcaucaacaucacccgguuucagacacugcuggcccugcacagaagcuaccugacaccuggcgauagcagcagcggauggacagcuggugccgccgcuuacuaugugggcuaccugcagccuagaaccuuccugcugaaguacaacgagaacggcaccaucaccgacgccguggauugugcucuggauccucugagcgagacaaagugcacccugaaguccuucaccguggaaaagggcaucuaccagaccagcaacuuccgggugcagcccaccgaauccaucgugcgguuccccaauaucaccaaucugugccccuucggcgagguguucaaugccaccagauucgccucuguguacgccuggaaccggaagcggaucagcaauugcguggccgacuacuccgugcuguacaacuccgccagcuucagcaccuucaagugcuacggcguguccccuaccaagcugaacgaccugugcuucacaaacguguacgccgacagcuucgugauccggggagaugaagugcggcagauugccccuggacagacaggcaagaucgccgacuacaacuacaagcugcccgacgacuucaccggcugugugauugccuggaacagcaacaaccuggacuccaaagucggcggcaacuacaauuaccuguaccggcuguuccggaaguccaaucugaagcccuucgagcgggacaucagcaccgaaaucuaucaggccggcagcaccccuugcaacggcguggaaggcuucaacugcuacuucccacugcaguccuacggcuuucagcccacauacggcgugggcuaucagcccuacagagugguggugcugagcuucgaacugcugcaugcuccugccacagugugcggcccuaagaaaagcaccaaucucgugaagaacaaaugcgugaacuucaacuucaacggccugaccggcaccggcgugcugacagagagcaacaagaaguuccugccauuccagcaguuuggccgggauaucgccgauaccacagacgccguuagagauccccagacacuggaaauccuggacaucaccccaugcagcuucggcggagugucugugaucaccccuggcaccaacaccagcaaucagguggcagugcuguaccagggcgugaacuguaccgaagugcccguggccauucacgccgaucagcugacaccuacauggcggguguacuccaccggcagcaauguguuucagaccagagccggcugucugaucggagccgagcacgugaacaauagcuacgagugcgacauccccaucggcgcuggcaucugugccagcuaccagacacagacaaacagccccagacgggcuagaagcguggccagccagagcaucauugccuacacaaugucucugggcgccgagaacagcguggccuacuccaacaacucuaucgcuauccccaccaacuucaccaucagcgugaccaccgagauccugccuguguccaugaccaagaccagcguggacugcaccauguacaucugcggcgauuccaccgagugcuccaaccugcugcugcaguacggcagcuucugcacccagcugaauagagcccugacagggaucgccguggaacaggacaagaacacccaagagguguucgcccaagugaagcaaaucuacaagaccccuccuaucaaggacuucggcggcuucaauuucagccagauucugcccgauccuagcaagcccagcaagcggagcuucaucgaggaccugcuguucaacaaagugacacuggccgacgccggcuucaucaagcaguauggcgauugucugggcgacauugccgccagggaucugauuugcgcccagaaguuuaacggacugacagugcugccuccucugcugaccgaugagaugaucgcccaguacacaucugcccugcuggccggcacaaucacaagcggcuggacauuuggagcuggcgccgcucugcagauccccuuugcuaugcagauggccuaccgguucaacggcaucggagugacccagaaugugcuguacgagaaccagaagcugaucgccaaccaguucaacagcgccaucggcaagauccaggacagccugagcagcacagcaagcgcccugggaaagcugcaggacguggucaaccagaaugcccaggcacugaacacccuggucaagcagcuguccuccaacuucggcgccaucagcucugugcugaacgauauccugagcagacuggacccuccugaggccgaggugcagaucgacagacugaucacaggcagacugcagagccuccagacauacgugacccagcagcugaucagagccgccgagauuagagccucugccaaucuggccgccaccaagaugucugagugugugcugggccagagcaagagaguggacuuuugcggcaagggcuaccaccugaugagcuucccucagucugccccucacggcgugguguuucugcacgugacauaugugcccgcucaagagaagaauuucaccaccgcuccagccaucugccacgacggcaaagcccacuuuccuagagaaggcguguucguguccaacggcacccauugguucgugacacagcggaacuucuacgagccccagaucaucaccaccgacaacaccuucgugucuggcaacugcgacguugugaucggcauugugaacaauaccguguacgacccucugcagcccgagcuggacagcuucaaagaggaacuggacaaguacuuuaagaaccacacaagccccgacguggaccugggcgauaucagcggaaucaaugccagcgucgugaacauccagaaagagaucgaccggcugaacgagguggccaagaaucugaacgagagccugaucgaccugcaagaacuggggaaguacgagcaguacaucaaguggcccugguacaucuggcugggcuuuaucgccggacugauugccaucgugauggucacaaucaugcuguguugcaugaccagcugcuguagcugccugaagggcuguuguagcuguggcagcugcugcaaguucgacgaggacgauucugagcccgugcugaagggcgugaaacugcacuacaccugaugacucgagcugguacugcaugcacgcaaugcuagcugccccuuucccguccuggguaccccgagucucccccgaccucgggucccagguaugcucccaccuccaccugccccacucaccaccucugcuaguuccagacaccucccaagcacgcagcaaugcagcucaaaacgcuuagccuagccacacccccacgggaaacagcagugauuaaccuuuagcaauaaacgaaaguuuaacuaagcuauacuaaccccaggguuggucaauuucgugccagccacacccuggagcuagcaaaaaaaaaaaaaaaaaaaaaaaaaaaaaaaaaaaaaaaaaaaaaaaaaaaaaaaaaaaaaaaaaaaaaaaaaaaaaaaaaaaaaaaaaaaaaaaaaaaa

SEQ ID NO: 26455 - RNA, 4267 nt, Artificial Sequence
  SARS-CoV-2/Wuhan/WIV05/2019__EPI_ISL_402128 spike protein mRNA gc mod (1-1273)(K986P_V987P_H69del_V70del_D614G)
agaauaaacuaguauucuucugguccccacagacucagagagaacccgccaccauguucguguuucuggugcugcugccccugguguccagccagugugugaaccugaccaccagaacacagcugccuccagccuacaccaacagcuucaccagaggcguguacuaccccgacaagguguucagauccagcgugcugcacucuacccaggaccuguuccugccuuucuucagcaacgugaccugguuccacgccaucuccggcaccaauggcaccaagagauucgacaaccccgugcugcccuucaacgacgggguguacuuugccagcaccgagaaguccaacaucaucagaggcuggaucuucggcaccacacuggacagcaagacccagagccugcugaucgugaacaacgccaccaacguggucaucaaagugugcgaguuccaguucugcaacgaccccuuccugggcgucuacuaccacaagaacaacaagagcuggauggaaagcgaguuccggguguacagcagcgccaacaacugcaccuucgaguacgugucccagccuuuccugauggaccuggaaggcaagcagggcaacuucaagaaccugcgcgaguucguguucaagaacaucgacggcuacuucaaaaucuacagcaagcacaccccuaucaaccucgugcgggaucugccucagggcuucucugcucuggaaccccugguggaucugcccaucggcaucaacaucacccgguuucagacacugcuggcccugcacagaagcuaccugacaccuggcgauagcagcagcggauggacagcuggugccgccgcuuacuaugugggcuaccugcagccuagaaccuuccugcugaaguacaacgagaacggcaccaucaccgacgccguggauugugcucuggauccucugagcgagacaaagugcacccugaaguccuucaccguggaaaagggcaucuaccagaccagcaacuuccgggugcagcccaccgaauccaucgugcgguuccccaauaucaccaaucugugccccuucggcgagguguucaaugccaccagauucgccucuguguacgccuggaaccggaagcggaucagcaauugcguggccgacuacuccgugcuguacaacuccgccagcuucagcaccuucaagugcuacggcguguccccuaccaagcugaacgaccugugcuucacaaacguguacgccgacagcuucgugauccggggagaugaagugcggcagauugccccuggacagacaggcaagaucgccgacuacaacuacaagcugcccgacgacuucaccggcugugugauugccuggaacagcaacaaccuggacuccaaagucggcggcaacuacaauuaccuguaccggcuguuccggaaguccaaucugaagcccuucgagcgggacaucagcaccgaaaucuaucaggccggcagcaccccuugcaacggcguggaaggcuucaacugcuacuucccacugcaguccuacggcuuucagcccacaaauggcgugggcuaucagcccuacagagugguggugcugagcuucgaacugcugcaugcuccugccacagugugcggcccuaagaaaagcaccaaucucgugaagaacaaaugcgugaacuucaacuucaacggccugaccggcaccggcgugcugacagagagcaacaagaaguuccugccauuccagcaguuuggccgggauaucgccgauaccacagacgccguuagagauccccagacacuggaaauccuggacaucaccccaugcagcuucggcggagugucugugaucaccccuggcaccaacaccagcaaucagguggcagugcuguaccagggcgugaacuguaccgaagugcccguggccauucacgccgaucagcugacaccuacauggcggguguacuccaccggcagcaauguguuucagaccagagccggcugucugaucggagccgagcacgugaacaauagcuacgagugcgacauccccaucggcgcuggcaucugugccagcuaccagacacagacaaacagccccagacgggcuagaagcguggccagccagagcaucauugccuacacaaugucucugggcgccgagaacagcguggccuacuccaacaacucuaucgcuauccccaccaacuucaccaucagcgugaccaccgagauccugccuguguccaugaccaagaccagcguggacugcaccauguacaucugcggcgauuccaccgagugcuccaaccugcugcugcaguacggcagcuucugcacccagcugaauagagcccugacagggaucgccguggaacaggacaagaacacccaagagguguucgcccaagugaagcaaaucuacaagaccccuccuaucaaggacuucggcggcuucaauuucagccagauucugcccgauccuagcaagcccagcaagcggagcuucaucgaggaccugcuguucaacaaagugacacuggccgacgccggcuucaucaagcaguauggcgauugucugggcgacauugccgccagggaucugauuugcgcccagaaguuuaacggacugacagugcugccuccucugcugaccgaugagaugaucgcccaguacacaucugcccugcuggccggcacaaucacaagcggcuggacauuuggagcuggcgccgcucugcagauccccuuugcuaugcagauggccuaccgguucaacggcaucggagugacccagaaugugcuguacgagaaccagaagcugaucgccaaccaguucaacagcgccaucggcaagauccaggacagccugagcagcacagcaagcgcccugggaaagcugcaggacguggucaaccagaaugcccaggcacugaacacccuggucaagcagcuguccuccaacuucggcgccaucagcucugugcugaacgauauccugagcagacuggacccuccugaggccgaggugcagaucgacagacugaucacaggcagacugcagagccuccagacauacgugacccagcagcugaucagagccgccgagauuagagccucugccaaucuggccgccaccaagaugucugagugugugcugggccagagcaagagaguggacuuuugcggcaagggcuaccaccugaugagcuucccucagucugccccucacggcgugguguuucugcacgugacauaugugcccgcucaagagaagaauuucaccaccgcuccagccaucugccacgacggcaaagcccacuuuccuagagaaggcguguucguguccaacggcacccauugguucgugacacagcggaacuucuacgagccccagaucaucaccaccgacaacaccuucgugucuggcaacugcgacguugugaucggcauugugaacaauaccguguacgacccucugcagcccgagcuggacagcuucaaagaggaacuggacaaguacuuuaagaaccacacaagccccgacguggaccugggcgauaucagcggaaucaaugccagcgucgugaacauccagaaagagaucgaccggcugaacgagguggccaagaaucugaacgagagccugaucgaccugcaagaacuggggaaguacgagcaguacaucaaguggcccugguacaucuggcugggcuuuaucgccggacugauugccaucgugauggucacaaucaugcuguguugcaugaccagcugcuguagcugccugaagggcuguuguagcuguggcagcugcugcaaguucgacgaggacgauucugagcccgugcugaagggcgugaaacugcacuacaccugaugacucgagcugguacugcaugcacgcaaugcuagcugccccuuucccguccuggguaccccgagucucccccgaccucgggucccagguaugcucccaccuccaccugccccacucaccaccucugcuaguuccagacaccucccaagcacgcagcaaugcagcucaaaacgcuuagccuagccacacccccacgggaaacagcagugauuaaccuuuagcaauaaacgaaaguuuaacuaagcuauacuaaccccaggguuggucaauuucgugccagccacacccuggagcuagcaaaaaaaaaaaaaaaaaaaaaaaaaaaaaaaaaaaaaaaaaaaaaaaaaaaaaaaaaaaaaaaaaaaaaaaaaaaaaaaaaaaaaaaaaaaaaaaaaaaa

SEQ ID NO: 26456 - RNA, 4273 nt, Artificial Sequence
  SARS-CoV-2/Wuhan/WIV05/2019__EPI_ISL_402128 spike protein mRNA gc mod (1-1273)(K986P_V987P_Y453F_D614G)
agaauaaacuaguauucuucugguccccacagacucagagagaacccgccaccauguucguguuucuggugcugcugccccugguguccagccagugugugaaccugaccaccagaacacagcugccuccagccuacaccaacagcuucaccagaggcguguacuaccccgacaagguguucagauccagcgugcugcacucuacccaggaccuguuccugccuuucuucagcaacgugaccugguuccacgccauccacguguccggcaccaauggcaccaagagauucgacaaccccgugcugcccuucaacgacgggguguacuuugccagcaccgagaaguccaacaucaucagaggcuggaucuucggcaccacacuggacagcaagacccagagccugcugaucgugaacaacgccaccaacguggucaucaaagugugcgaguuccaguucugcaacgaccccuuccugggcgucuacuaccacaagaacaacaagagcuggauggaaagcgaguuccggguguacagcagcgccaacaacugcaccuucgaguacgugucccagccuuuccugauggaccuggaaggcaagcagggcaacuucaagaaccugcgcgaguucguguucaagaacaucgacggcuacuucaaaaucuacagcaagcacaccccuaucaaccucgugcgggaucugccucagggcuucucugcucuggaaccccugguggaucugcccaucggcaucaacaucacccgguuucagacacugcuggcccugcacagaagcuaccugacaccuggcgauagcagcagcggauggacagcuggugccgccgcuuacuaugugggcuaccugcagccuagaaccuuccugcugaaguacaacgagaacggcaccaucaccgacgccguggauugugcucuggauccucugagcgagacaaagugcacccugaaguccuucaccguggaaaagggcaucuaccagaccagcaacuuccgggugcagcccaccgaauccaucgugcgguuccccaauaucaccaaucugugccccuucggcgagguguucaaugccaccagauucgccucuguguacgccuggaaccggaagcggaucagcaauugcguggccgacuacuccgugcuguacaacuccgccagcuucagcaccuucaagugcuacggcguguccccuaccaagcugaacgaccugugcuucacaaacguguacgccgacagcuucgugauccggggagaugaagugcggcagauugccccuggacagacaggcaagaucgccgacuacaacuacaagcugcccgacgacuucaccggcugugugauugccuggaacagcaacaaccuggacuccaaagucggcggcaacuacaauuaccuguuccggcuguuccggaaguccaaucugaagcccuucgagcgggacaucagcaccgaaaucuaucaggccggcagcaccccuugcaacggcguggaaggcuucaacugcuacuucccacugcaguccuacggcuuucagcccacaaauggcgugggcuaucagcccuacagagugguggugcugagcuucgaacugcugcaugcuccugccacagugugcggcccuaagaaaagcaccaaucucgugaagaacaaaugcgugaacuucaacuucaacggccugaccggcaccggcgugcugacagagagcaacaagaaguuccugccauuccagcaguuuggccgggauaucgccgauaccacagacgccguuagagauccccagacacuggaaauccuggacaucaccccaugcagcuucggcggagugucugugaucaccccuggcaccaacaccagcaaucagguggcagugcuguaccagggcgugaacuguaccgaagugcccguggccauucacgccgaucagcugacaccuacauggcggguguacuccaccggcagcaauguguuucagaccagagccggcugucugaucggagccgagcacgugaacaauagcuacgagugcgacauccccaucggcgcuggcaucugugccagcuaccagacacagacaaacagccccagacgggcuagaagcguggccagccagagcaucauugccuacacaaugucucugggcgccgagaacagcguggccuacuccaacaacucuaucgcuauccccaccaacuucaccaucagcgugaccaccgagauccugccuguguccaugaccaagaccagcguggacugcaccauguacaucugcggcgauuccaccgagugcuccaaccugcugcugcaguacggcagcuucugcacccagcugaauagagcccugacagggaucgccguggaacaggacaagaacacccaagagguguucgcccaagugaagcaaaucuacaagaccccuccuaucaaggacuucggcggcuucaauuucagccagauucugcccgauccuagcaagcccagcaagcggagcuucaucgaggaccugcuguucaacaaagugacacuggccgacgccggcuucaucaagcaguauggcgauugucugggcgacauugccgccagggaucugauuugcgcccagaaguuuaacggacugacagugcugccuccucugcugaccgaugagaugaucgcccaguacacaucugcccugcuggccggcacaaucacaagcggcuggacauuuggagcuggcgccgcucugcagauccccuuugcuaugcagauggccuaccgguucaacggcaucggagugacccagaaugugcuguacgagaaccagaagcugaucgccaaccaguucaacagcgccaucggcaagauccaggacagccugagcagcacagcaagcgcccugggaaagcugcaggacguggucaaccagaaugcccaggcacugaacacccuggucaagcagcuguccuccaacuucggcgccaucagcucugugcugaacgauauccugagcagacuggacccuccugaggccgaggugcagaucgacagacugaucacaggcagacugcagagccuccagacauacgugacccagcagcugaucagagccgccgagauuagagccucugccaaucuggccgccaccaagaugucugagugugugcugggccagagcaagagaguggacuuuugcggcaagggcuaccaccugaugagcuucccucagucugccccucacggcgugguguuucugcacgugacauaugugcccgcucaagagaagaauuucaccaccgcuccagccaucugccacgacggcaaagcccacuuuccuagagaaggcguguucguguccaacggcacccauugguucgugacacagcggaacuucuacgagccccagaucaucaccaccgacaacaccuucgugucuggcaacugcgacguugugaucggcauugugaacaauaccguguacgacccucugcagcccgagcuggacagcuucaaagaggaacuggacaaguacuuuaagaaccacacaagccccgacguggaccugggcgauaucagcggaaucaaugccagcgucgugaacauccagaaagagaucgaccggcugaacgagguggccaagaaucugaacgagagccugaucgaccugcaagaacuggggaaguacgagcaguacaucaaguggcccugguacaucuggcugggcuuuaucgccggacugauugccaucgugauggucacaaucaugcuguguugcaugaccagcugcuguagcugccugaagggcuguuguagcuguggcagcugcugcaaguucgacgaggacgauucugagcccgugcugaagggcgugaaacugcacuacaccugaugacucgagcugguacugcaugcacgcaaugcuagcugccccuuucccguccuggguaccccgagucucccccgaccucgggucccagguaugcucccaccuccaccugccccacucaccaccucugcuaguuccagacaccucccaagcacgcagcaaugcagcucaaaacgcuuagccuagccacacccccacgggaaacagcagugauuaaccuuuagcaauaaacgaaaguuuaacuaagcuauacuaaccccaggguuggucaauuucgugccagccacacccuggagcuagcaaaaaaaaaaaaaaaaaaaaaaaaaaaaaaaaaaaaaaaaaaaaaaaaaaaaaaaaaaaaaaaaaaaaaaaaaaaaaaaaaaaaaaaaaaaaaaaaaaaa

SEQ ID NO: 26457 - RNA, 4273 nt, Artificial Sequence
  SARS-CoV-2/Wuhan/WIV05/2019__EPI_ISL_402128 spike protein mRNA gc mod (1-1273)(K986P_V987P_D614G_I692V)
agaauaaacuaguauucuucugguccccacagacucagagagaacccgccaccauguucguguuucuggugcugcugccccugguguccagccagugugugaaccugaccaccagaacacagcugccuccagccuacaccaacagcuucaccagaggcguguacuaccccgacaagguguucagauccagcgugcugcacucuacccaggaccuguuccugccuuucuucagcaacgugaccugguuccacgccauccacguguccggcaccaauggcaccaagagauucgacaaccccgugcugcccuucaacgacgggguguacuuugccagcaccgagaaguccaacaucaucagaggcuggaucuucggcaccacacuggacagcaagacccagagccugcugaucgugaacaacgccaccaacguggucaucaaagugugcgaguuccaguucugcaacgaccccuuccugggcgucuacuaccacaagaacaacaagagcuggauggaaagcgaguuccggguguacagcagcgccaacaacugcaccuucgaguacgugucccagccuuuccugauggaccuggaaggcaagcagggcaacuucaagaaccugcgcgaguucguguucaagaacaucgacggcuacuucaaaaucuacagcaagcacaccccuaucaaccucgugcgggaucugccucagggcuucucugcucuggaaccccugguggaucugcccaucggcaucaacaucacccgguuucagacacugcuggcccugcacagaagcuaccugacaccuggcgauagcagcagcggauggacagcuggugccgccgcuuacuaugugggcuaccugcagccuagaaccuuccugcugaaguacaacgagaacggcaccaucaccgacgccguggauugugcucuggauccucugagcgagacaaagugcacccugaaguccuucaccguggaaaagggcaucuaccagaccagcaacuuccgggugcagcccaccgaauccaucgugcgguuccccaauaucaccaaucugugccccuucggcgagguguucaaugccaccagauucgccucuguguacgccuggaaccggaagcggaucagcaauugcguggccgacuacuccgugcuguacaacuccgccagcuucagcaccuucaagugcuacggcguguccccuaccaagcugaacgaccugugcuucacaaacguguacgccgacagcuucgugauccggggagaugaagugcggcagauugccccuggacagacaggcaagaucgccgacuacaacuacaagcugcccgacgacuucaccggcugugugauugccuggaacagcaacaaccuggacuccaaagucggcggcaacuacaauuaccuguaccggcuguuccggaaguccaaucugaagcccuucgagcgggacaucagcaccgaaaucuaucaggccggcagcaccccuugcaacggcguggaaggcuucaacugcuacuucccacugcaguccuacggcuuucagcccacaaauggcgugggcuaucagcccuacagagugguggugcugagcuucgaacugcugcaugcuccugccacagugugcggcccuaagaaaagcaccaaucucgugaagaacaaaugcgugaacuucaacuucaacggccugaccggcaccggcgugcugacagagagcaacaagaaguuccugccauuccagcaguuuggccgggauaucgccgauaccacagacgccguuagagauccccagacacuggaaauccuggacaucaccccaugcagcuucggcggagugucugugaucaccccuggcaccaacaccagcaaucagguggcagugcuguaccagggcgugaacuguaccgaagugcccguggccauucacgccgaucagcugacaccuacauggcggguguacuccaccggcagcaauguguuucagaccagagccggcugucugaucggagccgagcacgugaacaauagcuacgagugcgacauccccaucggcgcuggcaucugugccagcuaccagacacagacaaacagccccagacgggcuagaagcguggccagccagagcgugauugccuacacaaugucucugggcgccgagaacagcguggccuacuccaacaacucuaucgcuauccccaccaacuucaccaucagcgugaccaccgagauccugccuguguccaugaccaagaccagcguggacugcaccauguacaucugcggcgauuccaccgagugcuccaaccugcugcugcaguacggcagcuucugcacccagcugaauagagcccugacagggaucgccguggaacaggacaagaacacccaagagguguucgcccaagugaagcaaaucuacaagaccccuccuaucaaggacuucggcggcuucaauuucagccagauucugcccgauccuagcaagcccagcaagcggagcuucaucgaggaccugcuguucaacaaagugacacuggccgacgccggcuucaucaagcaguauggcgauugucugggcgacauugccgccagggaucugauuugcgcccagaaguuuaacggacugacagugcugccuccucugcugaccgaugagaugaucgcccaguacacaucugcccugcuggccggcacaaucacaagcggcuggacauuuggagcuggcgccgcucugcagauccccuuugcuaugcagauggccuaccgguucaacggcaucggagugacccagaaugugcuguacgagaaccagaagcugaucgccaaccaguucaacagcgccaucggcaagauccaggacagccugagcagcacagcaagcgcccugggaaagcugcaggacguggucaaccagaaugcccaggcacugaacacccuggucaagcagcuguccuccaacuucggcgccaucagcucugugcugaacgauauccugagcagacuggacccuccugaggccgaggugcagaucgacagacugaucacaggcagacugcagagccuccagacauacgugacccagcagcugaucagagccgccgagauuagagccucugccaaucuggccgccaccaagaugucugagugugugcugggccagagcaagagaguggacuuuugcggcaagggcuaccaccugaugagcuucccucagucugccccucacggcgugguguuucugcacgugacauaugugcccgcucaagagaagaauuucaccaccgcuccagccaucugccacgacggcaaagcccacuuuccuagagaaggcguguucguguccaacggcacccauugguucgugacacagcggaacuucuacgagccccagaucaucaccaccgacaacaccuucgugucuggcaacugcgacguugugaucggcauugugaacaauaccguguacgacccucugcagcccgagcuggacagcuucaaagaggaacuggacaaguacuuuaagaaccacacaagccccgacguggaccugggcgauaucagcggaaucaaugccagcgucgugaacauccagaaagagaucgaccggcugaacgagguggccaagaaucugaacgagagccugaucgaccugcaagaacuggggaaguacgagcaguacaucaaguggcccugguacaucuggcugggcuuuaucgccggacugauugccaucgugauggucacaaucaugcuguguugcaugaccagcugcuguagcugccugaagggcuguuguagcuguggcagcugcugcaaguucgacgaggacgauucugagcccgugcugaagggcgugaaacugcacuacaccugaugacucgagcugguacugcaugcacgcaaugcuagcugccccuuucccguccuggguaccccgagucucccccgaccucgggucccagguaugcucccaccuccaccugccccacucaccaccucugcuaguuccagacaccucccaagcacgcagcaaugcagcucaaaacgcuuagccuagccacacccccacgggaaacagcagugauuaaccuuuagcaauaaacgaaaguuuaacuaagcuauacuaaccccaggguuggucaauuucgugccagccacacccuggagcuagcaaaaaaaaaaaaaaaaaaaaaaaaaaaaaaaaaaaaaaaaaaaaaaaaaaaaaaaaaaaaaaaaaaaaaaaaaaaaaaaaaaaaaaaaaaaaaaaaaaaa

SEQ ID NO: 26458 - RNA, 4273 nt, Artificial Sequence
  SARS-CoV-2/Wuhan/WIV05/2019__EPI_ISL_402128 spike protein mRNA gc mod (1-1273)(K986P_V987P_D614G_M1229I)
agaauaaacuaguauucuucugguccccacagacucagagagaacccgccaccauguucguguuucuggugcugcugccccugguguccagccagugugugaaccugaccaccagaacacagcugccuccagccuacaccaacagcuucaccagaggcguguacuaccccgacaagguguucagauccagcgugcugcacucuacccaggaccuguuccugccuuucuucagcaacgugaccugguuccacgccauccacguguccggcaccaauggcaccaagagauucgacaaccccgugcugcccuucaacgacgggguguacuuugccagcaccgagaaguccaacaucaucagaggcuggaucuucggcaccacacuggacagcaagacccagagccugcugaucgugaacaacgccaccaacguggucaucaaagugugcgaguuccaguucugcaacgaccccuuccugggcgucuacuaccacaagaacaacaagagcuggauggaaagcgaguuccggguguacagcagcgccaacaacugcaccuucgaguacgugucccagccuuuccugauggaccuggaaggcaagcagggcaacuucaagaaccugcgcgaguucguguucaagaacaucgacggcuacuucaaaaucuacagcaagcacaccccuaucaaccucgugcgggaucugccucagggcuucucugcucuggaaccccugguggaucugcccaucggcaucaacaucacccgguuucagacacugcuggcccugcacagaagcuaccugacaccuggcgauagcagcagcggauggacagcuggugccgccgcuuacuaugugggcuaccugcagccuagaaccuuccugcugaaguacaacgagaacggcaccaucaccgacgccguggauugugcucuggauccucugagcgagacaaagugcacccugaaguccuucaccguggaaaagggcaucuaccagaccagcaacuuccgggugcagcccaccgaauccaucgugcgguuccccaauaucaccaaucugugccccuucggcgagguguucaaugccaccagauucgccucuguguacgccuggaaccggaagcggaucagcaauugcguggccgacuacuccgugcuguacaacuccgccagcuucagcaccuucaagugcuacggcguguccccuaccaagcugaacgaccugugcuucacaaacguguacgccgacagcuucgugauccggggagaugaagugcggcagauugccccuggacagacaggcaagaucgccgacuacaacuacaagcugcccgacgacuucaccggcugugugauugccuggaacagcaacaaccuggacuccaaagucggcggcaacuacaauuaccuguaccggcuguuccggaaguccaaucugaagcccuucgagcgggacaucagcaccgaaaucuaucaggccggcagcaccccuugcaacggcguggaaggcuucaacugcuacuucccacugcaguccuacggcuuucagcccacaaauggcgugggcuaucagcccuacagagugguggugcugagcuucgaacugcugcaugcuccugccacagugugcggcccuaagaaaagcaccaaucucgugaagaacaaaugcgugaacuucaacuucaacggccugaccggcaccggcgugcugacagagagcaacaagaaguuccugccauuccagcaguuuggccgggauaucgccgauaccacagacgccguuagagauccccagacacuggaaauccuggacaucaccccaugcagcuucggcggagugucugugaucaccccuggcaccaacaccagcaaucagguggcagugcuguaccagggcgugaacuguaccgaagugcccguggccauucacgccgaucagcugacaccuacauggcggguguacuccaccggcagcaauguguuucagaccagagccggcugucugaucggagccgagcacgugaacaauagcuacgagugcgacauccccaucggcgcuggcaucugugccagcuaccagacacagacaaacagccccagacgggcuagaagcguggccagccagagcaucauugccuacacaaugucucugggcgccgagaacagcguggccuacuccaacaacucuaucgcuauccccaccaacuucaccaucagcgugaccaccgagauccugccuguguccaugaccaagaccagcguggacugcaccauguacaucugcggcgauuccaccgagugcuccaaccugcugcugcaguacggcagcuucugcacccagcugaauagagcccugacagggaucgccguggaacaggacaagaacacccaagagguguucgcccaagugaagcaaaucuacaagaccccuccuaucaaggacuucggcggcuucaauuucagccagauucugcccgauccuagcaagcccagcaagcggagcuucaucgaggaccugcuguucaacaaagugacacuggccgacgccggcuucaucaagcaguauggcgauugucugggcgacauugccgccagggaucugauuugcgcccagaaguuuaacggacugacagugcugccuccucugcugaccgaugagaugaucgcccaguacacaucugcccugcuggccggcacaaucacaagcggcuggacauuuggagcuggcgccgcucugcagauccccuuugcuaugcagauggccuaccgguucaacggcaucggagugacccagaaugugcuguacgagaaccagaagcugaucgccaaccaguucaacagcgccaucggcaagauccaggacagccugagcagcacagcaagcgcccugggaaagcugcaggacguggucaaccagaaugcccaggcacugaacacccuggucaagcagcuguccuccaacuucggcgccaucagcucugugcugaacgauauccugagcagacuggacccuccugaggccgaggugcagaucgacagacugaucacaggcagacugcagagccuccagacauacgugacccagcagcugaucagagccgccgagauuagagccucugccaaucuggccgccaccaagaugucugagugugugcugggccagagcaagagaguggacuuuugcggcaagggcuaccaccugaugagcuucccucagucugccccucacggcgugguguuucugcacgugacauaugugcccgcucaagagaagaauuucaccaccgcuccagccaucugccacgacggcaaagcccacuuuccuagagaaggcguguucguguccaacggcacccauugguucgugacacagcggaacuucuacgagccccagaucaucaccaccgacaacaccuucgugucuggcaacugcgacguugugaucggcauugugaacaauaccguguacgacccucugcagcccgagcuggacagcuucaaagaggaacuggacaaguacuuuaagaaccacacaagccccgacguggaccugggcgauaucagcggaaucaaugccagcgucgugaacauccagaaagagaucgaccggcugaacgagguggccaagaaucugaacgagagccugaucgaccugcaagaacuggggaaguacgagcaguacaucaaguggcccugguacaucuggcugggcuuuaucgccggacugauugccaucgugaucgucacaaucaugcuguguugcaugaccagcugcuguagcugccugaagggcuguuguagcuguggcagcugcugcaaguucgacgaggacgauucugagcccgugcugaagggcgugaaacugcacuacaccugaugacucgagcugguacugcaugcacgcaaugcuagcugccccuuucccguccuggguaccccgagucucccccgaccucgggucccagguaugcucccaccuccaccugccccacucaccaccucugcuaguuccagacaccucccaagcacgcagcaaugcagcucaaaacgcuuagccuagccacacccccacgggaaacagcagugauuaaccuuuagcaauaaacgaaaguuuaacuaagcuauacuaaccccaggguuggucaauuucgugccagccacacccuggagcuagcaaaaaaaaaaaaaaaaaaaaaaaaaaaaaaaaaaaaaaaaaaaaaaaaaaaaaaaaaaaaaaaaaaaaaaaaaaaaaaaaaaaaaaaaaaaaaaaaaaaa

SEQ ID NO: 26459 - RNA, 4267 nt, Artificial Sequence
  SARS-CoV-2/Wuhan/WIV05/2019__EPI_ISL_402128 spike protein mRNA gc mod (1-1273)(K986P_V987P_H69del_V70del_A222V_Y453F_S477N_D614G_I692V)
agaauaaacuaguauucuucugguccccacagacucagagagaacccgccaccauguucguguuucuggugcugcugccccugguguccagccagugugugaaccugaccaccagaacacagcugccuccagccuacaccaacagcuucaccagaggcguguacuaccccgacaagguguucagauccagcgugcugcacucuacccaggaccuguuccugccuuucuucagcaacgugaccugguuccacgccaucuccggcaccaauggcaccaagagauucgacaaccccgugcugcccuucaacgacgggguguacuuugccagcaccgagaaguccaacaucaucagaggcuggaucuucggcaccacacuggacagcaagacccagagccugcugaucgugaacaacgccaccaacguggucaucaaagugugcgaguuccaguucugcaacgaccccuuccugggcgucuacuaccacaagaacaacaagagcuggauggaaagcgaguuccggguguacagcagcgccaacaacugcaccuucgaguacgugucccagccuuuccugauggaccuggaaggcaagcagggcaacuucaagaaccugcgcgaguucguguucaagaacaucgacggcuacuucaaaaucuacagcaagcacaccccuaucaaccucgugcgggaucugccucagggcuucucugugcuggaaccccugguggaucugcccaucggcaucaacaucacccgguuucagacacugcuggcccugcacagaagcuaccugacaccuggcgauagcagcagcggauggacagcuggugccgccgcuuacuaugugggcuaccugcagccuagaaccuuccugcugaaguacaacgagaacggcaccaucaccgacgccguggauugugcucuggauccucugagcgagacaaagugcacccugaaguccuucaccguggaaaagggcaucuaccagaccagcaacuuccgggugcagcccaccgaauccaucgugcgguuccccaauaucaccaaucugugccccuucggcgagguguucaaugccaccagauucgccucuguguacgccuggaaccggaagcggaucagcaauugcguggccgacuacuccgugcuguacaacuccgccagcuucagcaccuucaagugcuacggcguguccccuaccaagcugaacgaccugugcuucacaaacguguacgccgacagcuucgugauccggggagaugaagugcggcagauugccccuggacagacaggcaagaucgccgacuacaacuacaagcugcccgacgacuucaccggcugugugauugccuggaacagcaacaaccuggacuccaaagucggcggcaacuacaauuaccuguuccggcuguuccggaaguccaaucugaagcccuucgagcgggacaucagcaccgaaaucuaucaggccggcaacaccccuugcaacggcguggaaggcuucaacugcuacuucccacugcaguccuacggcuuucagcccacaaauggcgugggcuaucagcccuacagagugguggugcugagcuucgaacugcugcaugcuccugccacagugugcggcccuaagaaaagcaccaaucucgugaagaacaaaugcgugaacuucaacuucaacggccugaccggcaccggcgugcugacagagagcaacaagaaguuccugccauuccagcaguuuggccgggauaucgccgauaccacagacgccguuagagauccccagacacuggaaauccuggacaucaccccaugcagcuucggcggagugucugugaucaccccuggcaccaacaccagcaaucagguggcagugcuguaccagggcgugaacuguaccgaagugcccguggccauucacgccgaucagcugacaccuacauggcggguguacuccaccggcagcaauguguuucagaccagagccggcugucugaucggagccgagcacgugaacaauagcuacgagugcgacauccccaucggcgcuggcaucugugccagcuaccagacacagacaaacagccccagacgggcuagaagcguggccagccagagcgugauugccuacacaaugucucugggcgccgagaacagcguggccuacuccaacaacucuaucgcuauccccaccaacuucaccaucagcgugaccaccgagauccugccuguguccaugaccaagaccagcguggacugcaccauguacaucugcggcgauuccaccgagugcuccaaccugcugcugcaguacggcagcuucugcacccagcugaauagagcccugacagggaucgccguggaacaggacaagaacacccaagagguguucgcccaagugaagcaaaucuacaagaccccuccuaucaaggacuucggcggcuucaauuucagccagauucugcccgauccuagcaagcccagcaagcggagcuucaucgaggaccugcuguucaacaaagugacacuggccgacgccggcuucaucaagcaguauggcgauugucugggcgacauugccgccagggaucugauuugcgcccagaaguuuaacggacugacagugcugccuccucugcugaccgaugagaugaucgcccaguacacaucugcccugcuggccggcacaaucacaagcggcuggacauuuggagcuggcgccgcucugcagauccccuuugcuaugcagauggccuaccgguucaacggcaucggagugacccagaaugugcuguacgagaaccagaagcugaucgccaaccaguucaacagcgccaucggcaagauccaggacagccugagcagcacagcaagcgcccugggaaagcugcaggacguggucaaccagaaugcccaggcacugaacacccuggucaagcagcuguccuccaacuucggcgccaucagcucugugcugaacgauauccugagcagacuggacccuccugaggccgaggugcagaucgacagacugaucacaggcagacugcagagccuccagacauacgugacccagcagcugaucagagccgccgagauuagagccucugccaaucuggccgccaccaagaugucugagugugugcugggccagagcaagagaguggacuuuugcggcaagggcuaccaccugaugagcuucccucagucugccccucacggcgugguguuucugcacgugacauaugugcccgcucaagagaagaauuucaccaccgcuccagccaucugccacgacggcaaagcccacuuuccuagagaaggcguguucguguccaacggcacccauugguucgugacacagcggaacuucuacgagccccagaucaucaccaccgacaacaccuucgugucuggcaacugcgacguugugaucggcauugugaacaauaccguguacgacccucugcagcccgagcuggacagcuucaaagaggaacuggacaaguacuuuaagaaccacacaagccccgacguggaccugggcgauaucagcggaaucaaugccagcgucgugaacauccagaaagagaucgaccggcugaacgagguggccaagaaucugaacgagagccugaucgaccugcaagaacuggggaaguacgagcaguacaucaaguggcccugguacaucuggcugggcuuuaucgccggacugauugccaucgugauggucacaaucaugcuguguugcaugaccagcugcuguagcugccugaagggcuguuguagcuguggcagcugcugcaaguucgacgaggacgauucugagcccgugcugaagggcgugaaacugcacuacaccugaugacucgagcugguacugcaugcacgcaaugcuagcugccccuuucccguccuggguaccccgagucucccccgaccucgggucccagguaugcucccaccuccaccugccccacucaccaccucugcuaguuccagacaccucccaagcacgcagcaaugcagcucaaaacgcuuagccuagccacacccccacgggaaacagcagugauuaaccuuuagcaauaaacgaaaguuuaacuaagcuauacuaaccccaggguuggucaauuucgugccagccacacccuggagcuagcaaaaaaaaaaaaaaaaaaaaaaaaaaaaaaaaaaaaaaaaaaaaaaaaaaaaaaaaaaaaaaaaaaaaaaaaaaaaaaaaaaaaaaaaaaaaaaaaaaaa

SEQ ID NO: 26460 - RNA, 4267 nt, Artificial Sequence
  SARS-CoV-2/Wuhan/WIV05/2019__EPI_ISL_402128 spike protein mRNA gc mod (1-1273)(K986P_V987P_H69del_V70del_Y453F_D614G_I692V_M1229I)
agaauaaacuaguauucuucugguccccacagacucagagagaacccgccaccauguucguguuucuggugcugcugccccugguguccagccagugugugaaccugaccaccagaacacagcugccuccagccuacaccaacagcuucaccagaggcguguacuaccccgacaagguguucagauccagcgugcugcacucuacccaggaccuguuccugccuuucuucagcaacgugaccugguuccacgccaucuccggcaccaauggcaccaagagauucgacaaccccgugcugcccuucaacgacgggguguacuuugccagcaccgagaaguccaacaucaucagaggcuggaucuucggcaccacacuggacagcaagacccagagccugcugaucgugaacaacgccaccaacguggucaucaaagugugcgaguuccaguucugcaacgaccccuuccugggcgucuacuaccacaagaacaacaagagcuggauggaaagcgaguuccggguguacagcagcgccaacaacugcaccuucgaguacgugucccagccuuuccugauggaccuggaaggcaagcagggcaacuucaagaaccugcgcgaguucguguucaagaacaucgacggcuacuucaaaaucuacagcaagcacaccccuaucaaccucgugcgggaucugccucagggcuucucugcucuggaaccccugguggaucugcccaucggcaucaacaucacccgguuucagacacugcuggcccugcacagaagcuaccugacaccuggcgauagcagcagcggauggacagcuggugccgccgcuuacuaugugggcuaccugcagccuagaaccuuccugcugaaguacaacgagaacggcaccaucaccgacgccguggauugugcucuggauccucugagcgagacaaagugcacccugaaguccuucaccguggaaaagggcaucuaccagaccagcaacuuccgggugcagcccaccgaauccaucgugcgguuccccaauaucaccaaucugugccccuucggcgagguguucaaugccaccagauucgccucuguguacgccuggaaccggaagcggaucagcaauugcguggccgacuacuccgugcuguacaacuccgccagcuucagcaccuucaagugcuacggcguguccccuaccaagcugaacgaccugugcuucacaaacguguacgccgacagcuucgugauccggggagaugaagugcggcagauugccccuggacagacaggcaagaucgccgacuacaacuacaagcugcccgacgacuucaccggcugugugauugccuggaacagcaacaaccuggacuccaaagucggcggcaacuacaauuaccuguuccggcuguuccggaaguccaaucugaagcccuucgagcgggacaucagcaccgaaaucuaucaggccggcagcaccccuugcaacggcguggaaggcuucaacugcuacuucccacugcaguccuacggcuuucagcccacaaauggcgugggcuaucagcccuacagagugguggugcugagcuucgaacugcugcaugcuccugccacagugugcggcccuaagaaaagcaccaaucucgugaagaacaaaugcgugaacuucaacuucaacggccugaccggcaccggcgugcugacagagagcaacaagaaguuccugccauuccagcaguuuggccgggauaucgccgauaccacagacgccguuagagauccccagacacuggaaauccuggacaucaccccaugcagcuucggcggagugucugugaucaccccuggcaccaacaccagcaaucagguggcagugcuguaccagggcgugaacuguaccgaagugcccguggccauucacgccgaucagcugacaccuacauggcggguguacuccaccggcagcaauguguuucagaccagagccggcugucugaucggagccgagcacgugaacaauagcuacgagugcgacauccccaucggcgcuggcaucugugccagcuaccagacacagacaaacagccccagacgggcuagaagcguggccagccagagcgugauugccuacacaaugucucugggcgccgagaacagcguggccuacuccaacaacucuaucgcuauccccaccaacuucaccaucagcgugaccaccgagauccugccuguguccaugaccaagaccagcguggacugcaccauguacaucugcggcgauuccaccgagugcuccaaccugcugcugcaguacggcagcuucugcacccagcugaauagagcccugacagggaucgccguggaacaggacaagaacacccaagagguguucgcccaagugaagcaaaucuacaagaccccuccuaucaaggacuucggcggcuucaauuucagccagauucugcccgauccuagcaagcccagcaagcggagcuucaucgaggaccugcuguucaacaaagugacacuggccgacgccggcuucaucaagcaguauggcgauugucugggcgacauugccgccagggaucugauuugcgcccagaaguuuaacggacugacagugcugccuccucugcugaccgaugagaugaucgcccaguacacaucugcccugcuggccggcacaaucacaagcggcuggacauuuggagcuggcgccgcucugcagauccccuuugcuaugcagauggccuaccgguucaacggcaucggagugacccagaaugugcuguacgagaaccagaagcugaucgccaaccaguucaacagcgccaucggcaagauccaggacagccugagcagcacagcaagcgcccugggaaagcugcaggacguggucaaccagaaugcccaggcacugaacacccuggucaagcagcuguccuccaacuucggcgccaucagcucugugcugaacgauauccugagcagacuggacccuccugaggccgaggugcagaucgacagacugaucacaggcagacugcagagccuccagacauacgugacccagcagcugaucagagccgccgagauuagagccucugccaaucuggccgccaccaagaugucugagugugugcugggccagagcaagagaguggacuuuugcggcaagggcuaccaccugaugagcuucccucagucugccccucacggcgugguguuucugcacgugacauaugugcccgcucaagagaagaauuucaccaccgcuccagccaucugccacgacggcaaagcccacuuuccuagagaaggcguguucguguccaacggcacccauugguucgugacacagcggaacuucuacgagccccagaucaucaccaccgacaacaccuucgugucuggcaacugcgacguugugaucggcauugugaacaauaccguguacgacccucugcagcccgagcuggacagcuucaaagaggaacuggacaaguacuuuaagaaccacacaagccccgacguggaccugggcgauaucagcggaaucaaugccagcgucgugaacauccagaaagagaucgaccggcugaacgagguggccaagaaucugaacgagagccugaucgaccugcaagaacuggggaaguacgagcaguacaucaaguggcccugguacaucuggcugggcuuuaucgccggacugauugccaucgugaucgucacaaucaugcuguguugcaugaccagcugcuguagcugccugaagggcuguuguagcuguggcagcugcugcaaguucgacgaggacgauucugagcccgugcugaagggcgugaaacugcacuacaccugaugacucgagcugguacugcaugcacgcaaugcuagcugccccuuucccguccuggguaccccgagucucccccgaccucgggucccagguaugcucccaccuccaccugccccacucaccaccucugcuaguuccagacaccucccaagcacgcagcaaugcagcucaaaacgcuuagccuagccacacccccacgggaaacagcagugauuaaccuuuagcaauaaacgaaaguuuaacuaagcuauacuaaccccaggguuggucaauuucgugccagccacacccuggagcuagcaaaaaaaaaaaaaaaaaaaaaaaaaaaaaaaaaaaaaaaaaaaaaaaaaaaaaaaaaaaaaaaaaaaaaaaaaaaaaaaaaaaaaaaaaaaaaaaaaaaa

SEQ ID NO: 26461 - RNA, 4264 nt, Artificial Sequence
  SARS-CoV-2/Wuhan/WIV05/2019__EPI_ISL_402128 spike protein mRNA gc mod (1-1273)(K986P_V987P_K986P_V987P_H69del_V70del_Y144del_N501Y_A570 D_D614G_P681H_T716I_S982A_D1118H)
agaauaaacuaguauucuucugguccccacagacucagagagaacccgccaccauguucguguuucuggugcugcugccccugguguccagccagugugugaaccugaccaccagaacacagcugccuccagccuacaccaacagcuucaccagaggcguguacuaccccgacaagguguucagauccagcgugcugcacucuacccaggaccuguuccugccuuucuucagcaacgugaccugguuccacgccaucuccggcaccaauggcaccaagagauucgacaaccccgugcugcccuucaacgacgggguguacuuugccagcaccgagaaguccaacaucaucagaggcuggaucuucggcaccacacuggacagcaagacccagagccugcugaucgugaacaacgccaccaacguggucaucaaagugugcgaguuccaguucugcaacgaccccuuccugggcgucuaccacaagaacaacaagagcuggauggaaagcgaguuccggguguacagcagcgccaacaacugcaccuucgaguacgugucccagccuuuccugauggaccuggaaggcaagcagggcaacuucaagaaccugcgcgaguucguguucaagaacaucgacggcuacuucaaaaucuacagcaagcacaccccuaucaaccucgugcgggaucugccucagggcuucucugcucuggaaccccugguggaucugcccaucggcaucaacaucacccgguuucagacacugcuggcccugcacagaagcuaccugacaccuggcgauagcagcagcggauggacagcuggugccgccgcuuacuaugugggcuaccugcagccuagaaccuuccugcugaaguacaacgagaacggcaccaucaccgacgccguggauugugcucuggauccucugagcgagacaaagugcacccugaaguccuucaccguggaaaagggcaucuaccagaccagcaacuuccgggugcagcccaccgaauccaucgugcgguuccccaauaucaccaaucugugccccuucggcgagguguucaaugccaccagauucgccucuguguacgccuggaaccggaagcggaucagcaauugcguggccgacuacuccgugcuguacaacuccgccagcuucagcaccuucaagugcuacggcguguccccuaccaagcugaacgaccugugcuucacaaacguguacgccgacagcuucgugauccggggagaugaagugcggcagauugccccuggacagacaggcaagaucgccgacuacaacuacaagcugcccgacgacuucaccggcugugugauugccuggaacagcaacaaccuggacuccaaagucggcggcaacuacaauuaccuguaccggcuguuccggaaguccaaucugaagcccuucgagcgggacaucagcaccgaaaucuaucaggccggcagcaccccuugcaacggcguggaaggcuucaacugcuacuucccacugcaguccuacggcuuucagcccacauacggcgugggcuaucagcccuacagagugguggugcugagcuucgaacugcugcaugcuccugccacagugugcggcccuaagaaaagcaccaaucucgugaagaacaaaugcgugaacuucaacuucaacggccugaccggcaccggcgugcugacagagagcaacaagaaguuccugccauuccagcaguuuggccgggauaucgacgauaccacagacgccguuagagauccccagacacuggaaauccuggacaucaccccaugcagcuucggcggagugucugugaucaccccuggcaccaacaccagcaaucagguggcagugcuguaccagggcgugaacuguaccgaagugcccguggccauucacgccgaucagcugacaccuacauggcggguguacuccaccggcagcaauguguuucagaccagagccggcugucugaucggagccgagcacgugaacaauagcuacgagugcgacauccccaucggcgcuggcaucugugccagcuaccagacacagacaaacagccacagacgggcuagaagcguggccagccagagcaucauugccuacacaaugucucugggcgccgagaacagcguggccuacuccaacaacucuaucgcuauccccaucaacuucaccaucagcgugaccaccgagauccugccuguguccaugaccaagaccagcguggacugcaccauguacaucugcggcgauuccaccgagugcuccaaccugcugcugcaguacggcagcuucugcacccagcugaauagagcccugacagggaucgccguggaacaggacaagaacacccaagagguguucgcccaagugaagcaaaucuacaagaccccuccuaucaaggacuucggcggcuucaauuucagccagauucugcccgauccuagcaagcccagcaagcggagcuucaucgaggaccugcuguucaacaaagugacacuggccgacgccggcuucaucaagcaguauggcgauugucugggcgacauugccgccagggaucugauuugcgcccagaaguuuaacggacugacagugcugccuccucugcugaccgaugagaugaucgcccaguacacaucugcccugcuggccggcacaaucacaagcggcuggacauuuggagcuggcgccgcucugcagauccccuuugcuaugcagauggccuaccgguucaacggcaucggagugacccagaaugugcuguacgagaaccagaagcugaucgccaaccaguucaacagcgccaucggcaagauccaggacagccugagcagcacagcaagcgcccugggaaagcugcaggacguggucaaccagaaugcccaggcacugaacacccuggucaagcagcuguccuccaacuucggcgccaucagcucugugcugaacgauauccuggccagacuggacccuccugaggccgaggugcagaucgacagacugaucacaggcagacugcagagccuccagacauacgugacccagcagcugaucagagccgccgagauuagagccucugccaaucuggccgccaccaagaugucugagugugugcugggccagagcaagagaguggacuuuugcggcaagggcuaccaccugaugagcuucccucagucugccccucacggcgugguguuucugcacgugacauaugugcccgcucaagagaagaauuucaccaccgcuccagccaucugccacgacggcaaagcccacuuuccuagagaaggcguguucguguccaacggcacccauugguucgugacacagcggaacuucuacgagccccagaucaucaccacccacaacaccuucgugucuggcaacugcgacguugugaucggcauugugaacaauaccguguacgacccucugcagcccgagcuggacagcuucaaagaggaacuggacaaguacuuuaagaaccacacaagccccgacguggaccugggcgauaucagcggaaucaaugccagcgucgugaacauccagaaagagaucgaccggcugaacgagguggccaagaaucugaacgagagccugaucgaccugcaagaacuggggaaguacgagcaguacaucaaguggcccugguacaucuggcugggcuuuaucgccggacugauugccaucgugauggucacaaucaugcuguguugcaugaccagcugcuguagcugccugaagggcuguuguagcuguggcagcugcugcaaguucgacgaggacgauucugagcccgugcugaagggcgugaaacugcacuacaccugaugacucgagcugguacugcaugcacgcaaugcuagcugccccuuucccguccuggguaccccgagucucccccgaccucgggucccagguaugcucccaccuccaccugccccacucaccaccucugcuaguuccagacaccucccaagcacgcagcaaugcagcucaaaacgcuuagccuagccacacccccacgggaaacagcagugauuaaccuuuagcaauaaacgaaaguuuaacuaagcuauacuaaccccaggguuggucaauuucgugccagccacacccuggagcuagcaaaaaaaaaaaaaaaaaaaaaaaaaaaaaaaaaaaaaaaaaaaaaaaaaaaaaaaaaaaaaaaaaaaaaaaaaaaaaaaaaaaaaaaaaaaaaaaaaaaa

SEQ ID NO: 26462 - RNA, 4273 nt, Artificial Sequence
  SARS-CoV-2/Wuhan/WIV05/2019__EPI_ISL_402128 spike protein mRNA gc mod (1-1273)(K986P_V987P_K986P_V987P_K417N_E484K_N501Y_D614G)
agaauaaacuaguauucuucugguccccacagacucagagagaacccgccaccauguucguguuucuggugcugcugccccugguguccagccagugugugaaccugaccaccagaacacagcugccuccagccuacaccaacagcuucaccagaggcguguacuaccccgacaagguguucagauccagcgugcugcacucuacccaggaccuguuccugccuuucuucagcaacgugaccugguuccacgccauccacguguccggcaccaauggcaccaagagauucgacaaccccgugcugcccuucaacgacgggguguacuuugccagcaccgagaaguccaacaucaucagaggcuggaucuucggcaccacacuggacagcaagacccagagccugcugaucgugaacaacgccaccaacguggucaucaaagugugcgaguuccaguucugcaacgaccccuuccugggcgucuacuaccacaagaacaacaagagcuggauggaaagcgaguuccggguguacagcagcgccaacaacugcaccuucgaguacgugucccagccuuuccugauggaccuggaaggcaagcagggcaacuucaagaaccugcgcgaguucguguucaagaacaucgacggcuacuucaaaaucuacagcaagcacaccccuaucaaccucgugcgggaucugccucagggcuucucugcucuggaaccccugguggaucugcccaucggcaucaacaucacccgguuucagacacugcuggcccugcacagaagcuaccugacaccuggcgauagcagcagcggauggacagcuggugccgccgcuuacuaugugggcuaccugcagccuagaaccuuccugcugaaguacaacgagaacggcaccaucaccgacgccguggauugugcucuggauccucugagcgagacaaagugcacccugaaguccuucaccguggaaaagggcaucuaccagaccagcaacuuccgggugcagcccaccgaauccaucgugcgguuccccaauaucaccaaucugugccccuucggcgagguguucaaugccaccagauucgccucuguguacgccuggaaccggaagcggaucagcaauugcguggccgacuacuccgugcuguacaacuccgccagcuucagcaccuucaagugcuacggcguguccccuaccaagcugaacgaccugugcuucacaaacguguacgccgacagcuucgugauccggggagaugaagugcggcagauugccccuggacagacaggcaacaucgccgacuacaacuacaagcugcccgacgacuucaccggcugugugauugccuggaacagcaacaaccuggacuccaaagucggcggcaacuacaauuaccuguaccggcuguuccggaaguccaaucugaagcccuucgagcgggacaucagcaccgaaaucuaucaggccggcagcaccccuugcaacggcgugaagggcuucaacugcuacuucccacugcaguccuacggcuuucagcccacauacggcgugggcuaucagcccuacagagugguggugcugagcuucgaacugcugcaugcuccugccacagugugcggcccuaagaaaagcaccaaucucgugaagaacaaaugcgugaacuucaacuucaacggccugaccggcaccggcgugcugacagagagcaacaagaaguuccugccauuccagcaguuuggccgggauaucgccgauaccacagacgccguuagagauccccagacacuggaaauccuggacaucaccccaugcagcuucggcggagugucugugaucaccccuggcaccaacaccagcaaucagguggcagugcuguaccagggcgugaacuguaccgaagugcccguggccauucacgccgaucagcugacaccuacauggcggguguacuccaccggcagcaauguguuucagaccagagccggcugucugaucggagccgagcacgugaacaauagcuacgagugcgacauccccaucggcgcuggcaucugugccagcuaccagacacagacaaacagccccagacgggcuagaagcguggccagccagagcaucauugccuacacaaugucucugggcgccgagaacagcguggccuacuccaacaacucuaucgcuauccccaccaacuucaccaucagcgugaccaccgagauccugccuguguccaugaccaagaccagcguggacugcaccauguacaucugcggcgauuccaccgagugcuccaaccugcugcugcaguacggcagcuucugcacccagcugaauagagcccugacagggaucgccguggaacaggacaagaacacccaagagguguucgcccaagugaagcaaaucuacaagaccccuccuaucaaggacuucggcggcuucaauuucagccagauucugcccgauccuagcaagcccagcaagcggagcuucaucgaggaccugcuguucaacaaagugacacuggccgacgccggcuucaucaagcaguauggcgauugucugggcgacauugccgccagggaucugauuugcgcccagaaguuuaacggacugacagugcugccuccucugcugaccgaugagaugaucgcccaguacacaucugcccugcuggccggcacaaucacaagcggcuggacauuuggagcuggcgccgcucugcagauccccuuugcuaugcagauggccuaccgguucaacggcaucggagugacccagaaugugcuguacgagaaccagaagcugaucgccaaccaguucaacagcgccaucggcaagauccaggacagccugagcagcacagcaagcgcccugggaaagcugcaggacguggucaaccagaaugcccaggcacugaacacccuggucaagcagcuguccuccaacuucggcgccaucagcucugugcugaacgauauccugagcagacuggacccuccugaggccgaggugcagaucgacagacugaucacaggcagacugcagagccuccagacauacgugacccagcagcugaucagagccgccgagauuagagccucugccaaucuggccgccaccaagaugucugagugugugcugggccagagcaagagaguggacuuuugcggcaagggcuaccaccugaugagcuucccucagucugccccucacggcgugguguuucugcacgugacauaugugcccgcucaagagaagaauuucaccaccgcuccagccaucugccacgacggcaaagcccacuuuccuagagaaggcguguucguguccaacggcacccauugguucgugacacagcggaacuucuacgagccccagaucaucaccaccgacaacaccuucgugucuggcaacugcgacguugugaucggcauugugaacaauaccguguacgacccucugcagcccgagcuggacagcuucaaagaggaacuggacaaguacuuuaagaaccacacaagccccgacguggaccugggcgauaucagcggaaucaaugccagcgucgugaacauccagaaagagaucgaccggcugaacgagguggccaagaaucugaacgagagccugaucgaccugcaagaacuggggaaguacgagcaguacaucaaguggcccugguacaucuggcugggcuuuaucgccggacugauugccaucgugauggucacaaucaugcuguguugcaugaccagcugcuguagcugccugaagggcuguuguagcuguggcagcugcugcaaguucgacgaggacgauucugagcccgugcugaagggcgugaaacugcacuacaccugaugacucgagcugguacugcaugcacgcaaugcuagcugccccuuucccguccuggguaccccgagucucccccgaccucgggucccagguaugcucccaccuccaccugccccacucaccaccucugcuaguuccagacaccucccaagcacgcagcaaugcagcucaaaacgcuuagccuagccacacccccacgggaaacagcagugauuaaccuuuagcaauaaacgaaaguuuaacuaagcuauacuaaccccaggguuggucaauuucgugccagccacacccuggagcuagcaaaaaaaaaaaaaaaaaaaaaaaaaaaaaaaaaaaaaaaaaaaaaaaaaaaaaaaaaaaaaaaaaaaaaaaaaaaaaaaaaaaaaaaaaaaaaaaaaaaa

SEQ ID NO: 26463 - RNA, 4264 nt, Artificial Sequence
  SARS-CoV-2/Wuhan/WIV05/2019__EPI_ISL_402128 spike protein mRNA gc mod (1-1273)(K986P_V987P_K986P_V987P_L18F_D80A_D215G_L242del_A243del_ L244del_R246I_K417N_E484K_N501Y_D614G_A701V)
agaauaaacuaguauucuucugguccccacagacucagagagaacccgccaccauguucguguuucuggugcugcugccccugguguccagccagugugugaacuucaccaccagaacacagcugccuccagccuacaccaacagcuucaccagaggcguguacuaccccgacaagguguucagauccagcgugcugcacucuacccaggaccuguuccugccuuucuucagcaacgugaccugguuccacgccauccacguguccggcaccaauggcaccaagagauucgccaaccccgugcugcccuucaacgacgggguguacuuugccagcaccgagaaguccaacaucaucagaggcuggaucuucggcaccacacuggacagcaagacccagagccugcugaucgugaacaacgccaccaacguggucaucaaagugugcgaguuccaguucugcaacgaccccuuccugggcgucuacuaccacaagaacaacaagagcuggauggaaagcgaguuccggguguacagcagcgccaacaacugcaccuucgaguacgugucccagccuuuccugauggaccuggaaggcaagcagggcaacuucaagaaccugcgcgaguucguguucaagaacaucgacggcuacuucaaaaucuacagcaagcacaccccuaucaaccucgugcggggccugccucagggcuucucugcucuggaaccccugguggaucugcccaucggcaucaacaucacccgguuucagacacugcacaucagcuaccugacaccuggcgauagcagcagcggauggacagcuggugccgccgcuuacuaugugggcuaccugcagccuagaaccuuccugcugaaguacaacgagaacggcaccaucaccgacgccguggauugugcucuggauccucugagcgagacaaagugcacccugaaguccuucaccguggaaaagggcaucuaccagaccagcaacuuccgggugcagcccaccgaauccaucgugcgguuccccaauaucaccaaucugugccccuucggcgagguguucaaugccaccagauucgccucuguguacgccuggaaccggaagcggaucagcaauugcguggccgacuacuccgugcuguacaacuccgccagcuucagcaccuucaagugcuacggcguguccccuaccaagcugaacgaccugugcuucacaaacguguacgccgacagcuucgugauccggggagaugaagugcggcagauugccccuggacagacaggcaacaucgccgacuacaacuacaagcugcccgacgacuucaccggcugugugauugccuggaacagcaacaaccuggacuccaaagucggcggcaacuacaauuaccuguaccggcuguuccggaaguccaaucugaagcccuucgagcgggacaucagcaccgaaaucuaucaggccggcagcaccccuugcaacggcgugaagggcuucaacugcuacuucccacugcaguccuacggcuuucagcccacauacggcgugggcuaucagcccuacagagugguggugcugagcuucgaacugcugcaugcuccugccacagugugcggcccuaagaaaagcaccaaucucgugaagaacaaaugcgugaacuucaacuucaacggccugaccggcaccggcgugcugacagagagcaacaagaaguuccugccauuccagcaguuuggccgggauaucgccgauaccacagacgccguuagagauccccagacacuggaaauccuggacaucaccccaugcagcuucggcggagugucugugaucaccccuggcaccaacaccagcaaucagguggcagugcuguaccagggcgugaacuguaccgaagugcccguggccauucacgccgaucagcugacaccuacauggcggguguacuccaccggcagcaauguguuucagaccagagccggcugucugaucggagccgagcacgugaacaauagcuacgagugcgacauccccaucggcgcuggcaucugugccagcuaccagacacagacaaacagccccagacgggcuagaagcguggccagccagagcaucauugccuacacaaugucucugggcguggagaacagcguggccuacuccaacaacucuaucgcuauccccaccaacuucaccaucagcgugaccaccgagauccugccuguguccaugaccaagaccagcguggacugcaccauguacaucugcggcgauuccaccgagugcuccaaccugcugcugcaguacggcagcuucugcacccagcugaauagagcccugacagggaucgccguggaacaggacaagaacacccaagagguguucgcccaagugaagcaaaucuacaagaccccuccuaucaaggacuucggcggcuucaauuucagccagauucugcccgauccuagcaagcccagcaagcggagcuucaucgaggaccugcuguucaacaaagugacacuggccgacgccggcuucaucaagcaguauggcgauugucugggcgacauugccgccagggaucugauuugcgcccagaaguuuaacggacugacagugcugccuccucugcugaccgaugagaugaucgcccaguacacaucugcccugcuggccggcacaaucacaagcggcuggacauuuggagcuggcgccgcucugcagauccccuuugcuaugcagauggccuaccgguucaacggcaucggagugacccagaaugugcuguacgagaaccagaagcugaucgccaaccaguucaacagcgccaucggcaagauccaggacagccugagcagcacagcaagcgcccugggaaagcugcaggacguggucaaccagaaugcccaggcacugaacacccuggucaagcagcuguccuccaacuucggcgccaucagcucugugcugaacgauauccugagcagacuggacccuccugaggccgaggugcagaucgacagacugaucacaggcagacugcagagccuccagacauacgugacccagcagcugaucagagccgccgagauuagagccucugccaaucuggccgccaccaagaugucugagugugugcugggccagagcaagagaguggacuuuugcggcaagggcuaccaccugaugagcuucccucagucugccccucacggcgugguguuucugcacgugacauaugugcccgcucaagagaagaauuucaccaccgcuccagccaucugccacgacggcaaagcccacuuuccuagagaaggcguguucguguccaacggcacccauugguucgugacacagcggaacuucuacgagccccagaucaucaccaccgacaacaccuucgugucuggcaacugcgacguugugaucggcauugugaacaauaccguguacgacccucugcagcccgagcuggacagcuucaaagaggaacuggacaaguacuuuaagaaccacacaagccccgacguggaccugggcgauaucagcggaaucaaugccagcgucgugaacauccagaaagagaucgaccggcugaacgagguggccaagaaucugaacgagagccugaucgaccugcaagaacuggggaaguacgagcaguacaucaaguggcccugguacaucuggcugggcuuuaucgccggacugauugccaucgugauggucacaaucaugcuguguugcaugaccagcugcuguagcugccugaagggcuguuguagcuguggcagcugcugcaaguucgacgaggacgauucugagcccgugcugaagggcgugaaacugcacuacaccugaugacucgagcugguacugcaugcacgcaaugcuagcugccccuuucccguccuggguaccccgagucucccccgaccucgggucccagguaugcucccaccuccaccugccccacucaccaccucugcuaguuccagacaccucccaagcacgcagcaaugcagcucaaaacgcuuagccuagccacacccccacgggaaacagcagugauuaaccuuuagcaauaaacgaaaguuuaacuaagcuauacuaaccccaggguuggucaauuucgugccagccacacccuggagcuagcaaaaaaaaaaaaaaaaaaaaaaaaaaaaaaaaaaaaaaaaaaaaaaaaaaaaaaaaaaaaaaaaaaaaaaaaaaaaaaaaaaaaaaaaaaaaaaaaaaaa

SEQ ID NO: 26464 - RNA, 4273 nt, Artificial Sequence
  SARS-CoV-2/Wuhan/WIV05/2019__EPI_ISL_402128 spike protein mRNA gc mod (1-1273)(K986P_V987P_K986P_V987P_E484K_D614G)
agaauaaacuaguauucuucugguccccacagacucagagagaacccgccaccauguucguguuucuggugcugcugccccugguguccagccagugugugaaccugaccaccagaacacagcugccuccagccuacaccaacagcuucaccagaggcguguacuaccccgacaagguguucagauccagcgugcugcacucuacccaggaccuguuccugccuuucuucagcaacgugaccugguuccacgccauccacguguccggcaccaauggcaccaagagauucgacaaccccgugcugcccuucaacgacgggguguacuuugccagcaccgagaaguccaacaucaucagaggcuggaucuucggcaccacacuggacagcaagacccagagccugcugaucgugaacaacgccaccaacguggucaucaaagugugcgaguuccaguucugcaacgaccccuuccugggcgucuacuaccacaagaacaacaagagcuggauggaaagcgaguuccggguguacagcagcgccaacaacugcaccuucgaguacgugucccagccuuuccugauggaccuggaaggcaagcagggcaacuucaagaaccugcgcgaguucguguucaagaacaucgacggcuacuucaaaaucuacagcaagcacaccccuaucaaccucgugcgggaucugccucagggcuucucugcucuggaaccccugguggaucugcccaucggcaucaacaucacccgguuucagacacugcuggcccugcacagaagcuaccugacaccuggcgauagcagcagcggauggacagcuggugccgccgcuuacuaugugggcuaccugcagccuagaaccuuccugcugaaguacaacgagaacggcaccaucaccgacgccguggauugugcucuggauccucugagcgagacaaagugcacccugaaguccuucaccguggaaaagggcaucuaccagaccagcaacuuccgggugcagcccaccgaauccaucgugcgguuccccaauaucaccaaucugugccccuucggcgagguguucaaugccaccagauucgccucuguguacgccuggaaccggaagcggaucagcaauugcguggccgacuacuccgugcuguacaacuccgccagcuucagcaccuucaagugcuacggcguguccccuaccaagcugaacgaccugugcuucacaaacguguacgccgacagcuucgugauccggggagaugaagugcggcagauugccccuggacagacaggcaagaucgccgacuacaacuacaagcugcccgacgacuucaccggcugugugauugccuggaacagcaacaaccuggacuccaaagucggcggcaacuacaauuaccuguaccggcuguuccggaaguccaaucugaagcccuucgagcgggacaucagcaccgaaaucuaucaggccggcagcaccccuugcaacggcgugaagggcuucaacugcuacuucccacugcaguccuacggcuuucagcccacaaauggcgugggcuaucagcccuacagagugguggugcugagcuucgaacugcugcaugcuccugccacagugugcggcccuaagaaaagcaccaaucucgugaagaacaaaugcgugaacuucaacuucaacggccugaccggcaccggcgugcugacagagagcaacaagaaguuccugccauuccagcaguuuggccgggauaucgccgauaccacagacgccguuagagauccccagacacuggaaauccuggacaucaccccaugcagcuucggcggagugucugugaucaccccuggcaccaacaccagcaaucagguggcagugcuguaccagggcgugaacuguaccgaagugcccguggccauucacgccgaucagcugacaccuacauggcggguguacuccaccggcagcaauguguuucagaccagagccggcugucugaucggagccgagcacgugaacaauagcuacgagugcgacauccccaucggcgcuggcaucugugccagcuaccagacacagacaaacagccccagacgggcuagaagcguggccagccagagcaucauugccuacacaaugucucugggcgccgagaacagcguggccuacuccaacaacucuaucgcuauccccaccaacuucaccaucagcgugaccaccgagauccugccuguguccaugaccaagaccagcguggacugcaccauguacaucugcggcgauuccaccgagugcuccaaccugcugcugcaguacggcagcuucugcacccagcugaauagagcccugacagggaucgccguggaacaggacaagaacacccaagagguguucgcccaagugaagcaaaucuacaagaccccuccuaucaaggacuucggcggcuucaauuucagccagauucugcccgauccuagcaagcccagcaagcggagcuucaucgaggaccugcuguucaacaaagugacacuggccgacgccggcuucaucaagcaguauggcgauugucugggcgacauugccgccagggaucugauuugcgcccagaaguuuaacggacugacagugcugccuccucugcugaccgaugagaugaucgcccaguacacaucugcccugcuggccggcacaaucacaagcggcuggacauuuggagcuggcgccgcucugcagauccccuuugcuaugcagauggccuaccgguucaacggcaucggagugacccagaaugugcuguacgagaaccagaagcugaucgccaaccaguucaacagcgccaucggcaagauccaggacagccugagcagcacagcaagcgcccugggaaagcugcaggacguggucaaccagaaugcccaggcacugaacacccuggucaagcagcuguccuccaacuucggcgccaucagcucugugcugaacgauauccugagcagacuggacccuccugaggccgaggugcagaucgacagacugaucacaggcagacugcagagccuccagacauacgugacccagcagcugaucagagccgccgagauuagagccucugccaaucuggccgccaccaagaugucugagugugugcugggccagagcaagagaguggacuuuugcggcaagggcuaccaccugaugagcuucccucagucugccccucacggcgugguguuucugcacgugacauaugugcccgcucaagagaagaauuucaccaccgcuccagccaucugccacgacggcaaagcccacuuuccuagagaaggcguguucguguccaacggcacccauugguucgugacacagcggaacuucuacgagccccagaucaucaccaccgacaacaccuucgugucuggcaacugcgacguugugaucggcauugugaacaauaccguguacgacccucugcagcccgagcuggacagcuucaaagaggaacuggacaaguacuuuaagaaccacacaagccccgacguggaccugggcgauaucagcggaaucaaugccagcgucgugaacauccagaaagagaucgaccggcugaacgagguggccaagaaucugaacgagagccugaucgaccugcaagaacuggggaaguacgagcaguacaucaaguggcccugguacaucuggcugggcuuuaucgccggacugauugccaucgugauggucacaaucaugcuguguugcaugaccagcugcuguagcugccugaagggcuguuguagcuguggcagcugcugcaaguucgacgaggacgauucugagcccgugcugaagggcgugaaacugcacuacaccugaugacucgagcugguacugcaugcacgcaaugcuagcugccccuuucccguccuggguaccccgagucucccccgaccucgggucccagguaugcucccaccuccaccugccccacucaccaccucugcuaguuccagacaccucccaagcacgcagcaaugcagcucaaaacgcuuagccuagccacacccccacgggaaacagcagugauuaaccuuuagcaauaaacgaaaguuuaacuaagcuauacuaaccccaggguuggucaauuucgugccagccacacccuggagcuagcaaaaaaaaaaaaaaaaaaaaaaaaaaaaaaaaaaaaaaaaaaaaaaaaaaaaaaaaaaaaaaaaaaaaaaaaaaaaaaaaaaaaaaaaaaaaaaaaaaaa

SEQ ID NO: 26465 - RNA, 4273 nt, Artificial Sequence
  SARS-CoV-2/Wuhan/WIV05/2019__EPI_ISL_402128 spike protein mRNA gc mod (1-1273)(K986P_V987P_K986P_V987P_L18F_T20N_P26S_D138Y_R190S_K417T _E484K_N501Y_D614G_H655Y_T1027I)
agaauaaacuaguauucuucugguccccacagacucagagagaacccgccaccauguucguguuucuggugcugcugccccugguguccagccagugugugaacuucaccaacagaacacagcugccuagcgccuacaccaacagcuucaccagaggcguguacuaccccgacaagguguucagauccagcgugcugcacucuacccaggaccuguuccugccuuucuucagcaacgugaccugguuccacgccauccacguguccggcaccaauggcaccaagagauucgacaaccccgugcugcccuucaacgacgggguguacuuugccagcaccgagaaguccaacaucaucagaggcuggaucuucggcaccacacuggacagcaagacccagagccugcugaucgugaacaacgccaccaacguggucaucaaagugugcgaguuccaguucugcaacuaccccuuccugggcgucuacuaccacaagaacaacaagagcuggauggaaagcgaguuccggguguacagcagcgccaacaacugcaccuucgaguacgugucccagccuuuccugauggaccuggaaggcaagcagggcaacuucaagaaccugagcgaguucguguucaagaacaucgacggcuacuucaaaaucuacagcaagcacaccccuaucaaccucgugcgggaucugccucagggcuucucugcucuggaaccccugguggaucugcccaucggcaucaacaucacccgguuucagacacugcuggcccugcacagaagcuaccugacaccuggcgauagcagcagcggauggacagcuggugccgccgcuuacuaugugggcuaccugcagccuagaaccuuccugcugaaguacaacgagaacggcaccaucaccgacgccguggauugugcucuggauccucugagcgagacaaagugcacccugaaguccuucaccguggaaaagggcaucuaccagaccagcaacuuccgggugcagcccaccgaauccaucgugcgguuccccaauaucaccaaucugugccccuucggcgagguguucaaugccaccagauucgccucuguguacgccuggaaccggaagcggaucagcaauugcguggccgacuacuccgugcuguacaacuccgccagcuucagcaccuucaagugcuacggcguguccccuaccaagcugaacgaccugugcuucacaaacguguacgccgacagcuucgugauccggggagaugaagugcggcagauugccccuggacagacaggcaccaucgccgacuacaacuacaagcugcccgacgacuucaccggcugugugauugccuggaacagcaacaaccuggacuccaaagucggcggcaacuacaauuaccuguaccggcuguuccggaaguccaaucugaagcccuucgagcgggacaucagcaccgaaaucuaucaggccggcagcaccccuugcaacggcgugaagggcuucaacugcuacuucccacugcaguccuacggcuuucagcccacauacggcgugggcuaucagcccuacagagugguggugcugagcuucgaacugcugcaugcuccugccacagugugcggcccuaagaaaagcaccaaucucgugaagaacaaaugcgugaacuucaacuucaacggccugaccggcaccggcgugcugacagagagcaacaagaaguuccugccauuccagcaguuuggccgggauaucgccgauaccacagacgccguuagagauccccagacacuggaaauccuggacaucaccccaugcagcuucggcggagugucugugaucaccccuggcaccaacaccagcaaucagguggcagugcuguaccagggcgugaacuguaccgaagugcccguggccauucacgccgaucagcugacaccuacauggcggguguacuccaccggcagcaauguguuucagaccagagccggcugucugaucggagccgaguacgugaacaauagcuacgagugcgacauccccaucggcgcuggcaucugugccagcuaccagacacagacaaacagccccagacgggcuagaagcguggccagccagagcaucauugccuacacaaugucucugggcgccgagaacagcguggccuacuccaacaacucuaucgcuauccccaccaacuucaccaucagcgugaccaccgagauccugccuguguccaugaccaagaccagcguggacugcaccauguacaucugcggcgauuccaccgagugcuccaaccugcugcugcaguacggcagcuucugcacccagcugaauagagcccugacagggaucgccguggaacaggacaagaacacccaagagguguucgcccaagugaagcaaaucuacaagaccccuccuaucaaggacuucggcggcuucaauuucagccagauucugcccgauccuagcaagcccagcaagcggagcuucaucgaggaccugcuguucaacaaagugacacuggccgacgccggcuucaucaagcaguauggcgauugucugggcgacauugccgccagggaucugauuugcgcccagaaguuuaacggacugacagugcugccuccucugcugaccgaugagaugaucgcccaguacacaucugcccugcuggccggcacaaucacaagcggcuggacauuuggagcuggcgccgcucugcagauccccuuugcuaugcagauggccuaccgguucaacggcaucggagugacccagaaugugcuguacgagaaccagaagcugaucgccaaccaguucaacagcgccaucggcaagauccaggacagccugagcagcacagcaagcgcccugggaaagcugcaggacguggucaaccagaaugcccaggcacugaacacccuggucaagcagcuguccuccaacuucggcgccaucagcucugugcugaacgauauccugagcagacuggacccuccugaggccgaggugcagaucgacagacugaucacaggcagacugcagagccuccagacauacgugacccagcagcugaucagagccgccgagauuagagccucugccaaucuggccgccaucaagaugucugagugugugcugggccagagcaagagaguggacuuuugcggcaagggcuaccaccugaugagcuucccucagucugccccucacggcgugguguuucugcacgugacauaugugcccgcucaagagaagaauuucaccaccgcuccagccaucugccacgacggcaaagcccacuuuccuagagaaggcguguucguguccaacggcacccauugguucgugacacagcggaacuucuacgagccccagaucaucaccaccgacaacaccuucgugucuggcaacugcgacguugugaucggcauugugaacaauaccguguacgacccucugcagcccgagcuggacagcuucaaagaggaacuggacaaguacuuuaagaaccacacaagccccgacguggaccugggcgauaucagcggaaucaaugccagcgucgugaacauccagaaagagaucgaccggcugaacgagguggccaagaaucugaacgagagccugaucgaccugcaagaacuggggaaguacgagcaguacaucaaguggcccugguacaucuggcugggcuuuaucgccggacugauugccaucgugauggucacaaucaugcuguguugcaugaccagcugcuguagcugccugaagggcuguuguagcuguggcagcugcugcaaguucgacgaggacgauucugagcccgugcugaagggcgugaaacugcacuacaccugaugacucgagcugguacugcaugcacgcaaugcuagcugccccuuucccguccuggguaccccgagucucccccgaccucgggucccagguaugcucccaccuccaccugccccacucaccaccucugcuaguuccagacaccucccaagcacgcagcaaugcagcucaaaacgcuuagccuagccacacccccacgggaaacagcagugauuaaccuuuagcaauaaacgaaaguuuaacuaagcuauacuaaccccaggguuggucaauuucgugccagccacacccuggagcuagcaaaaaaaaaaaaaaaaaaaaaaaaaaaaaaaaaaaaaaaaaaaaaaaaaaaaaaaaaaaaaaaaaaaaaaaaaaaaaaaaaaaaaaaaaaaaaaaaaaaa

SEQ ID NO: 26466 - RNA, 4273 nt, Artificial Sequence
  SARS-CoV-2/Wuhan/WIV05/2019__EPI_ISL_402128 spike protein mRNA gc mod (1-1273)(K986P_V987P_K986P_V987P_S13I_W152C_L452R_D614G)
agaauaaacuaguauucuucugguccccacagacucagagagaacccgccaccauguucguguuucuggugcugcugccccugguguccauccagugugugaaccugaccaccagaacacagcugccuccagccuacaccaacagcuucaccagaggcguguacuaccccgacaagguguucagauccagcgugcugcacucuacccaggaccuguuccugccuuucuucagcaacgugaccugguuccacgccauccacguguccggcaccaauggcaccaagagauucgacaaccccgugcugcccuucaacgacgggguguacuuugccagcaccgagaaguccaacaucaucagaggcuggaucuucggcaccacacuggacagcaagacccagagccugcugaucgugaacaacgccaccaacguggucaucaaagugugcgaguuccaguucugcaacgaccccuuccugggcgucuacuaccacaagaacaacaagagcugcauggaaagcgaguuccggguguacagcagcgccaacaacugcaccuucgaguacgugucccagccuuuccugauggaccuggaaggcaagcagggcaacuucaagaaccugcgcgaguucguguucaagaacaucgacggcuacuucaaaaucuacagcaagcacaccccuaucaaccucgugcgggaucugccucagggcuucucugcucuggaaccccugguggaucugcccaucggcaucaacaucacccgguuucagacacugcuggcccugcacagaagcuaccugacaccuggcgauagcagcagcggauggacagcuggugccgccgcuuacuaugugggcuaccugcagccuagaaccuuccugcugaaguacaacgagaacggcaccaucaccgacgccguggauugugcucuggauccucugagcgagacaaagugcacccugaaguccuucaccguggaaaagggcaucuaccagaccagcaacuuccgggugcagcccaccgaauccaucgugcgguuccccaauaucaccaaucugugccccuucggcgagguguucaaugccaccagauucgccucuguguacgccuggaaccggaagcggaucagcaauugcguggccgacuacuccgugcuguacaacuccgccagcuucagcaccuucaagugcuacggcguguccccuaccaagcugaacgaccugugcuucacaaacguguacgccgacagcuucgugauccggggagaugaagugcggcagauugccccuggacagacaggcaagaucgccgacuacaacuacaagcugcccgacgacuucaccggcugugugauugccuggaacagcaacaaccuggacuccaaagucggcggcaacuacaauuaccgcuaccggcuguuccggaaguccaaucugaagcccuucgagcgggacaucagcaccgaaaucuaucaggccggcagcaccccuugcaacggcguggaaggcuucaacugcuacuucccacugcaguccuacggcuuucagcccacaaauggcgugggcuaucagcccuacagagugguggugcugagcuucgaacugcugcaugcuccugccacagugugcggcccuaagaaaagcaccaaucucgugaagaacaaaugcgugaacuucaacuucaacggccugaccggcaccggcgugcugacagagagcaacaagaaguuccugccauuccagcaguuuggccgggauaucgccgauaccacagacgccguuagagauccccagacacuggaaauccuggacaucaccccaugcagcuucggcggagugucugugaucaccccuggcaccaacaccagcaaucagguggcagugcuguaccagggcgugaacuguaccgaagugcccguggccauucacgccgaucagcugacaccuacauggcggguguacuccaccggcagcaauguguuucagaccagagccggcugucugaucggagccgagcacgugaacaauagcuacgagugcgacauccccaucggcgcuggcaucugugccagcuaccagacacagacaaacagccccagacgggcuagaagcguggccagccagagcaucauugccuacacaaugucucugggcgccgagaacagcguggccuacuccaacaacucuaucgcuauccccaccaacuucaccaucagcgugaccaccgagauccugccuguguccaugaccaagaccagcguggacugcaccauguacaucugcggcgauuccaccgagugcuccaaccugcugcugcaguacggcagcuucugcacccagcugaauagagcccugacagggaucgccguggaacaggacaagaacacccaagagguguucgcccaagugaagcaaaucuacaagaccccuccuaucaaggacuucggcggcuucaauuucagccagauucugcccgauccuagcaagcccagcaagcggagcuucaucgaggaccugcuguucaacaaagugacacuggccgacgccggcuucaucaagcaguauggcgauugucugggcgacauugccgccagggaucugauuugcgcccagaaguuuaacggacugacagugcugccuccucugcugaccgaugagaugaucgcccaguacacaucugcccugcuggccggcacaaucacaagcggcuggacauuuggagcuggcgccgcucugcagauccccuuugcuaugcagauggccuaccgguucaacggcaucggagugacccagaaugugcuguacgagaaccagaagcugaucgccaaccaguucaacagcgccaucggcaagauccaggacagccugagcagcacagcaagcgcccugggaaagcugcaggacguggucaaccagaaugcccaggcacugaacacccuggucaagcagcuguccuccaacuucggcgccaucagcucugugcugaacgauauccugagcagacuggacccuccugaggccgaggugcagaucgacagacugaucacaggcagacugcagagccuccagacauacgugacccagcagcugaucagagccgccgagauuagagccucugccaaucuggccgccaccaagaugucugagugugugcugggccagagcaagagaguggacuuuugcggcaagggcuaccaccugaugagcuucccucagucugccccucacggcgugguguuucugcacgugacauaugugcccgcucaagagaagaauuucaccaccgcuccagccaucugccacgacggcaaagcccacuuuccuagagaaggcguguucguguccaacggcacccauugguucgugacacagcggaacuucuacgagccccagaucaucaccaccgacaacaccuucgugucuggcaacugcgacguugugaucggcauugugaacaauaccguguacgacccucugcagcccgagcuggacagcuucaaagaggaacuggacaaguacuuuaagaaccacacaagccccgacguggaccugggcgauaucagcggaaucaaugccagcgucgugaacauccagaaagagaucgaccggcugaacgagguggccaagaaucugaacgagagccugaucgaccugcaagaacuggggaaguacgagcaguacaucaaguggcccugguacaucuggcugggcuuuaucgccggacugauugccaucgugauggucacaaucaugcuguguugcaugaccagcugcuguagcugccugaagggcuguuguagcuguggcagcugcugcaaguucgacgaggacgauucugagcccgugcugaagggcgugaaacugcacuacaccugaugacucgagcugguacugcaugcacgcaaugcuagcugccccuuucccguccuggguaccccgagucucccccgaccucgggucccagguaugcucccaccuccaccugccccacucaccaccucugcuaguuccagacaccucccaagcacgcagcaaugcagcucaaaacgcuuagccuagccacacccccacgggaaacagcagugauuaaccuuuagcaauaaacgaaaguuuaacuaagcuauacuaaccccaggguuggucaauuucgugccagccacacccuggagcuagcaaaaaaaaaaaaaaaaaaaaaaaaaaaaaaaaaaaaaaaaaaaaaaaaaaaaaaaaaaaaaaaaaaaaaaaaaaaaaaaaaaaaaaaaaaaaaaaaaaaa

SEQ ID NO: 26467 - RNA, 4273 nt, Artificial Sequence
  SARS-CoV-2/Wuhan/WIV05/2019__EPI_ISL_402128 spike protein mRNA gc mod (1-1273)(K986P_V987P)
agaauaaacuaguauucuucugguccccacagacucagagagaacccgccaccauguucguguuccuggugcugcugccucugguguccagccagugugugaaccugaccaccagaacacagcugccuccagccuacaccaacagcuuuaccagaggcguguacuaccccgacaagguguucagauccagcgugcugcacucuacccaggaccuguuccugccuuucuucagcaacgugaccugguuccacgccauccacguguccggcaccaauggcaccaagagauucgacaaccccgugcugcccuucaacgacgggguguacuuugccagcaccgagaaguccaacaucaucagaggcuggaucuucggcaccacacuggacagcaagacccagagccugcugaucgugaacaacgccaccaacguggucaucaaagugugcgaguuccaguucugcaacgaccccuuccugggcgucuacuaccacaagaacaacaagagcuggauggaaagcgaguuccggguguacagcagcgccaacaacugcaccuucgaguacgugucccagccuuuccugauggaccuggaaggcaagcagggcaacuucaagaaccugcgcgaguucguguuuaagaacaucgacggcuacuucaagaucuacagcaagcacaccccuaucaaccucgugcgggaucugccucagggcuucucugcucuggaaccccugguggaucugcccaucggcaucaacaucacccgguuucagacacugcuggcccugcacagaagcuaccugacaccuggcgauagcagcagcggauggacagcuggugccgccgcuuacuaugugggcuaccugcagccuagaaccuuccugcugaaguacaacgagaacggcaccaucaccgacgccguggauugugcucuggauccucugagcgagacaaagugcacccugaaguccuucaccguggaaaagggcaucuaccagaccagcaacuuccgggugcagcccaccgaauccaucgugcgguuccccaauaucaccaaucugugccccuucggcgagguguucaaugccaccagauucgccucuguguacgccuggaaccggaagcggaucagcaauugcguggccgacuacuccgugcuguacaacuccgccagcuucagcaccuucaagugcuacggcguguccccuaccaagcugaacgaccugugcuucacaaacguguacgccgacagcuucgugauccggggagaugaagugcggcagauugccccuggacagacaggcaagaucgccgacuacaacuacaagcugcccgacgacuucaccggcugugugauugccuggaacagcaacaaccuggacuccaaagucggcggcaacuacaauuaccuguaccggcuguuccggaaguccaaucugaagcccuucgagcgggacaucuccaccgagaucuaucaggccggcagcaccccuuguaacggcguggaaggcuucaacugcuacuucccacugcaguccuacggcuuucagcccacaaauggcgugggcuaucagcccuacagagugguggugcugagcuucgaacugcugcaugccccugccacagugugcggcccuaagaaaagcaccaaucucgugaagaacaaaugcgugaacuucaacuucaacggccugaccggcaccggcgugcugacagagagcaacaagaaguuccugccauuccagcaguuuggccgggauaucgccgauaccacagacgccguuagagauccccagacacuggaaauccuggacaucaccccuugcagcuucggcggagugucugugaucaccccuggcaccaacaccagcaaucagguggcagugcuguaccaggacgugaacuguaccgaagugcccguggccauucacgccgaucagcugacaccuacauggcggguguacuccaccggcagcaauguguuucagaccagagccggcugucugaucggagccgagcacgugaacaauagcuacgagugcgacauccccaucggcgcuggaaucugcgccagcuaccagacacagacaaacagcccucggagagccagaagcguggccagccagagcaucauugccuacacaaugucucugggcgccgagaacagcguggccuacuccaacaacucuaucgcuauccccaccaacuucaccaucagcgugaccacagagauccugccuguguccaugaccaagaccagcguggacugcaccauguacaucugcggcgauuccaccgagugcuccaaccugcugcugcaguacggcagcuucugcacccagcugaauagagcccugacagggaucgccguggaacaggacaagaacacccaagagguguucgcccaagugaagcagaucuacaagaccccuccuaucaaggacuucggcggcuucaauuucagccagauucugcccgauccuagcaagcccagcaagcggagcuucaucgaggaccugcuguucaacaaagugacacuggccgacgccggcuucaucaagcaguauggcgauugucugggcgacauugccgccagggaucugauuugcgcccagaaguuuaacggacugacagugcugccuccucugcugaccgaugagaugaucgcccaguacacaucugcccugcuggccggcacaaucacaagcggcuggacauuuggagcaggcgccgcucugcagauccccuuugcuaugcagauggccuaccgguucaacggcaucggagugacccagaaugugcuguacgagaaccagaagcugaucgccaaccaguucaacagcgccaucggcaagauccaggacagccugagcagcacagcaagcgcccugggaaagcugcaggacguggucaaccagaaugcccaggcacugaacacccuggucaagcagcuguccuccaacuucggcgccaucagcucugugcugaacgauauccugagcagacuggacccuccugaggccgaggugcagaucgacagacugaucacaggcagacugcagagccuccagacauacgugacccagcagcugaucagagccgccgagauuagagccucugccaaucuggccgccaccaagaugucugagugugugcugggccagagcaagagaguggacuuuugcggcaagggcuaccaccugaugagcuucccucagucugccccucacggcgugguguuucugcacgugacauaugugcccgcucaagagaagaauuucaccaccgcuccagccaucugccacgacggcaaagcccacuuuccuagagaaggcguguucguguccaacggcacccauugguucgugacacagcggaacuucuacgagccccagaucaucaccaccgacaacaccuucgugucuggcaacugcgacgucgugaucggcauugugaacaauaccguguacgacccucugcagcccgagcuggacagcuucaaagaggaacuggacaaguacuuuaagaaccacacaagccccgacguggaccugggcgauaucagcggaaucaaugccagcgucgugaacauccagaaagagaucgaccggcugaacgagguggccaagaaucugaacgagagccugaucgaccugcaagaacuggggaaguacgagcaguacaucaaguggcccugguacaucuggcugggcuuuaucgccggacugauugccaucgugauggucacaaucaugcuguguugcaugaccagcugcuguagcugccugaagggcuguuguagcuguggcagcugcugcaaguucgacgaggacgauucugagcccgugcugaagggcgugaaacugcacuacacaugaugacucgagcugguacugcaugcacgcaaugcuagcugccccuuucccguccuggguaccccgagucucccccgaccucgggucccagguaugcucccaccuccaccugccccacucaccaccucugcuaguuccagacaccucccaagcacgcagcaaugcagcucaaaacgcuuagccuagccacacccccacgggaaacagcagugauuaaccuuuagcaauaaacgaaaguuuaacuaagcuauacuaaccccaggguuggucaauuucgugccagccacacccuggagcuagcaaaaaaaaaaaaaaaaaaaaaaaaaaaaaaaaaaaaaaaaaaaaaaaaaaaaaaaaaaaaaaaaaaaaaaaaaaaaaaaaaaaaaaaaaaaaaaaaaaaa

SEQ ID NO: 26468 - RNA, 4273 nt, Artificial Sequence
  SARS-CoV-2/Wuhan/WIV05/2019__EPI_ISL_402128 spike protein mRNA gc mod (1-1273)(K986P_V987P_ D614G)
agaauaaacuaguauucuucugguccccacagacucagagagaacccgccaccauguucguguuccuggugcugcugccucugguguccagccagugugugaaccugaccaccagaacacagcugccuccagccuacaccaacagcuuuaccagaggcguguacuaccccgacaagguguucagauccagcgugcugcacucuacccaggaccuguuccugccuuucuucagcaacgugaccugguuccacgccauccacguguccggcaccaauggcaccaagagauucgacaaccccgugcugcccuucaacgacgggguguacuuugccagcaccgagaaguccaacaucaucagaggcuggaucuucggcaccacacuggacagcaagacccagagccugcugaucgugaacaacgccaccaacguggucaucaaagugugcgaguuccaguucugcaacgaccccuuccugggcgucuacuaccacaagaacaacaagagcuggauggaaagcgaguuccggguguacagcagcgccaacaacugcaccuucgaguacgugucccagccuuuccugauggaccuggaaggcaagcagggcaacuucaagaaccugcgcgaguucguguuuaagaacaucgacggcuacuucaagaucuacagcaagcacaccccuaucaaccucgugcgggaucugccucagggcuucucugcucuggaaccccugguggaucugcccaucggcaucaacaucacccgguuucagacacugcuggcccugcacagaagcuaccugacaccuggcgauagcagcagcggauggacagcuggugccgccgcuuacuaugugggcuaccugcagccuagaaccuuccugcugaaguacaacgagaacggcaccaucaccgacgccguggauugugcucuggauccucugagcgagacaaagugcacccugaaguccuucaccguggaaaagggcaucuaccagaccagcaacuuccgggugcagcccaccgaauccaucgugcgguuccccaauaucaccaaucugugccccuucggcgagguguucaaugccaccagauucgccucuguguacgccuggaaccggaagcggaucagcaauugcguggccgacuacuccgugcuguacaacuccgccagcuucagcaccuucaagugcuacggcguguccccuaccaagcugaacgaccugugcuucacaaacguguacgccgacagcuucgugauccggggagaugaagugcggcagauugccccuggacagacaggcaagaucgccgacuacaacuacaagcugcccgacgacuucaccggcugugugauugccuggaacagcaacaaccuggacuccaaagucggcggcaacuacaauuaccuguaccggcuguuccggaaguccaaucugaagcccuucgagcgggacaucuccaccgagaucuaucaggccggcagcaccccuuguaacggcguggaaggcuucaacugcuacuucccacugcaguccuacggcuuucagcccacaaauggcgugggcuaucagcccuacagagugguggugcugagcuucgaacugcugcaugccccugccacagugugcggcccuaagaaaagcaccaaucucgugaagaacaaaugcgugaacuucaacuucaacggccugaccggcaccggcgugcugacagagagcaacaagaaguuccugccauuccagcaguuuggccgggauaucgccgauaccacagacgccguuagagauccccagacacuggaaauccuggacaucaccccuugcagcuucggcggagugucugugaucaccccuggcaccaacaccagcaaucagguggcagugcuguaccagggcgugaacuguaccgaagugcccguggccauucacgccgaucagcugacaccuacauggcggguguacuccaccggcagcaauguguuucagaccagagccggcugucugaucggagccgagcacgugaacaauagcuacgagugcgacauccccaucggcgcuggaaucugcgccagcuaccagacacagacaaacagcccucggagagccagaagcguggccagccagagcaucauugccuacacaaugucucugggcgccgagaacagcguggccuacuccaacaacucuaucgcuauccccaccaacuucaccaucagcgugaccacagagauccugccuguguccaugaccaagaccagcguggacugcaccauguacaucugcggcgauuccaccgagugcuccaaccugcugcugcaguacggcagcuucugcacccagcugaauagagcccugacagggaucgccguggaacaggacaagaacacccaagagguguucgcccaagugaagcagaucuacaagaccccuccuaucaaggacuucggcggcuucaauuucagccagauucugcccgauccuagcaagcccagcaagcggagcuucaucgaggaccugcuguucaacaaagugacacuggccgacgccggcuucaucaagcaguauggcgauugucugggcgacauugccgccagggaucugauuugcgcccagaaguuuaacggacugacagugcugccuccucugcugaccgaugagaugaucgcccaguacacaucugcccugcuggccggcacaaucacaagcggcuggacauuuggagcaggcgccgcucugcagauccccuuugcuaugcagauggccuaccgguucaacggcaucggagugacccagaaugugcuguacgagaaccagaagcugaucgccaaccaguucaacagcgccaucggcaagauccaggacagccugagcagcacagcaagcgcccugggaaagcugcaggacguggucaaccagaaugcccaggcacugaacacccuggucaagcagcuguccuccaacuucggcgccaucagcucugugcugaacgauauccugagcagacuggacccuccugaggccgaggugcagaucgacagacugaucacaggcagacugcagagccuccagacauacgugacccagcagcugaucagagccgccgagauuagagccucugccaaucuggccgccaccaagaugucugagugugugcugggccagagcaagagaguggacuuuugcggcaagggcuaccaccugaugagcuucccucagucugccccucacggcgugguguuucugcacgugacauaugugcccgcucaagagaagaauuucaccaccgcuccagccaucugccacgacggcaaagcccacuuuccuagagaaggcguguucguguccaacggcacccauugguucgugacacagcggaacuucuacgagccccagaucaucaccaccgacaacaccuucgugucuggcaacugcgacgucgugaucggcauugugaacaauaccguguacgacccucugcagcccgagcuggacagcuucaaagaggaacuggacaaguacuuuaagaaccacacaagccccgacguggaccugggcgauaucagcggaaucaaugccagcgucgugaacauccagaaagagaucgaccggcugaacgagguggccaagaaucugaacgagagccugaucgaccugcaagaacuggggaaguacgagcaguacaucaaguggcccugguacaucuggcugggcuuuaucgccggacugauugccaucgugauggucacaaucaugcuguguugcaugaccagcugcuguagcugccugaagggcuguuguagcuguggcagcugcugcaaguucgacgaggacgauucugagcccgugcugaagggcgugaaacugcacuacacaugaugacucgagcugguacugcaugcacgcaaugcuagcugccccuuucccguccuggguaccccgagucucccccgaccucgggucccagguaugcucccaccuccaccugccccacucaccaccucugcuaguuccagacaccucccaagcacgcagcaaugcagcucaaaacgcuuagccuagccacacccccacgggaaacagcagugauuaaccuuuagcaauaaacgaaaguuuaacuaagcuauacuaaccccaggguuggucaauuucgugccagccacacccuggagcuagcaaaaaaaaaaaaaaaaaaaaaaaaaaaaaaaaaaaaaaaaaaaaaaaaaaaaaaaaaaaaaaaaaaaaaaaaaaaaaaaaaaaaaaaaaaaaaaaaaaaa

SEQ ID NO: 26469 - RNA, 4273 nt, Artificial Sequence
  SARS-CoV-2/Wuhan/WIV05/2019__EPI_ISL_402128 spike protein mRNA gc mod (1-1273)(K986P_V987P_A222V_D614G)
agaauaaacuaguauucuucugguccccacagacucagagagaacccgccaccauguucguguuccuggugcugcugccucugguguccagccagugugugaaccugaccaccagaacacagcugccuccagccuacaccaacagcuuuaccagaggcguguacuaccccgacaagguguucagauccagcgugcugcacucuacccaggaccuguuccugccuuucuucagcaacgugaccugguuccacgccauccacguguccggcaccaauggcaccaagagauucgacaaccccgugcugcccuucaacgacgggguguacuuugccagcaccgagaaguccaacaucaucagaggcuggaucuucggcaccacacuggacagcaagacccagagccugcugaucgugaacaacgccaccaacguggucaucaaagugugcgaguuccaguucugcaacgaccccuuccugggcgucuacuaccacaagaacaacaagagcuggauggaaagcgaguuccggguguacagcagcgccaacaacugcaccuucgaguacgugucccagccuuuccugauggaccuggaaggcaagcagggcaacuucaagaaccugcgcgaguucguguuuaagaacaucgacggcuacuucaagaucuacagcaagcacaccccuaucaaccucgugcgggaucugccucagggcuucucugugcuggaaccccugguggaucugcccaucggcaucaacaucacccgguuucagacacugcuggcccugcacagaagcuaccugacaccuggcgauagcagcagcggauggacagcuggugccgccgcuuacuaugugggcuaccugcagccuagaaccuuccugcugaaguacaacgagaacggcaccaucaccgacgccguggauugugcucuggauccucugagcgagacaaagugcacccugaaguccuucaccguggaaaagggcaucuaccagaccagcaacuuccgggugcagcccaccgaauccaucgugcgguuccccaauaucaccaaucugugccccuucggcgagguguucaaugccaccagauucgccucuguguacgccuggaaccggaagcggaucagcaauugcguggccgacuacuccgugcuguacaacuccgccagcuucagcaccuucaagugcuacggcguguccccuaccaagcugaacgaccugugcuucacaaacguguacgccgacagcuucgugauccggggagaugaagugcggcagauugccccuggacagacaggcaagaucgccgacuacaacuacaagcugcccgacgacuucaccggcugugugauugccuggaacagcaacaaccuggacuccaaagucggcggcaacuacaauuaccuguaccggcuguuccggaaguccaaucugaagcccuucgagcgggacaucuccaccgagaucuaucaggccggcagcaccccuuguaacggcguggaaggcuucaacugcuacuucccacugcaguccuacggcuuucagcccacaaauggcgugggcuaucagcccuacagagugguggugcugagcuucgaacugcugcaugccccugccacagugugcggcccuaagaaaagcaccaaucucgugaagaacaaaugcgugaacuucaacuucaacggccugaccggcaccggcgugcugacagagagcaacaagaaguuccugccauuccagcaguuuggccgggauaucgccgauaccacagacgccguuagagauccccagacacuggaaauccuggacaucaccccuugcagcuucggcggagugucugugaucaccccuggcaccaacaccagcaaucagguggcagugcuguaccagggcgugaacuguaccgaagugcccguggccauucacgccgaucagcugacaccuacauggcggguguacuccaccggcagcaauguguuucagaccagagccggcugucugaucggagccgagcacgugaacaauagcuacgagugcgacauccccaucggcgcuggaaucugcgccagcuaccagacacagacaaacagcccucggagagccagaagcguggccagccagagcaucauugccuacacaaugucucugggcgccgagaacagcguggccuacuccaacaacucuaucgcuauccccaccaacuucaccaucagcgugaccacagagauccugccuguguccaugaccaagaccagcguggacugcaccauguacaucugcggcgauuccaccgagugcuccaaccugcugcugcaguacggcagcuucugcacccagcugaauagagcccugacagggaucgccguggaacaggacaagaacacccaagagguguucgcccaagugaagcagaucuacaagaccccuccuaucaaggacuucggcggcuucaauuucagccagauucugcccgauccuagcaagcccagcaagcggagcuucaucgaggaccugcuguucaacaaagugacacuggccgacgccggcuucaucaagcaguauggcgauugucugggcgacauugccgccagggaucugauuugcgcccagaaguuuaacggacugacagugcugccuccucugcugaccgaugagaugaucgcccaguacacaucugcccugcuggccggcacaaucacaagcggcuggacauuuggagcaggcgccgcucugcagauccccuuugcuaugcagauggccuaccgguucaacggcaucggagugacccagaaugugcuguacgagaaccagaagcugaucgccaaccaguucaacagcgccaucggcaagauccaggacagccugagcagcacagcaagcgcccugggaaagcugcaggacguggucaaccagaaugcccaggcacugaacacccuggucaagcagcuguccuccaacuucggcgccaucagcucugugcugaacgauauccugagcagacuggacccuccugaggccgaggugcagaucgacagacugaucacaggcagacugcagagccuccagacauacgugacccagcagcugaucagagccgccgagauuagagccucugccaaucuggccgccaccaagaugucugagugugugcugggccagagcaagagaguggacuuuugcggcaagggcuaccaccugaugagcuucccucagucugccccucacggcgugguguuucugcacgugacauaugugcccgcucaagagaagaauuucaccaccgcuccagccaucugccacgacggcaaagcccacuuuccuagagaaggcguguucguguccaacggcacccauugguucgugacacagcggaacuucuacgagccccagaucaucaccaccgacaacaccuucgugucuggcaacugcgacgucgugaucggcauugugaacaauaccguguacgacccucugcagcccgagcuggacagcuucaaagaggaacuggacaaguacuuuaagaaccacacaagccccgacguggaccugggcgauaucagcggaaucaaugccagcgucgugaacauccagaaagagaucgaccggcugaacgagguggccaagaaucugaacgagagccugaucgaccugcaagaacuggggaaguacgagcaguacaucaaguggcccugguacaucuggcugggcuuuaucgccggacugauugccaucgugauggucacaaucaugcuguguugcaugaccagcugcuguagcugccugaagggcuguuguagcuguggcagcugcugcaaguucgacgaggacgauucugagcccgugcugaagggcgugaaacugcacuacacaugaugacucgagcugguacugcaugcacgcaaugcuagcugccccuuucccguccuggguaccccgagucucccccgaccucgggucccagguaugcucccaccuccaccugccccacucaccaccucugcuaguuccagacaccucccaagcacgcagcaaugcagcucaaaacgcuuagccuagccacacccccacgggaaacagcagugauuaaccuuuagcaauaaacgaaaguuuaacuaagcuauacuaaccccaggguuggucaauuucgugccagccacacccuggagcuagcaaaaaaaaaaaaaaaaaaaaaaaaaaaaaaaaaaaaaaaaaaaaaaaaaaaaaaaaaaaaaaaaaaaaaaaaaaaaaaaaaaaaaaaaaaaaaaaaaaaa

SEQ ID NO: 26470 - RNA, 4273 nt, Artificial Sequence
  SARS-CoV-2/Wuhan/WIV05/2019__EPI_ISL_402128 spike protein mRNA gc mod (1-1273)(K986P_V987P_N439K_D614G)
agaauaaacuaguauucuucugguccccacagacucagagagaacccgccaccauguucguguuccuggugcugcugccucugguguccagccagugugugaaccugaccaccagaacacagcugccuccagccuacaccaacagcuuuaccagaggcguguacuaccccgacaagguguucagauccagcgugcugcacucuacccaggaccuguuccugccuuucuucagcaacgugaccugguuccacgccauccacguguccggcaccaauggcaccaagagauucgacaaccccgugcugcccuucaacgacgggguguacuuugccagcaccgagaaguccaacaucaucagaggcuggaucuucggcaccacacuggacagcaagacccagagccugcugaucgugaacaacgccaccaacguggucaucaaagugugcgaguuccaguucugcaacgaccccuuccugggcgucuacuaccacaagaacaacaagagcuggauggaaagcgaguuccggguguacagcagcgccaacaacugcaccuucgaguacgugucccagccuuuccugauggaccuggaaggcaagcagggcaacuucaagaaccugcgcgaguucguguuuaagaacaucgacggcuacuucaagaucuacagcaagcacaccccuaucaaccucgugcgggaucugccucagggcuucucugcucuggaaccccugguggaucugcccaucggcaucaacaucacccgguuucagacacugcuggcccugcacagaagcuaccugacaccuggcgauagcagcagcggauggacagcuggugccgccgcuuacuaugugggcuaccugcagccuagaaccuuccugcugaaguacaacgagaacggcaccaucaccgacgccguggauugugcucuggauccucugagcgagacaaagugcacccugaaguccuucaccguggaaaagggcaucuaccagaccagcaacuuccgggugcagcccaccgaauccaucgugcgguuccccaauaucaccaaucugugccccuucggcgagguguucaaugccaccagauucgccucuguguacgccuggaaccggaagcggaucagcaauugcguggccgacuacuccgugcuguacaacuccgccagcuucagcaccuucaagugcuacggcguguccccuaccaagcugaacgaccugugcuucacaaacguguacgccgacagcuucgugauccggggagaugaagugcggcagauugccccuggacagacaggcaagaucgccgacuacaacuacaagcugcccgacgacuucaccggcugugugauugccuggaacagcaagaaccuggacuccaaagucggcggcaacuacaauuaccuguaccggcuguuccggaaguccaaucugaagcccuucgagcgggacaucuccaccgagaucuaucaggccggcagcaccccuuguaacggcguggaaggcuucaacugcuacuucccacugcaguccuacggcuuucagcccacaaauggcgugggcuaucagcccuacagagugguggugcugagcuucgaacugcugcaugccccugccacagugugcggcccuaagaaaagcaccaaucucgugaagaacaaaugcgugaacuucaacuucaacggccugaccggcaccggcgugcugacagagagcaacaagaaguuccugccauuccagcaguuuggccgggauaucgccgauaccacagacgccguuagagauccccagacacuggaaauccuggacaucaccccuugcagcuucggcggagugucugugaucaccccuggcaccaacaccagcaaucagguggcagugcuguaccagggcgugaacuguaccgaagugcccguggccauucacgccgaucagcugacaccuacauggcggguguacuccaccggcagcaauguguuucagaccagagccggcugucugaucggagccgagcacgugaacaauagcuacgagugcgacauccccaucggcgcuggaaucugcgccagcuaccagacacagacaaacagcccucggagagccagaagcguggccagccagagcaucauugccuacacaaugucucugggcgccgagaacagcguggccuacuccaacaacucuaucgcuauccccaccaacuucaccaucagcgugaccacagagauccugccuguguccaugaccaagaccagcguggacugcaccauguacaucugcggcgauuccaccgagugcuccaaccugcugcugcaguacggcagcuucugcacccagcugaauagagcccugacagggaucgccguggaacaggacaagaacacccaagagguguucgcccaagugaagcagaucuacaagaccccuccuaucaaggacuucggcggcuucaauuucagccagauucugcccgauccuagcaagcccagcaagcggagcuucaucgaggaccugcuguucaacaaagugacacuggccgacgccggcuucaucaagcaguauggcgauugucugggcgacauugccgccagggaucugauuugcgcccagaaguuuaacggacugacagugcugccuccucugcugaccgaugagaugaucgcccaguacacaucugcccugcuggccggcacaaucacaagcggcuggacauuuggagcaggcgccgcucugcagauccccuuugcuaugcagauggccuaccgguucaacggcaucggagugacccagaaugugcuguacgagaaccagaagcugaucgccaaccaguucaacagcgccaucggcaagauccaggacagccugagcagcacagcaagcgcccugggaaagcugcaggacguggucaaccagaaugcccaggcacugaacacccuggucaagcagcuguccuccaacuucggcgccaucagcucugugcugaacgauauccugagcagacuggacccuccugaggccgaggugcagaucgacagacugaucacaggcagacugcagagccuccagacauacgugacccagcagcugaucagagccgccgagauuagagccucugccaaucuggccgccaccaagaugucugagugugugcugggccagagcaagagaguggacuuuugcggcaagggcuaccaccugaugagcuucccucagucugccccucacggcgugguguuucugcacgugacauaugugcccgcucaagagaagaauuucaccaccgcuccagccaucugccacgacggcaaagcccacuuuccuagagaaggcguguucguguccaacggcacccauugguucgugacacagcggaacuucuacgagccccagaucaucaccaccgacaacaccuucgugucuggcaacugcgacgucgugaucggcauugugaacaauaccguguacgacccucugcagcccgagcuggacagcuucaaagaggaacuggacaaguacuuuaagaaccacacaagccccgacguggaccugggcgauaucagcggaaucaaugccagcgucgugaacauccagaaagagaucgaccggcugaacgagguggccaagaaucugaacgagagccugaucgaccugcaagaacuggggaaguacgagcaguacaucaaguggcccugguacaucuggcugggcuuuaucgccggacugauugccaucgugauggucacaaucaugcuguguugcaugaccagcugcuguagcugccugaagggcuguuguagcuguggcagcugcugcaaguucgacgaggacgauucugagcccgugcugaagggcgugaaacugcacuacacaugaugacucgagcugguacugcaugcacgcaaugcuagcugccccuuucccguccuggguaccccgagucucccccgaccucgggucccagguaugcucccaccuccaccugccccacucaccaccucugcuaguuccagacaccucccaagcacgcagcaaugcagcucaaaacgcuuagccuagccacacccccacgggaaacagcagugauuaaccuuuagcaauaaacgaaaguuuaacuaagcuauacuaaccccaggguuggucaauuucgugccagccacacccuggagcuagcaaaaaaaaaaaaaaaaaaaaaaaaaaaaaaaaaaaaaaaaaaaaaaaaaaaaaaaaaaaaaaaaaaaaaaaaaaaaaaaaaaaaaaaaaaaaaaaaaaaa

SEQ ID NO: 26471 - RNA, 4273 nt, Artificial Sequence
  SARS-CoV-2/Wuhan/WIV05/2019__EPI_ISL_402128 spike protein mRNA gc mod (1-1273)(K986P_V987P_S477N_D614G)
agaauaaacuaguauucuucugguccccacagacucagagagaacccgccaccauguucguguuccuggugcugcugccucugguguccagccagugugugaaccugaccaccagaacacagcugccuccagccuacaccaacagcuuuaccagaggcguguacuaccccgacaagguguucagauccagcgugcugcacucuacccaggaccuguuccugccuuucuucagcaacgugaccugguuccacgccauccacguguccggcaccaauggcaccaagagauucgacaaccccgugcugcccuucaacgacgggguguacuuugccagcaccgagaaguccaacaucaucagaggcuggaucuucggcaccacacuggacagcaagacccagagccugcugaucgugaacaacgccaccaacguggucaucaaagugugcgaguuccaguucugcaacgaccccuuccugggcgucuacuaccacaagaacaacaagagcuggauggaaagcgaguuccggguguacagcagcgccaacaacugcaccuucgaguacgugucccagccuuuccugauggaccuggaaggcaagcagggcaacuucaagaaccugcgcgaguucguguuuaagaacaucgacggcuacuucaagaucuacagcaagcacaccccuaucaaccucgugcgggaucugccucagggcuucucugcucuggaaccccugguggaucugcccaucggcaucaacaucacccgguuucagacacugcuggcccugcacagaagcuaccugacaccuggcgauagcagcagcggauggacagcuggugccgccgcuuacuaugugggcuaccugcagccuagaaccuuccugcugaaguacaacgagaacggcaccaucaccgacgccguggauugugcucuggauccucugagcgagacaaagugcacccugaaguccuucaccguggaaaagggcaucuaccagaccagcaacuuccgggugcagcccaccgaauccaucgugcgguuccccaauaucaccaaucugugccccuucggcgagguguucaaugccaccagauucgccucuguguacgccuggaaccggaagcggaucagcaauugcguggccgacuacuccgugcuguacaacuccgccagcuucagcaccuucaagugcuacggcguguccccuaccaagcugaacgaccugugcuucacaaacguguacgccgacagcuucgugauccggggagaugaagugcggcagauugccccuggacagacaggcaagaucgccgacuacaacuacaagcugcccgacgacuucaccggcugugugauugccuggaacagcaacaaccuggacuccaaagucggcggcaacuacaauuaccuguaccggcuguuccggaaguccaaucugaagcccuucgagcgggacaucuccaccgagaucuaucaggccggcaacaccccuuguaacggcguggaaggcuucaacugcuacuucccacugcaguccuacggcuuucagcccacaaauggcgugggcuaucagcccuacagagugguggugcugagcuucgaacugcugcaugccccugccacagugugcggcccuaagaaaagcaccaaucucgugaagaacaaaugcgugaacuucaacuucaacggccugaccggcaccggcgugcugacagagagcaacaagaaguuccugccauuccagcaguuuggccgggauaucgccgauaccacagacgccguuagagauccccagacacuggaaauccuggacaucaccccuugcagcuucggcggagugucugugaucaccccuggcaccaacaccagcaaucagguggcagugcuguaccagggcgugaacuguaccgaagugcccguggccauucacgccgaucagcugacaccuacauggcggguguacuccaccggcagcaauguguuucagaccagagccggcugucugaucggagccgagcacgugaacaauagcuacgagugcgacauccccaucggcgcuggaaucugcgccagcuaccagacacagacaaacagcccucggagagccagaagcguggccagccagagcaucauugccuacacaaugucucugggcgccgagaacagcguggccuacuccaacaacucuaucgcuauccccaccaacuucaccaucagcgugaccacagagauccugccuguguccaugaccaagaccagcguggacugcaccauguacaucugcggcgauuccaccgagugcuccaaccugcugcugcaguacggcagcuucugcacccagcugaauagagcccugacagggaucgccguggaacaggacaagaacacccaagagguguucgcccaagugaagcagaucuacaagaccccuccuaucaaggacuucggcggcuucaauuucagccagauucugcccgauccuagcaagcccagcaagcggagcuucaucgaggaccugcuguucaacaaagugacacuggccgacgccggcuucaucaagcaguauggcgauugucugggcgacauugccgccagggaucugauuugcgcccagaaguuuaacggacugacagugcugccuccucugcugaccgaugagaugaucgcccaguacacaucugcccugcuggccggcacaaucacaagcggcuggacauuuggagcaggcgccgcucugcagauccccuuugcuaugcagauggccuaccgguucaacggcaucggagugacccagaaugugcuguacgagaaccagaagcugaucgccaaccaguucaacagcgccaucggcaagauccaggacagccugagcagcacagcaagcgcccugggaaagcugcaggacguggucaaccagaaugcccaggcacugaacacccuggucaagcagcuguccuccaacuucggcgccaucagcucugugcugaacgauauccugagcagacuggacccuccugaggccgaggugcagaucgacagacugaucacaggcagacugcagagccuccagacauacgugacccagcagcugaucagagccgccgagauuagagccucugccaaucuggccgccaccaagaugucugagugugugcugggccagagcaagagaguggacuuuugcggcaagggcuaccaccugaugagcuucccucagucugccccucacggcgugguguuucugcacgugacauaugugcccgcucaagagaagaauuucaccaccgcuccagccaucugccacgacggcaaagcccacuuuccuagagaaggcguguucguguccaacggcacccauugguucgugacacagcggaacuucuacgagccccagaucaucaccaccgacaacaccuucgugucuggcaacugcgacgucgugaucggcauugugaacaauaccguguacgacccucugcagcccgagcuggacagcuucaaagaggaacuggacaaguacuuuaagaaccacacaagccccgacguggaccugggcgauaucagcggaaucaaugccagcgucgugaacauccagaaagagaucgaccggcugaacgagguggccaagaaucugaacgagagccugaucgaccugcaagaacuggggaaguacgagcaguacaucaaguggcccugguacaucuggcugggcuuuaucgccggacugauugccaucgugauggucacaaucaugcuguguugcaugaccagcugcuguagcugccugaagggcuguuguagcuguggcagcugcugcaaguucgacgaggacgauucugagcccgugcugaagggcgugaaacugcacuacacaugaugacucgagcugguacugcaugcacgcaaugcuagcugccccuuucccguccuggguaccccgagucucccccgaccucgggucccagguaugcucccaccuccaccugccccacucaccaccucugcuaguuccagacaccucccaagcacgcagcaaugcagcucaaaacgcuuagccuagccacacccccacgggaaacagcagugauuaaccuuuagcaauaaacgaaaguuuaacuaagcuauacuaaccccaggguuggucaauuucgugccagccacacccuggagcuagcaaaaaaaaaaaaaaaaaaaaaaaaaaaaaaaaaaaaaaaaaaaaaaaaaaaaaaaaaaaaaaaaaaaaaaaaaaaaaaaaaaaaaaaaaaaaaaaaaaaa

SEQ ID NO: 26472 - RNA, 4273 nt, Artificial Sequence
  SARS-CoV-2/Wuhan/WIV05/2019__EPI_ISL_402128 spike protein mRNA gc mod (1-1273)(K986P_V987P_N501Y_D614G)
agaauaaacuaguauucuucugguccccacagacucagagagaacccgccaccauguucguguuccuggugcugcugccucugguguccagccagugugugaaccugaccaccagaacacagcugccuccagccuacaccaacagcuuuaccagaggcguguacuaccccgacaagguguucagauccagcgugcugcacucuacccaggaccuguuccugccuuucuucagcaacgugaccugguuccacgccauccacguguccggcaccaauggcaccaagagauucgacaaccccgugcugcccuucaacgacgggguguacuuugccagcaccgagaaguccaacaucaucagaggcuggaucuucggcaccacacuggacagcaagacccagagccugcugaucgugaacaacgccaccaacguggucaucaaagugugcgaguuccaguucugcaacgaccccuuccugggcgucuacuaccacaagaacaacaagagcuggauggaaagcgaguuccggguguacagcagcgccaacaacugcaccuucgaguacgugucccagccuuuccugauggaccuggaaggcaagcagggcaacuucaagaaccugcgcgaguucguguuuaagaacaucgacggcuacuucaagaucuacagcaagcacaccccuaucaaccucgugcgggaucugccucagggcuucucugcucuggaaccccugguggaucugcccaucggcaucaacaucacccgguuucagacacugcuggcccugcacagaagcuaccugacaccuggcgauagcagcagcggauggacagcuggugccgccgcuuacuaugugggcuaccugcagccuagaaccuuccugcugaaguacaacgagaacggcaccaucaccgacgccguggauugugcucuggauccucugagcgagacaaagugcacccugaaguccuucaccguggaaaagggcaucuaccagaccagcaacuuccgggugcagcccaccgaauccaucgugcgguuccccaauaucaccaaucugugccccuucggcgagguguucaaugccaccagauucgccucuguguacgccuggaaccggaagcggaucagcaauugcguggccgacuacuccgugcuguacaacuccgccagcuucagcaccuucaagugcuacggcguguccccuaccaagcugaacgaccugugcuucacaaacguguacgccgacagcuucgugauccggggagaugaagugcggcagauugccccuggacagacaggcaagaucgccgacuacaacuacaagcugcccgacgacuucaccggcugugugauugccuggaacagcaacaaccuggacuccaaagucggcggcaacuacaauuaccuguaccggcuguuccggaaguccaaucugaagcccuucgagcgggacaucuccaccgagaucuaucaggccggcagcaccccuuguaacggcguggaaggcuucaacugcuacuucccacugcaguccuacggcuuucagcccacauacggcgugggcuaucagcccuacagagugguggugcugagcuucgaacugcugcaugccccugccacagugugcggcccuaagaaaagcaccaaucucgugaagaacaaaugcgugaacuucaacuucaacggccugaccggcaccggcgugcugacagagagcaacaagaaguuccugccauuccagcaguuuggccgggauaucgccgauaccacagacgccguuagagauccccagacacuggaaauccuggacaucaccccuugcagcuucggcggagugucugugaucaccccuggcaccaacaccagcaaucagguggcagugcuguaccagggcgugaacuguaccgaagugcccguggccauucacgccgaucagcugacaccuacauggcggguguacuccaccggcagcaauguguuucagaccagagccggcugucugaucggagccgagcacgugaacaauagcuacgagugcgacauccccaucggcgcuggaaucugcgccagcuaccagacacagacaaacagcccucggagagccagaagcguggccagccagagcaucauugccuacacaaugucucugggcgccgagaacagcguggccuacuccaacaacucuaucgcuauccccaccaacuucaccaucagcgugaccacagagauccugccuguguccaugaccaagaccagcguggacugcaccauguacaucugcggcgauuccaccgagugcuccaaccugcugcugcaguacggcagcuucugcacccagcugaauagagcccugacagggaucgccguggaacaggacaagaacacccaagagguguucgcccaagugaagcagaucuacaagaccccuccuaucaaggacuucggcggcuucaauuucagccagauucugcccgauccuagcaagcccagcaagcggagcuucaucgaggaccugcuguucaacaaagugacacuggccgacgccggcuucaucaagcaguauggcgauugucugggcgacauugccgccagggaucugauuugcgcccagaaguuuaacggacugacagugcugccuccucugcugaccgaugagaugaucgcccaguacacaucugcccugcuggccggcacaaucacaagcggcuggacauuuggagcaggcgccgcucugcagauccccuuugcuaugcagauggccuaccgguucaacggcaucggagugacccagaaugugcuguacgagaaccagaagcugaucgccaaccaguucaacagcgccaucggcaagauccaggacagccugagcagcacagcaagcgcccugggaaagcugcaggacguggucaaccagaaugcccaggcacugaacacccuggucaagcagcuguccuccaacuucggcgccaucagcucugugcugaacgauauccugagcagacuggacccuccugaggccgaggugcagaucgacagacugaucacaggcagacugcagagccuccagacauacgugacccagcagcugaucagagccgccgagauuagagccucugccaaucuggccgccaccaagaugucugagugugugcugggccagagcaagagaguggacuuuugcggcaagggcuaccaccugaugagcuucccucagucugccccucacggcgugguguuucugcacgugacauaugugcccgcucaagagaagaauuucaccaccgcuccagccaucugccacgacggcaaagcccacuuuccuagagaaggcguguucguguccaacggcacccauugguucgugacacagcggaacuucuacgagccccagaucaucaccaccgacaacaccuucgugucuggcaacugcgacgucgugaucggcauugugaacaauaccguguacgacccucugcagcccgagcuggacagcuucaaagaggaacuggacaaguacuuuaagaaccacacaagccccgacguggaccugggcgauaucagcggaaucaaugccagcgucgugaacauccagaaagagaucgaccggcugaacgagguggccaagaaucugaacgagagccugaucgaccugcaagaacuggggaaguacgagcaguacaucaaguggcccugguacaucuggcugggcuuuaucgccggacugauugccaucgugauggucacaaucaugcuguguugcaugaccagcugcuguagcugccugaagggcuguuguagcuguggcagcugcugcaaguucgacgaggacgauucugagcccgugcugaagggcgugaaacugcacuacacaugaugacucgagcugguacugcaugcacgcaaugcuagcugccccuuucccguccuggguaccccgagucucccccgaccucgggucccagguaugcucccaccuccaccugccccacucaccaccucugcuaguuccagacaccucccaagcacgcagcaaugcagcucaaaacgcuuagccuagccacacccccacgggaaacagcagugauuaaccuuuagcaauaaacgaaaguuuaacuaagcuauacuaaccccaggguuggucaauuucgugccagccacacccuggagcuagcaaaaaaaaaaaaaaaaaaaaaaaaaaaaaaaaaaaaaaaaaaaaaaaaaaaaaaaaaaaaaaaaaaaaaaaaaaaaaaaaaaaaaaaaaaaaaaaaaaaa

SEQ ID NO: 26473 - RNA, 4267 nt, Artificial Sequence
  SARS-CoV-2/Wuhan/WIV05/2019__EPI_ISL_402128 spike protein mRNA gc mod (1-1273)(K986P_V987P_H69del_V70del_D614G)
agaauaaacuaguauucuucugguccccacagacucagagagaacccgccaccauguucguguuccuggugcugcugccucugguguccagccagugugugaaccugaccaccagaacacagcugccuccagccuacaccaacagcuuuaccagaggcguguacuaccccgacaagguguucagauccagcgugcugcacucuacccaggaccuguuccugccuuucuucagcaacgugaccugguuccacgccaucuccggcaccaauggcaccaagagauucgacaaccccgugcugcccuucaacgacgggguguacuuugccagcaccgagaaguccaacaucaucagaggcuggaucuucggcaccacacuggacagcaagacccagagccugcugaucgugaacaacgccaccaacguggucaucaaagugugcgaguuccaguucugcaacgaccccuuccugggcgucuacuaccacaagaacaacaagagcuggauggaaagcgaguuccggguguacagcagcgccaacaacugcaccuucgaguacgugucccagccuuuccugauggaccuggaaggcaagcagggcaacuucaagaaccugcgcgaguucguguuuaagaacaucgacggcuacuucaagaucuacagcaagcacaccccuaucaaccucgugcgggaucugccucagggcuucucugcucuggaaccccugguggaucugcccaucggcaucaacaucacccgguuucagacacugcuggcccugcacagaagcuaccugacaccuggcgauagcagcagcggauggacagcuggugccgccgcuuacuaugugggcuaccugcagccuagaaccuuccugcugaaguacaacgagaacggcaccaucaccgacgccguggauugugcucuggauccucugagcgagacaaagugcacccugaaguccuucaccguggaaaagggcaucuaccagaccagcaacuuccgggugcagcccaccgaauccaucgugcgguuccccaauaucaccaaucugugccccuucggcgagguguucaaugccaccagauucgccucuguguacgccuggaaccggaagcggaucagcaauugcguggccgacuacuccgugcuguacaacuccgccagcuucagcaccuucaagugcuacggcguguccccuaccaagcugaacgaccugugcuucacaaacguguacgccgacagcuucgugauccggggagaugaagugcggcagauugccccuggacagacaggcaagaucgccgacuacaacuacaagcugcccgacgacuucaccggcugugugauugccuggaacagcaacaaccuggacuccaaagucggcggcaacuacaauuaccuguaccggcuguuccggaaguccaaucugaagcccuucgagcgggacaucuccaccgagaucuaucaggccggcagcaccccuuguaacggcguggaaggcuucaacugcuacuucccacugcaguccuacggcuuucagcccacaaauggcgugggcuaucagcccuacagagugguggugcugagcuucgaacugcugcaugccccugccacagugugcggcccuaagaaaagcaccaaucucgugaagaacaaaugcgugaacuucaacuucaacggccugaccggcaccggcgugcugacagagagcaacaagaaguuccugccauuccagcaguuuggccgggauaucgccgauaccacagacgccguuagagauccccagacacuggaaauccuggacaucaccccuugcagcuucggcggagugucugugaucaccccuggcaccaacaccagcaaucagguggcagugcuguaccagggcgugaacuguaccgaagugcccguggccauucacgccgaucagcugacaccuacauggcggguguacuccaccggcagcaauguguuucagaccagagccggcugucugaucggagccgagcacgugaacaauagcuacgagugcgacauccccaucggcgcuggaaucugcgccagcuaccagacacagacaaacagcccucggagagccagaagcguggccagccagagcaucauugccuacacaaugucucugggcgccgagaacagcguggccuacuccaacaacucuaucgcuauccccaccaacuucaccaucagcgugaccacagagauccugccuguguccaugaccaagaccagcguggacugcaccauguacaucugcggcgauuccaccgagugcuccaaccugcugcugcaguacggcagcuucugcacccagcugaauagagcccugacagggaucgccguggaacaggacaagaacacccaagagguguucgcccaagugaagcagaucuacaagaccccuccuaucaaggacuucggcggcuucaauuucagccagauucugcccgauccuagcaagcccagcaagcggagcuucaucgaggaccugcuguucaacaaagugacacuggccgacgccggcuucaucaagcaguauggcgauugucugggcgacauugccgccagggaucugauuugcgcccagaaguuuaacggacugacagugcugccuccucugcugaccgaugagaugaucgcccaguacacaucugcccugcuggccggcacaaucacaagcggcuggacauuuggagcaggcgccgcucugcagauccccuuugcuaugcagauggccuaccgguucaacggcaucggagugacccagaaugugcuguacgagaaccagaagcugaucgccaaccaguucaacagcgccaucggcaagauccaggacagccugagcagcacagcaagcgcccugggaaagcugcaggacguggucaaccagaaugcccaggcacugaacacccuggucaagcagcuguccuccaacuucggcgccaucagcucugugcugaacgauauccugagcagacuggacccuccugaggccgaggugcagaucgacagacugaucacaggcagacugcagagccuccagacauacgugacccagcagcugaucagagccgccgagauuagagccucugccaaucuggccgccaccaagaugucugagugugugcugggccagagcaagagaguggacuuuugcggcaagggcuaccaccugaugagcuucccucagucugccccucacggcgugguguuucugcacgugacauaugugcccgcucaagagaagaauuucaccaccgcuccagccaucugccacgacggcaaagcccacuuuccuagagaaggcguguucguguccaacggcacccauugguucgugacacagcggaacuucuacgagccccagaucaucaccaccgacaacaccuucgugucuggcaacugcgacgucgugaucggcauugugaacaauaccguguacgacccucugcagcccgagcuggacagcuucaaagaggaacuggacaaguacuuuaagaaccacacaagccccgacguggaccugggcgauaucagcggaaucaaugccagcgucgugaacauccagaaagagaucgaccggcugaacgagguggccaagaaucugaacgagagccugaucgaccugcaagaacuggggaaguacgagcaguacaucaaguggcccugguacaucuggcugggcuuuaucgccggacugauugccaucgugauggucacaaucaugcuguguugcaugaccagcugcuguagcugccugaagggcuguuguagcuguggcagcugcugcaaguucgacgaggacgauucugagcccgugcugaagggcgugaaacugcacuacacaugaugacucgagcugguacugcaugcacgcaaugcuagcugccccuuucccguccuggguaccccgagucucccccgaccucgggucccagguaugcucccaccuccaccugccccacucaccaccucugcuaguuccagacaccucccaagcacgcagcaaugcagcucaaaacgcuuagccuagccacacccccacgggaaacagcagugauuaaccuuuagcaauaaacgaaaguuuaacuaagcuauacuaaccccaggguuggucaauuucgugccagccacacccuggagcuagcaaaaaaaaaaaaaaaaaaaaaaaaaaaaaaaaaaaaaaaaaaaaaaaaaaaaaaaaaaaaaaaaaaaaaaaaaaaaaaaaaaaaaaaaaaaaaaaaaaaa

SEQ ID NO: 26474 - RNA, 4273 nt, Artificial Sequence
  SARS-CoV-2/Wuhan/WIV05/2019__EPI_ISL_402128 spike protein mRNA gc mod (1-1273)(K986P_V987P_Y453F_D614G)
agaauaaacuaguauucuucugguccccacagacucagagagaacccgccaccauguucguguuccuggugcugcugccucugguguccagccagugugugaaccugaccaccagaacacagcugccuccagccuacaccaacagcuuuaccagaggcguguacuaccccgacaagguguucagauccagcgugcugcacucuacccaggaccuguuccugccuuucuucagcaacgugaccugguuccacgccauccacguguccggcaccaauggcaccaagagauucgacaaccccgugcugcccuucaacgacgggguguacuuugccagcaccgagaaguccaacaucaucagaggcuggaucuucggcaccacacuggacagcaagacccagagccugcugaucgugaacaacgccaccaacguggucaucaaagugugcgaguuccaguucugcaacgaccccuuccugggcgucuacuaccacaagaacaacaagagcuggauggaaagcgaguuccggguguacagcagcgccaacaacugcaccuucgaguacgugucccagccuuuccugauggaccuggaaggcaagcagggcaacuucaagaaccugcgcgaguucguguuuaagaacaucgacggcuacuucaagaucuacagcaagcacaccccuaucaaccucgugcgggaucugccucagggcuucucugcucuggaaccccugguggaucugcccaucggcaucaacaucacccgguuucagacacugcuggcccugcacagaagcuaccugacaccuggcgauagcagcagcggauggacagcuggugccgccgcuuacuaugugggcuaccugcagccuagaaccuuccugcugaaguacaacgagaacggcaccaucaccgacgccguggauugugcucuggauccucugagcgagacaaagugcacccugaaguccuucaccguggaaaagggcaucuaccagaccagcaacuuccgggugcagcccaccgaauccaucgugcgguuccccaauaucaccaaucugugccccuucggcgagguguucaaugccaccagauucgccucuguguacgccuggaaccggaagcggaucagcaauugcguggccgacuacuccgugcuguacaacuccgccagcuucagcaccuucaagugcuacggcguguccccuaccaagcugaacgaccugugcuucacaaacguguacgccgacagcuucgugauccggggagaugaagugcggcagauugccccuggacagacaggcaagaucgccgacuacaacuacaagcugcccgacgacuucaccggcugugugauugccuggaacagcaacaaccuggacuccaaagucggcggcaacuacaauuaccuguuccggcuguuccggaaguccaaucugaagcccuucgagcgggacaucuccaccgagaucuaucaggccggcagcaccccuuguaacggcguggaaggcuucaacugcuacuucccacugcaguccuacggcuuucagcccacaaauggcgugggcuaucagcccuacagagugguggugcugagcuucgaacugcugcaugccccugccacagugugcggcccuaagaaaagcaccaaucucgugaagaacaaaugcgugaacuucaacuucaacggccugaccggcaccggcgugcugacagagagcaacaagaaguuccugccauuccagcaguuuggccgggauaucgccgauaccacagacgccguuagagauccccagacacuggaaauccuggacaucaccccuugcagcuucggcggagugucugugaucaccccuggcaccaacaccagcaaucagguggcagugcuguaccagggcgugaacuguaccgaagugcccguggccauucacgccgaucagcugacaccuacauggcggguguacuccaccggcagcaauguguuucagaccagagccggcugucugaucggagccgagcacgugaacaauagcuacgagugcgacauccccaucggcgcuggaaucugcgccagcuaccagacacagacaaacagcccucggagagccagaagcguggccagccagagcaucauugccuacacaaugucucugggcgccgagaacagcguggccuacuccaacaacucuaucgcuauccccaccaacuucaccaucagcgugaccacagagauccugccuguguccaugaccaagaccagcguggacugcaccauguacaucugcggcgauuccaccgagugcuccaaccugcugcugcaguacggcagcuucugcacccagcugaauagagcccugacagggaucgccguggaacaggacaagaacacccaagagguguucgcccaagugaagcagaucuacaagaccccuccuaucaaggacuucggcggcuucaauuucagccagauucugcccgauccuagcaagcccagcaagcggagcuucaucgaggaccugcuguucaacaaagugacacuggccgacgccggcuucaucaagcaguauggcgauugucugggcgacauugccgccagggaucugauuugcgcccagaaguuuaacggacugacagugcugccuccucugcugaccgaugagaugaucgcccaguacacaucugcccugcuggccggcacaaucacaagcggcuggacauuuggagcaggcgccgcucugcagauccccuuugcuaugcagauggccuaccgguucaacggcaucggagugacccagaaugugcuguacgagaaccagaagcugaucgccaaccaguucaacagcgccaucggcaagauccaggacagccugagcagcacagcaagcgcccugggaaagcugcaggacguggucaaccagaaugcccaggcacugaacacccuggucaagcagcuguccuccaacuucggcgccaucagcucugugcugaacgauauccugagcagacuggacccuccugaggccgaggugcagaucgacagacugaucacaggcagacugcagagccuccagacauacgugacccagcagcugaucagagccgccgagauuagagccucugccaaucuggccgccaccaagaugucugagugugugcugggccagagcaagagaguggacuuuugcggcaagggcuaccaccugaugagcuucccucagucugccccucacggcgugguguuucugcacgugacauaugugcccgcucaagagaagaauuucaccaccgcuccagccaucugccacgacggcaaagcccacuuuccuagagaaggcguguucguguccaacggcacccauugguucgugacacagcggaacuucuacgagccccagaucaucaccaccgacaacaccuucgugucuggcaacugcgacgucgugaucggcauugugaacaauaccguguacgacccucugcagcccgagcuggacagcuucaaagaggaacuggacaaguacuuuaagaaccacacaagccccgacguggaccugggcgauaucagcggaaucaaugccagcgucgugaacauccagaaagagaucgaccggcugaacgagguggccaagaaucugaacgagagccugaucgaccugcaagaacuggggaaguacgagcaguacaucaaguggcccugguacaucuggcugggcuuuaucgccggacugauugccaucgugauggucacaaucaugcuguguugcaugaccagcugcuguagcugccugaagggcuguuguagcuguggcagcugcugcaaguucgacgaggacgauucugagcccgugcugaagggcgugaaacugcacuacacaugaugacucgagcugguacugcaugcacgcaaugcuagcugccccuuucccguccuggguaccccgagucucccccgaccucgggucccagguaugcucccaccuccaccugccccacucaccaccucugcuaguuccagacaccucccaagcacgcagcaaugcagcucaaaacgcuuagccuagccacacccccacgggaaacagcagugauuaaccuuuagcaauaaacgaaaguuuaacuaagcuauacuaaccccaggguuggucaauuucgugccagccacacccuggagcuagcaaaaaaaaaaaaaaaaaaaaaaaaaaaaaaaaaaaaaaaaaaaaaaaaaaaaaaaaaaaaaaaaaaaaaaaaaaaaaaaaaaaaaaaaaaaaaaaaaaaa

SEQ ID NO: 26475 - RNA, 4273 nt, Artificial Sequence
  SARS-CoV-2/Wuhan/WIV05/2019__EPI_ISL_402128 spike protein mRNA gc mod (1-1273)(K986P_V987P_D614G_I692V)
agaauaaacuaguauucuucugguccccacagacucagagagaacccgccaccauguucguguuccuggugcugcugccucugguguccagccagugugugaaccugaccaccagaacacagcugccuccagccuacaccaacagcuuuaccagaggcguguacuaccccgacaagguguucagauccagcgugcugcacucuacccaggaccuguuccugccuuucuucagcaacgugaccugguuccacgccauccacguguccggcaccaauggcaccaagagauucgacaaccccgugcugcccuucaacgacgggguguacuuugccagcaccgagaaguccaacaucaucagaggcuggaucuucggcaccacacuggacagcaagacccagagccugcugaucgugaacaacgccaccaacguggucaucaaagugugcgaguuccaguucugcaacgaccccuuccugggcgucuacuaccacaagaacaacaagagcuggauggaaagcgaguuccggguguacagcagcgccaacaacugcaccuucgaguacgugucccagccuuuccugauggaccuggaaggcaagcagggcaacuucaagaaccugcgcgaguucguguuuaagaacaucgacggcuacuucaagaucuacagcaagcacaccccuaucaaccucgugcgggaucugccucagggcuucucugcucuggaaccccugguggaucugcccaucggcaucaacaucacccgguuucagacacugcuggcccugcacagaagcuaccugacaccuggcgauagcagcagcggauggacagcuggugccgccgcuuacuaugugggcuaccugcagccuagaaccuuccugcugaaguacaacgagaacggcaccaucaccgacgccguggauugugcucuggauccucugagcgagacaaagugcacccugaaguccuucaccguggaaaagggcaucuaccagaccagcaacuuccgggugcagcccaccgaauccaucgugcgguuccccaauaucaccaaucugugccccuucggcgagguguucaaugccaccagauucgccucuguguacgccuggaaccggaagcggaucagcaauugcguggccgacuacuccgugcuguacaacuccgccagcuucagcaccuucaagugcuacggcguguccccuaccaagcugaacgaccugugcuucacaaacguguacgccgacagcuucgugauccggggagaugaagugcggcagauugccccuggacagacaggcaagaucgccgacuacaacuacaagcugcccgacgacuucaccggcugugugauugccuggaacagcaacaaccuggacuccaaagucggcggcaacuacaauuaccuguaccggcuguuccggaaguccaaucugaagcccuucgagcgggacaucuccaccgagaucuaucaggccggcagcaccccuuguaacggcguggaaggcuucaacugcuacuucccacugcaguccuacggcuuucagcccacaaauggcgugggcuaucagcccuacagagugguggugcugagcuucgaacugcugcaugccccugccacagugugcggcccuaagaaaagcaccaaucucgugaagaacaaaugcgugaacuucaacuucaacggccugaccggcaccggcgugcugacagagagcaacaagaaguuccugccauuccagcaguuuggccgggauaucgccgauaccacagacgccguuagagauccccagacacuggaaauccuggacaucaccccuugcagcuucggcggagugucugugaucaccccuggcaccaacaccagcaaucagguggcagugcuguaccagggcgugaacuguaccgaagugcccguggccauucacgccgaucagcugacaccuacauggcggguguacuccaccggcagcaauguguuucagaccagagccggcugucugaucggagccgagcacgugaacaauagcuacgagugcgacauccccaucggcgcuggaaucugcgccagcuaccagacacagacaaacagcccucggagagccagaagcguggccagccagagcgugauugccuacacaaugucucugggcgccgagaacagcguggccuacuccaacaacucuaucgcuauccccaccaacuucaccaucagcgugaccacagagauccugccuguguccaugaccaagaccagcguggacugcaccauguacaucugcggcgauuccaccgagugcuccaaccugcugcugcaguacggcagcuucugcacccagcugaauagagcccugacagggaucgccguggaacaggacaagaacacccaagagguguucgcccaagugaagcagaucuacaagaccccuccuaucaaggacuucggcggcuucaauuucagccagauucugcccgauccuagcaagcccagcaagcggagcuucaucgaggaccugcuguucaacaaagugacacuggccgacgccggcuucaucaagcaguauggcgauugucugggcgacauugccgccagggaucugauuugcgcccagaaguuuaacggacugacagugcugccuccucugcugaccgaugagaugaucgcccaguacacaucugcccugcuggccggcacaaucacaagcggcuggacauuuggagcaggcgccgcucugcagauccccuuugcuaugcagauggccuaccgguucaacggcaucggagugacccagaaugugcuguacgagaaccagaagcugaucgccaaccaguucaacagcgccaucggcaagauccaggacagccugagcagcacagcaagcgcccugggaaagcugcaggacguggucaaccagaaugcccaggcacugaacacccuggucaagcagcuguccuccaacuucggcgccaucagcucugugcugaacgauauccugagcagacuggacccuccugaggccgaggugcagaucgacagacugaucacaggcagacugcagagccuccagacauacgugacccagcagcugaucagagccgccgagauuagagccucugccaaucuggccgccaccaagaugucugagugugugcugggccagagcaagagaguggacuuuugcggcaagggcuaccaccugaugagcuucccucagucugccccucacggcgugguguuucugcacgugacauaugugcccgcucaagagaagaauuucaccaccgcuccagccaucugccacgacggcaaagcccacuuuccuagagaaggcguguucguguccaacggcacccauugguucgugacacagcggaacuucuacgagccccagaucaucaccaccgacaacaccuucgugucuggcaacugcgacgucgugaucggcauugugaacaauaccguguacgacccucugcagcccgagcuggacagcuucaaagaggaacuggacaaguacuuuaagaaccacacaagccccgacguggaccugggcgauaucagcggaaucaaugccagcgucgugaacauccagaaagagaucgaccggcugaacgagguggccaagaaucugaacgagagccugaucgaccugcaagaacuggggaaguacgagcaguacaucaaguggcccugguacaucuggcugggcuuuaucgccggacugauugccaucgugauggucacaaucaugcuguguugcaugaccagcugcuguagcugccugaagggcuguuguagcuguggcagcugcugcaaguucgacgaggacgauucugagcccgugcugaagggcgugaaacugcacuacacaugaugacucgagcugguacugcaugcacgcaaugcuagcugccccuuucccguccuggguaccccgagucucccccgaccucgggucccagguaugcucccaccuccaccugccccacucaccaccucugcuaguuccagacaccucccaagcacgcagcaaugcagcucaaaacgcuuagccuagccacacccccacgggaaacagcagugauuaaccuuuagcaauaaacgaaaguuuaacuaagcuauacuaaccccaggguuggucaauuucgugccagccacacccuggagcuagcaaaaaaaaaaaaaaaaaaaaaaaaaaaaaaaaaaaaaaaaaaaaaaaaaaaaaaaaaaaaaaaaaaaaaaaaaaaaaaaaaaaaaaaaaaaaaaaaaaaa

SEQ ID NO: 26476 - RNA, 4273 nt, Artificial Sequence
  SARS-CoV-2/Wuhan/WIV05/2019__EPI_ISL_402128 spike protein mRNA gc mod (1-1273)(K986P_V987P_D614G_M1229I)
agaauaaacuaguauucuucugguccccacagacucagagagaacccgccaccauguucguguuccuggugcugcugccucugguguccagccagugugugaaccugaccaccagaacacagcugccuccagccuacaccaacagcuuuaccagaggcguguacuaccccgacaagguguucagauccagcgugcugcacucuacccaggaccuguuccugccuuucuucagcaacgugaccugguuccacgccauccacguguccggcaccaauggcaccaagagauucgacaaccccgugcugcccuucaacgacgggguguacuuugccagcaccgagaaguccaacaucaucagaggcuggaucuucggcaccacacuggacagcaagacccagagccugcugaucgugaacaacgccaccaacguggucaucaaagugugcgaguuccaguucugcaacgaccccuuccugggcgucuacuaccacaagaacaacaagagcuggauggaaagcgaguuccggguguacagcagcgccaacaacugcaccuucgaguacgugucccagccuuuccugauggaccuggaaggcaagcagggcaacuucaagaaccugcgcgaguucguguuuaagaacaucgacggcuacuucaagaucuacagcaagcacaccccuaucaaccucgugcgggaucugccucagggcuucucugcucuggaaccccugguggaucugcccaucggcaucaacaucacccgguuucagacacugcuggcccugcacagaagcuaccugacaccuggcgauagcagcagcggauggacagcuggugccgccgcuuacuaugugggcuaccugcagccuagaaccuuccugcugaaguacaacgagaacggcaccaucaccgacgccguggauugugcucuggauccucugagcgagacaaagugcacccugaaguccuucaccguggaaaagggcaucuaccagaccagcaacuuccgggugcagcccaccgaauccaucgugcgguuccccaauaucaccaaucugugccccuucggcgagguguucaaugccaccagauucgccucuguguacgccuggaaccggaagcggaucagcaauugcguggccgacuacuccgugcuguacaacuccgccagcuucagcaccuucaagugcuacggcguguccccuaccaagcugaacgaccugugcuucacaaacguguacgccgacagcuucgugauccggggagaugaagugcggcagauugccccuggacagacaggcaagaucgccgacuacaacuacaagcugcccgacgacuucaccggcugugugauugccuggaacagcaacaaccuggacuccaaagucggcggcaacuacaauuaccuguaccggcuguuccggaaguccaaucugaagcccuucgagcgggacaucuccaccgagaucuaucaggccggcagcaccccuuguaacggcguggaaggcuucaacugcuacuucccacugcaguccuacggcuuucagcccacaaauggcgugggcuaucagcccuacagagugguggugcugagcuucgaacugcugcaugccccugccacagugugcggcccuaagaaaagcaccaaucucgugaagaacaaaugcgugaacuucaacuucaacggccugaccggcaccggcgugcugacagagagcaacaagaaguuccugccauuccagcaguuuggccgggauaucgccgauaccacagacgccguuagagauccccagacacuggaaauccuggacaucaccccuugcagcuucggcggagugucugugaucaccccuggcaccaacaccagcaaucagguggcagugcuguaccagggcgugaacuguaccgaagugcccguggccauucacgccgaucagcugacaccuacauggcggguguacuccaccggcagcaauguguuucagaccagagccggcugucugaucggagccgagcacgugaacaauagcuacgagugcgacauccccaucggcgcuggaaucugcgccagcuaccagacacagacaaacagcccucggagagccagaagcguggccagccagagcaucauugccuacacaaugucucugggcgccgagaacagcguggccuacuccaacaacucuaucgcuauccccaccaacuucaccaucagcgugaccacagagauccugccuguguccaugaccaagaccagcguggacugcaccauguacaucugcggcgauuccaccgagugcuccaaccugcugcugcaguacggcagcuucugcacccagcugaauagagcccugacagggaucgccguggaacaggacaagaacacccaagagguguucgcccaagugaagcagaucuacaagaccccuccuaucaaggacuucggcggcuucaauuucagccagauucugcccgauccuagcaagcccagcaagcggagcuucaucgaggaccugcuguucaacaaagugacacuggccgacgccggcuucaucaagcaguauggcgauugucugggcgacauugccgccagggaucugauuugcgcccagaaguuuaacggacugacagugcugccuccucugcugaccgaugagaugaucgcccaguacacaucugcccugcuggccggcacaaucacaagcggcuggacauuuggagcaggcgccgcucugcagauccccuuugcuaugcagauggccuaccgguucaacggcaucggagugacccagaaugugcuguacgagaaccagaagcugaucgccaaccaguucaacagcgccaucggcaagauccaggacagccugagcagcacagcaagcgcccugggaaagcugcaggacguggucaaccagaaugcccaggcacugaacacccuggucaagcagcuguccuccaacuucggcgccaucagcucugugcugaacgauauccugagcagacuggacccuccugaggccgaggugcagaucgacagacugaucacaggcagacugcagagccuccagacauacgugacccagcagcugaucagagccgccgagauuagagccucugccaaucuggccgccaccaagaugucugagugugugcugggccagagcaagagaguggacuuuugcggcaagggcuaccaccugaugagcuucccucagucugccccucacggcgugguguuucugcacgugacauaugugcccgcucaagagaagaauuucaccaccgcuccagccaucugccacgacggcaaagcccacuuuccuagagaaggcguguucguguccaacggcacccauugguucgugacacagcggaacuucuacgagccccagaucaucaccaccgacaacaccuucgugucuggcaacugcgacgucgugaucggcauugugaacaauaccguguacgacccucugcagcccgagcuggacagcuucaaagaggaacuggacaaguacuuuaagaaccacacaagccccgacguggaccugggcgauaucagcggaaucaaugccagcgucgugaacauccagaaagagaucgaccggcugaacgagguggccaagaaucugaacgagagccugaucgaccugcaagaacuggggaaguacgagcaguacaucaaguggcccugguacaucuggcugggcuuuaucgccggacugauugccaucgugaucgucacaaucaugcuguguugcaugaccagcugcuguagcugccugaagggcuguuguagcuguggcagcugcugcaaguucgacgaggacgauucugagcccgugcugaagggcgugaaacugcacuacacaugaugacucgagcugguacugcaugcacgcaaugcuagcugccccuuucccguccuggguaccccgagucucccccgaccucgggucccagguaugcucccaccuccaccugccccacucaccaccucugcuaguuccagacaccucccaagcacgcagcaaugcagcucaaaacgcuuagccuagccacacccccacgggaaacagcagugauuaaccuuuagcaauaaacgaaaguuuaacuaagcuauacuaaccccaggguuggucaauuucgugccagccacacccuggagcuagcaaaaaaaaaaaaaaaaaaaaaaaaaaaaaaaaaaaaaaaaaaaaaaaaaaaaaaaaaaaaaaaaaaaaaaaaaaaaaaaaaaaaaaaaaaaaaaaaaaaa

SEQ ID NO: 26477 - RNA, 4267 nt, Artificial Sequence
  SARS-CoV-2/Wuhan/WIV05/2019__EPI_ISL_402128 spike protein mRNA gc mod (1-1273)(K986P_V987P_H69del_V70del_A222V_Y453F_S477N_D614G_I692V)
agaauaaacuaguauucuucugguccccacagacucagagagaacccgccaccauguucguguuccuggugcugcugccucugguguccagccagugugugaaccugaccaccagaacacagcugccuccagccuacaccaacagcuuuaccagaggcguguacuaccccgacaagguguucagauccagcgugcugcacucuacccaggaccuguuccugccuuucuucagcaacgugaccugguuccacgccaucuccggcaccaauggcaccaagagauucgacaaccccgugcugcccuucaacgacgggguguacuuugccagcaccgagaaguccaacaucaucagaggcuggaucuucggcaccacacuggacagcaagacccagagccugcugaucgugaacaacgccaccaacguggucaucaaagugugcgaguuccaguucugcaacgaccccuuccugggcgucuacuaccacaagaacaacaagagcuggauggaaagcgaguuccggguguacagcagcgccaacaacugcaccuucgaguacgugucccagccuuuccugauggaccuggaaggcaagcagggcaacuucaagaaccugcgcgaguucguguuuaagaacaucgacggcuacuucaagaucuacagcaagcacaccccuaucaaccucgugcgggaucugccucagggcuucucugugcuggaaccccugguggaucugcccaucggcaucaacaucacccgguuucagacacugcuggcccugcacagaagcuaccugacaccuggcgauagcagcagcggauggacagcuggugccgccgcuuacuaugugggcuaccugcagccuagaaccuuccugcugaaguacaacgagaacggcaccaucaccgacgccguggauugugcucuggauccucugagcgagacaaagugcacccugaaguccuucaccguggaaaagggcaucuaccagaccagcaacuuccgggugcagcccaccgaauccaucgugcgguuccccaauaucaccaaucugugccccuucggcgagguguucaaugccaccagauucgccucuguguacgccuggaaccggaagcggaucagcaauugcguggccgacuacuccgugcuguacaacuccgccagcuucagcaccuucaagugcuacggcguguccccuaccaagcugaacgaccugugcuucacaaacguguacgccgacagcuucgugauccggggagaugaagugcggcagauugccccuggacagacaggcaagaucgccgacuacaacuacaagcugcccgacgacuucaccggcugugugauugccuggaacagcaacaaccuggacuccaaagucggcggcaacuacaauuaccuguuccggcuguuccggaaguccaaucugaagcccuucgagcgggacaucuccaccgagaucuaucaggccggcaacaccccuuguaacggcguggaaggcuucaacugcuacuucccacugcaguccuacggcuuucagcccacaaauggcgugggcuaucagcccuacagagugguggugcugagcuucgaacugcugcaugccccugccacagugugcggcccuaagaaaagcaccaaucucgugaagaacaaaugcgugaacuucaacuucaacggccugaccggcaccggcgugcugacagagagcaacaagaaguuccugccauuccagcaguuuggccgggauaucgccgauaccacagacgccguuagagauccccagacacuggaaauccuggacaucaccccuugcagcuucggcggagugucugugaucaccccuggcaccaacaccagcaaucagguggcagugcuguaccagggcgugaacuguaccgaagugcccguggccauucacgccgaucagcugacaccuacauggcggguguacuccaccggcagcaauguguuucagaccagagccggcugucugaucggagccgagcacgugaacaauagcuacgagugcgacauccccaucggcgcuggaaucugcgccagcuaccagacacagacaaacagcccucggagagccagaagcguggccagccagagcgugauugccuacacaaugucucugggcgccgagaacagcguggccuacuccaacaacucuaucgcuauccccaccaacuucaccaucagcgugaccacagagauccugccuguguccaugaccaagaccagcguggacugcaccauguacaucugcggcgauuccaccgagugcuccaaccugcugcugcaguacggcagcuucugcacccagcugaauagagcccugacagggaucgccguggaacaggacaagaacacccaagagguguucgcccaagugaagcagaucuacaagaccccuccuaucaaggacuucggcggcuucaauuucagccagauucugcccgauccuagcaagcccagcaagcggagcuucaucgaggaccugcuguucaacaaagugacacuggccgacgccggcuucaucaagcaguauggcgauugucugggcgacauugccgccagggaucugauuugcgcccagaaguuuaacggacugacagugcugccuccucugcugaccgaugagaugaucgcccaguacacaucugcccugcuggccggcacaaucacaagcggcuggacauuuggagcaggcgccgcucugcagauccccuuugcuaugcagauggccuaccgguucaacggcaucggagugacccagaaugugcuguacgagaaccagaagcugaucgccaaccaguucaacagcgccaucggcaagauccaggacagccugagcagcacagcaagcgcccugggaaagcugcaggacguggucaaccagaaugcccaggcacugaacacccuggucaagcagcuguccuccaacuucggcgccaucagcucugugcugaacgauauccugagcagacuggacccuccugaggccgaggugcagaucgacagacugaucacaggcagacugcagagccuccagacauacgugacccagcagcugaucagagccgccgagauuagagccucugccaaucuggccgccaccaagaugucugagugugugcugggccagagcaagagaguggacuuuugcggcaagggcuaccaccugaugagcuucccucagucugccccucacggcgugguguuucugcacgugacauaugugcccgcucaagagaagaauuucaccaccgcuccagccaucugccacgacggcaaagcccacuuuccuagagaaggcguguucguguccaacggcacccauugguucgugacacagcggaacuucuacgagccccagaucaucaccaccgacaacaccuucgugucuggcaacugcgacgucgugaucggcauugugaacaauaccguguacgacccucugcagcccgagcuggacagcuucaaagaggaacuggacaaguacuuuaagaaccacacaagccccgacguggaccugggcgauaucagcggaaucaaugccagcgucgugaacauccagaaagagaucgaccggcugaacgagguggccaagaaucugaacgagagccugaucgaccugcaagaacuggggaaguacgagcaguacaucaaguggcccugguacaucuggcugggcuuuaucgccggacugauugccaucgugauggucacaaucaugcuguguugcaugaccagcugcuguagcugccugaagggcuguuguagcuguggcagcugcugcaaguucgacgaggacgauucugagcccgugcugaagggcgugaaacugcacuacacaugaugacucgagcugguacugcaugcacgcaaugcuagcugccccuuucccguccuggguaccccgagucucccccgaccucgggucccagguaugcucccaccuccaccugccccacucaccaccucugcuaguuccagacaccucccaagcacgcagcaaugcagcucaaaacgcuuagccuagccacacccccacgggaaacagcagugauuaaccuuuagcaauaaacgaaaguuuaacuaagcuauacuaaccccaggguuggucaauuucgugccagccacacccuggagcuagcaaaaaaaaaaaaaaaaaaaaaaaaaaaaaaaaaaaaaaaaaaaaaaaaaaaaaaaaaaaaaaaaaaaaaaaaaaaaaaaaaaaaaaaaaaaaaaaaaaaa

SEQ ID NO: 26478 - RNA, 4267 nt, Artificial Sequence
  SARS-CoV-2/Wuhan/WIV05/2019__EPI_ISL_402128 spike protein mRNA gc mod (1-1273)(K986P_V987P_H69del_V70del_Y453F_D614G_I692V_M1229I)
agaauaaacuaguauucuucugguccccacagacucagagagaacccgccaccauguucguguuccuggugcugcugccucugguguccagccagugugugaaccugaccaccagaacacagcugccuccagccuacaccaacagcuuuaccagaggcguguacuaccccgacaagguguucagauccagcgugcugcacucuacccaggaccuguuccugccuuucuucagcaacgugaccugguuccacgccaucuccggcaccaauggcaccaagagauucgacaaccccgugcugcccuucaacgacgggguguacuuugccagcaccgagaaguccaacaucaucagaggcuggaucuucggcaccacacuggacagcaagacccagagccugcugaucgugaacaacgccaccaacguggucaucaaagugugcgaguuccaguucugcaacgaccccuuccugggcgucuacuaccacaagaacaacaagagcuggauggaaagcgaguuccggguguacagcagcgccaacaacugcaccuucgaguacgugucccagccuuuccugauggaccuggaaggcaagcagggcaacuucaagaaccugcgcgaguucguguuuaagaacaucgacggcuacuucaagaucuacagcaagcacaccccuaucaaccucgugcgggaucugccucagggcuucucugcucuggaaccccugguggaucugcccaucggcaucaacaucacccgguuucagacacugcuggcccugcacagaagcuaccugacaccuggcgauagcagcagcggauggacagcuggugccgccgcuuacuaugugggcuaccugcagccuagaaccuuccugcugaaguacaacgagaacggcaccaucaccgacgccguggauugugcucuggauccucugagcgagacaaagugcacccugaaguccuucaccguggaaaagggcaucuaccagaccagcaacuuccgggugcagcccaccgaauccaucgugcgguuccccaauaucaccaaucugugccccuucggcgagguguucaaugccaccagauucgccucuguguacgccuggaaccggaagcggaucagcaauugcguggccgacuacuccgugcuguacaacuccgccagcuucagcaccuucaagugcuacggcguguccccuaccaagcugaacgaccugugcuucacaaacguguacgccgacagcuucgugauccggggagaugaagugcggcagauugccccuggacagacaggcaagaucgccgacuacaacuacaagcugcccgacgacuucaccggcugugugauugccuggaacagcaacaaccuggacuccaaagucggcggcaacuacaauuaccuguuccggcuguuccggaaguccaaucugaagcccuucgagcgggacaucuccaccgagaucuaucaggccggcagcaccccuuguaacggcguggaaggcuucaacugcuacuucccacugcaguccuacggcuuucagcccacaaauggcgugggcuaucagcccuacagagugguggugcugagcuucgaacugcugcaugccccugccacagugugcggcccuaagaaaagcaccaaucucgugaagaacaaaugcgugaacuucaacuucaacggccugaccggcaccggcgugcugacagagagcaacaagaaguuccugccauuccagcaguuuggccgggauaucgccgauaccacagacgccguuagagauccccagacacuggaaauccuggacaucaccccuugcagcuucggcggagugucugugaucaccccuggcaccaacaccagcaaucagguggcagugcuguaccagggcgugaacuguaccgaagugcccguggccauucacgccgaucagcugacaccuacauggcggguguacuccaccggcagcaauguguuucagaccagagccggcugucugaucggagccgagcacgugaacaauagcuacgagugcgacauccccaucggcgcuggaaucugcgccagcuaccagacacagacaaacagcccucggagagccagaagcguggccagccagagcgugauugccuacacaaugucucugggcgccgagaacagcguggccuacuccaacaacucuaucgcuauccccaccaacuucaccaucagcgugaccacagagauccugccuguguccaugaccaagaccagcguggacugcaccauguacaucugcggcgauuccaccgagugcuccaaccugcugcugcaguacggcagcuucugcacccagcugaauagagcccugacagggaucgccguggaacaggacaagaacacccaagagguguucgcccaagugaagcagaucuacaagaccccuccuaucaaggacuucggcggcuucaauuucagccagauucugcccgauccuagcaagcccagcaagcggagcuucaucgaggaccugcuguucaacaaagugacacuggccgacgccggcuucaucaagcaguauggcgauugucugggcgacauugccgccagggaucugauuugcgcccagaaguuuaacggacugacagugcugccuccucugcugaccgaugagaugaucgcccaguacacaucugcccugcuggccggcacaaucacaagcggcuggacauuuggagcaggcgccgcucugcagauccccuuugcuaugcagauggccuaccgguucaacggcaucggagugacccagaaugugcuguacgagaaccagaagcugaucgccaaccaguucaacagcgccaucggcaagauccaggacagccugagcagcacagcaagcgcccugggaaagcugcaggacguggucaaccagaaugcccaggcacugaacacccuggucaagcagcuguccuccaacuucggcgccaucagcucugugcugaacgauauccugagcagacuggacccuccugaggccgaggugcagaucgacagacugaucacaggcagacugcagagccuccagacauacgugacccagcagcugaucagagccgccgagauuagagccucugccaaucuggccgccaccaagaugucugagugugugcugggccagagcaagagaguggacuuuugcggcaagggcuaccaccugaugagcuucccucagucugccccucacggcgugguguuucugcacgugacauaugugcccgcucaagagaagaauuucaccaccgcuccagccaucugccacgacggcaaagcccacuuuccuagagaaggcguguucguguccaacggcacccauugguucgugacacagcggaacuucuacgagccccagaucaucaccaccgacaacaccuucgugucuggcaacugcgacgucgugaucggcauugugaacaauaccguguacgacccucugcagcccgagcuggacagcuucaaagaggaacuggacaaguacuuuaagaaccacacaagccccgacguggaccugggcgauaucagcggaaucaaugccagcgucgugaacauccagaaagagaucgaccggcugaacgagguggccaagaaucugaacgagagccugaucgaccugcaagaacuggggaaguacgagcaguacaucaaguggcccugguacaucuggcugggcuuuaucgccggacugauugccaucgugaucgucacaaucaugcuguguugcaugaccagcugcuguagcugccugaagggcuguuguagcuguggcagcugcugcaaguucgacgaggacgauucugagcccgugcugaagggcgugaaacugcacuacacaugaugacucgagcugguacugcaugcacgcaaugcuagcugccccuuucccguccuggguaccccgagucucccccgaccucgggucccagguaugcucccaccuccaccugccccacucaccaccucugcuaguuccagacaccucccaagcacgcagcaaugcagcucaaaacgcuuagccuagccacacccccacgggaaacagcagugauuaaccuuuagcaauaaacgaaaguuuaacuaagcuauacuaaccccaggguuggucaauuucgugccagccacacccuggagcuagcaaaaaaaaaaaaaaaaaaaaaaaaaaaaaaaaaaaaaaaaaaaaaaaaaaaaaaaaaaaaaaaaaaaaaaaaaaaaaaaaaaaaaaaaaaaaaaaaaaaa

SEQ ID NO: 26479 - RNA, 4264 nt, Artificial Sequence
  SARS-CoV-2/Wuhan/WIV05/2019__EPI_ISL_402128 spike protein mRNA gc mod (1-1273)(K986P_V987P_K986P_V987P_H69del_V70del_Y144del_N501Y_A570 D_D614G_P681H_T716I_S982A_D1118H)
agaauaaacuaguauucuucugguccccacagacucagagagaacccgccaccauguucguguuccuggugcugcugccucugguguccagccagugugugaaccugaccaccagaacacagcugccuccagccuacaccaacagcuuuaccagaggcguguacuaccccgacaagguguucagauccagcgugcugcacucuacccaggaccuguuccugccuuucuucagcaacgugaccugguuccacgccaucuccggcaccaauggcaccaagagauucgacaaccccgugcugcccuucaacgacgggguguacuuugccagcaccgagaaguccaacaucaucagaggcuggaucuucggcaccacacuggacagcaagacccagagccugcugaucgugaacaacgccaccaacguggucaucaaagugugcgaguuccaguucugcaacgaccccuuccugggcgucuaccacaagaacaacaagagcuggauggaaagcgaguuccggguguacagcagcgccaacaacugcaccuucgaguacgugucccagccuuuccugauggaccuggaaggcaagcagggcaacuucaagaaccugcgcgaguucguguuuaagaacaucgacggcuacuucaagaucuacagcaagcacaccccuaucaaccucgugcgggaucugccucagggcuucucugcucuggaaccccugguggaucugcccaucggcaucaacaucacccgguuucagacacugcuggcccugcacagaagcuaccugacaccuggcgauagcagcagcggauggacagcuggugccgccgcuuacuaugugggcuaccugcagccuagaaccuuccugcugaaguacaacgagaacggcaccaucaccgacgccguggauugugcucuggauccucugagcgagacaaagugcacccugaaguccuucaccguggaaaagggcaucuaccagaccagcaacuuccgggugcagcccaccgaauccaucgugcgguuccccaauaucaccaaucugugccccuucggcgagguguucaaugccaccagauucgccucuguguacgccuggaaccggaagcggaucagcaauugcguggccgacuacuccgugcuguacaacuccgccagcuucagcaccuucaagugcuacggcguguccccuaccaagcugaacgaccugugcuucacaaacguguacgccgacagcuucgugauccggggagaugaagugcggcagauugccccuggacagacaggcaagaucgccgacuacaacuacaagcugcccgacgacuucaccggcugugugauugccuggaacagcaacaaccuggacuccaaagucggcggcaacuacaauuaccuguaccggcuguuccggaaguccaaucugaagcccuucgagcgggacaucuccaccgagaucuaucaggccggcagcaccccuuguaacggcguggaaggcuucaacugcuacuucccacugcaguccuacggcuuucagcccacauacggcgugggcuaucagcccuacagagugguggugcugagcuucgaacugcugcaugccccugccacagugugcggcccuaagaaaagcaccaaucucgugaagaacaaaugcgugaacuucaacuucaacggccugaccggcaccggcgugcugacagagagcaacaagaaguuccugccauuccagcaguuuggccgggauaucgacgauaccacagacgccguuagagauccccagacacuggaaauccuggacaucaccccuugcagcuucggcggagugucugugaucaccccuggcaccaacaccagcaaucagguggcagugcuguaccagggcgugaacuguaccgaagugcccguggccauucacgccgaucagcugacaccuacauggcggguguacuccaccggcagcaauguguuucagaccagagccggcugucugaucggagccgagcacgugaacaauagcuacgagugcgacauccccaucggcgcuggaaucugcgccagcuaccagacacagacaaacagccaccggagagccagaagcguggccagccagagcaucauugccuacacaaugucucugggcgccgagaacagcguggccuacuccaacaacucuaucgcuauccccaucaacuucaccaucagcgugaccacagagauccugccuguguccaugaccaagaccagcguggacugcaccauguacaucugcggcgauuccaccgagugcuccaaccugcugcugcaguacggcagcuucugcacccagcugaauagagcccugacagggaucgccguggaacaggacaagaacacccaagagguguucgcccaagugaagcagaucuacaagaccccuccuaucaaggacuucggcggcuucaauuucagccagauucugcccgauccuagcaagcccagcaagcggagcuucaucgaggaccugcuguucaacaaagugacacuggccgacgccggcuucaucaagcaguauggcgauugucugggcgacauugccgccagggaucugauuugcgcccagaaguuuaacggacugacagugcugccuccucugcugaccgaugagaugaucgcccaguacacaucugcccugcuggccggcacaaucacaagcggcuggacauuuggagcaggcgccgcucugcagauccccuuugcuaugcagauggccuaccgguucaacggcaucggagugacccagaaugugcuguacgagaaccagaagcugaucgccaaccaguucaacagcgccaucggcaagauccaggacagccugagcagcacagcaagcgcccugggaaagcugcaggacguggucaaccagaaugcccaggcacugaacacccuggucaagcagcuguccuccaacuucggcgccaucagcucugugcugaacgauauccuggccagacuggacccuccugaggccgaggugcagaucgacagacugaucacaggcagacugcagagccuccagacauacgugacccagcagcugaucagagccgccgagauuagagccucugccaaucuggccgccaccaagaugucugagugugugcugggccagagcaagagaguggacuuuugcggcaagggcuaccaccugaugagcuucccucagucugccccucacggcgugguguuucugcacgugacauaugugcccgcucaagagaagaauuucaccaccgcuccagccaucugccacgacggcaaagcccacuuuccuagagaaggcguguucguguccaacggcacccauugguucgugacacagcggaacuucuacgagccccagaucaucaccacccacaacaccuucgugucuggcaacugcgacgucgugaucggcauugugaacaauaccguguacgacccucugcagcccgagcuggacagcuucaaagaggaacuggacaaguacuuuaagaaccacacaagccccgacguggaccugggcgauaucagcggaaucaaugccagcgucgugaacauccagaaagagaucgaccggcugaacgagguggccaagaaucugaacgagagccugaucgaccugcaagaacuggggaaguacgagcaguacaucaaguggcccugguacaucuggcugggcuuuaucgccggacugauugccaucgugauggucacaaucaugcuguguugcaugaccagcugcuguagcugccugaagggcuguuguagcuguggcagcugcugcaaguucgacgaggacgauucugagcccgugcugaagggcgugaaacugcacuacacaugaugacucgagcugguacugcaugcacgcaaugcuagcugccccuuucccguccuggguaccccgagucucccccgaccucgggucccagguaugcucccaccuccaccugccccacucaccaccucugcuaguuccagacaccucccaagcacgcagcaaugcagcucaaaacgcuuagccuagccacacccccacgggaaacagcagugauuaaccuuuagcaauaaacgaaaguuuaacuaagcuauacuaaccccaggguuggucaauuucgugccagccacacccuggagcuagcaaaaaaaaaaaaaaaaaaaaaaaaaaaaaaaaaaaaaaaaaaaaaaaaaaaaaaaaaaaaaaaaaaaaaaaaaaaaaaaaaaaaaaaaaaaaaaaaaaaa

SEQ ID NO: 26480 - RNA, 4273 nt, Artificial Sequence
  SARS-CoV-2/Wuhan/WIV05/2019__EPI_ISL_402128 spike protein mRNA gc mod (1-1273)(K986P_V987P_K986P_V987P_K417N_E484K_N501Y_D614G)
agaauaaacuaguauucuucugguccccacagacucagagagaacccgccaccauguucguguuccuggugcugcugccucugguguccagccagugugugaaccugaccaccagaacacagcugccuccagccuacaccaacagcuuuaccagaggcguguacuaccccgacaagguguucagauccagcgugcugcacucuacccaggaccuguuccugccuuucuucagcaacgugaccugguuccacgccauccacguguccggcaccaauggcaccaagagauucgacaaccccgugcugcccuucaacgacgggguguacuuugccagcaccgagaaguccaacaucaucagaggcuggaucuucggcaccacacuggacagcaagacccagagccugcugaucgugaacaacgccaccaacguggucaucaaagugugcgaguuccaguucugcaacgaccccuuccugggcgucuacuaccacaagaacaacaagagcuggauggaaagcgaguuccggguguacagcagcgccaacaacugcaccuucgaguacgugucccagccuuuccugauggaccuggaaggcaagcagggcaacuucaagaaccugcgcgaguucguguuuaagaacaucgacggcuacuucaagaucuacagcaagcacaccccuaucaaccucgugcgggaucugccucagggcuucucugcucuggaaccccugguggaucugcccaucggcaucaacaucacccgguuucagacacugcuggcccugcacagaagcuaccugacaccuggcgauagcagcagcggauggacagcuggugccgccgcuuacuaugugggcuaccugcagccuagaaccuuccugcugaaguacaacgagaacggcaccaucaccgacgccguggauugugcucuggauccucugagcgagacaaagugcacccugaaguccuucaccguggaaaagggcaucuaccagaccagcaacuuccgggugcagcccaccgaauccaucgugcgguuccccaauaucaccaaucugugccccuucggcgagguguucaaugccaccagauucgccucuguguacgccuggaaccggaagcggaucagcaauugcguggccgacuacuccgugcuguacaacuccgccagcuucagcaccuucaagugcuacggcguguccccuaccaagcugaacgaccugugcuucacaaacguguacgccgacagcuucgugauccggggagaugaagugcggcagauugccccuggacagacaggcaacaucgccgacuacaacuacaagcugcccgacgacuucaccggcugugugauugccuggaacagcaacaaccuggacuccaaagucggcggcaacuacaauuaccuguaccggcuguuccggaaguccaaucugaagcccuucgagcgggacaucuccaccgagaucuaucaggccggcagcaccccuuguaacggcgugaagggcuucaacugcuacuucccacugcaguccuacggcuuucagcccacauacggcgugggcuaucagcccuacagagugguggugcugagcuucgaacugcugcaugccccugccacagugugcggcccuaagaaaagcaccaaucucgugaagaacaaaugcgugaacuucaacuucaacggccugaccggcaccggcgugcugacagagagcaacaagaaguuccugccauuccagcaguuuggccgggauaucgccgauaccacagacgccguuagagauccccagacacuggaaauccuggacaucaccccuugcagcuucggcggagugucugugaucaccccuggcaccaacaccagcaaucagguggcagugcuguaccagggcgugaacuguaccgaagugcccguggccauucacgccgaucagcugacaccuacauggcggguguacuccaccggcagcaauguguuucagaccagagccggcugucugaucggagccgagcacgugaacaauagcuacgagugcgacauccccaucggcgcuggaaucugcgccagcuaccagacacagacaaacagcccucggagagccagaagcguggccagccagagcaucauugccuacacaaugucucugggcgccgagaacagcguggccuacuccaacaacucuaucgcuauccccaccaacuucaccaucagcgugaccacagagauccugccuguguccaugaccaagaccagcguggacugcaccauguacaucugcggcgauuccaccgagugcuccaaccugcugcugcaguacggcagcuucugcacccagcugaauagagcccugacagggaucgccguggaacaggacaagaacacccaagagguguucgcccaagugaagcagaucuacaagaccccuccuaucaaggacuucggcggcuucaauuucagccagauucugcccgauccuagcaagcccagcaagcggagcuucaucgaggaccugcuguucaacaaagugacacuggccgacgccggcuucaucaagcaguauggcgauugucugggcgacauugccgccagggaucugauuugcgcccagaaguuuaacggacugacagugcugccuccucugcugaccgaugagaugaucgcccaguacacaucugcccugcuggccggcacaaucacaagcggcuggacauuuggagcaggcgccgcucugcagauccccuuugcuaugcagauggccuaccgguucaacggcaucggagugacccagaaugugcuguacgagaaccagaagcugaucgccaaccaguucaacagcgccaucggcaagauccaggacagccugagcagcacagcaagcgcccugggaaagcugcaggacguggucaaccagaaugcccaggcacugaacacccuggucaagcagcuguccuccaacuucggcgccaucagcucugugcugaacgauauccugagcagacuggacccuccugaggccgaggugcagaucgacagacugaucacaggcagacugcagagccuccagacauacgugacccagcagcugaucagagccgccgagauuagagccucugccaaucuggccgccaccaagaugucugagugugugcugggccagagcaagagaguggacuuuugcggcaagggcuaccaccugaugagcuucccucagucugccccucacggcgugguguuucugcacgugacauaugugcccgcucaagagaagaauuucaccaccgcuccagccaucugccacgacggcaaagcccacuuuccuagagaaggcguguucguguccaacggcacccauugguucgugacacagcggaacuucuacgagccccagaucaucaccaccgacaacaccuucgugucuggcaacugcgacgucgugaucggcauugugaacaauaccguguacgacccucugcagcccgagcuggacagcuucaaagaggaacuggacaaguacuuuaagaaccacacaagccccgacguggaccugggcgauaucagcggaaucaaugccagcgucgugaacauccagaaagagaucgaccggcugaacgagguggccaagaaucugaacgagagccugaucgaccugcaagaacuggggaaguacgagcaguacaucaaguggcccugguacaucuggcugggcuuuaucgccggacugauugccaucgugauggucacaaucaugcuguguugcaugaccagcugcuguagcugccugaagggcuguuguagcuguggcagcugcugcaaguucgacgaggacgauucugagcccgugcugaagggcgugaaacugcacuacacaugaugacucgagcugguacugcaugcacgcaaugcuagcugccccuuucccguccuggguaccccgagucucccccgaccucgggucccagguaugcucccaccuccaccugccccacucaccaccucugcuaguuccagacaccucccaagcacgcagcaaugcagcucaaaacgcuuagccuagccacacccccacgggaaacagcagugauuaaccuuuagcaauaaacgaaaguuuaacuaagcuauacuaaccccaggguuggucaauuucgugccagccacacccuggagcuagcaaaaaaaaaaaaaaaaaaaaaaaaaaaaaaaaaaaaaaaaaaaaaaaaaaaaaaaaaaaaaaaaaaaaaaaaaaaaaaaaaaaaaaaaaaaaaaaaaaaa

SEQ ID NO: 26481 - RNA, 4264 nt, Artificial Sequence
  SARS-CoV-2/Wuhan/WIV05/2019__EPI_ISL_402128 spike protein mRNA gc mod (1-1273)(K986P_V987P_K986P_V987P_L18F_D80A_D215G_L242del_A243del_ L244del_R246I_K417N_E484K_N501Y_D614G_A701V)
agaauaaacuaguauucuucugguccccacagacucagagagaacccgccaccauguucguguuccuggugcugcugccucugguguccagccagugugugaacuucaccaccagaacacagcugccuccagccuacaccaacagcuuuaccagaggcguguacuaccccgacaagguguucagauccagcgugcugcacucuacccaggaccuguuccugccuuucuucagcaacgugaccugguuccacgccauccacguguccggcaccaauggcaccaagagauucgccaaccccgugcugcccuucaacgacgggguguacuuugccagcaccgagaaguccaacaucaucagaggcuggaucuucggcaccacacuggacagcaagacccagagccugcugaucgugaacaacgccaccaacguggucaucaaagugugcgaguuccaguucugcaacgaccccuuccugggcgucuacuaccacaagaacaacaagagcuggauggaaagcgaguuccggguguacagcagcgccaacaacugcaccuucgaguacgugucccagccuuuccugauggaccuggaaggcaagcagggcaacuucaagaaccugcgcgaguucguguuuaagaacaucgacggcuacuucaagaucuacagcaagcacaccccuaucaaccucgugcggggccugccucagggcuucucugcucuggaaccccugguggaucugcccaucggcaucaacaucacccgguuucagacacugcacaucagcuaccugacaccuggcgauagcagcagcggauggacagcuggugccgccgcuuacuaugugggcuaccugcagccuagaaccuuccugcugaaguacaacgagaacggcaccaucaccgacgccguggauugugcucuggauccucugagcgagacaaagugcacccugaaguccuucaccguggaaaagggcaucuaccagaccagcaacuuccgggugcagcccaccgaauccaucgugcgguuccccaauaucaccaaucugugccccuucggcgagguguucaaugccaccagauucgccucuguguacgccuggaaccggaagcggaucagcaauugcguggccgacuacuccgugcuguacaacuccgccagcuucagcaccuucaagugcuacggcguguccccuaccaagcugaacgaccugugcuucacaaacguguacgccgacagcuucgugauccggggagaugaagugcggcagauugccccuggacagacaggcaacaucgccgacuacaacuacaagcugcccgacgacuucaccggcugugugauugccuggaacagcaacaaccuggacuccaaagucggcggcaacuacaauuaccuguaccggcuguuccggaaguccaaucugaagcccuucgagcgggacaucuccaccgagaucuaucaggccggcagcaccccuuguaacggcgugaagggcuucaacugcuacuucccacugcaguccuacggcuuucagcccacauacggcgugggcuaucagcccuacagagugguggugcugagcuucgaacugcugcaugccccugccacagugugcggcccuaagaaaagcaccaaucucgugaagaacaaaugcgugaacuucaacuucaacggccugaccggcaccggcgugcugacagagagcaacaagaaguuccugccauuccagcaguuuggccgggauaucgccgauaccacagacgccguuagagauccccagacacuggaaauccuggacaucaccccuugcagcuucggcggagugucugugaucaccccuggcaccaacaccagcaaucagguggcagugcuguaccagggcgugaacuguaccgaagugcccguggccauucacgccgaucagcugacaccuacauggcggguguacuccaccggcagcaauguguuucagaccagagccggcugucugaucggagccgagcacgugaacaauagcuacgagugcgacauccccaucggcgcuggaaucugcgccagcuaccagacacagacaaacagcccucggagagccagaagcguggccagccagagcaucauugccuacacaaugucucugggcguggagaacagcguggccuacuccaacaacucuaucgcuauccccaccaacuucaccaucagcgugaccacagagauccugccuguguccaugaccaagaccagcguggacugcaccauguacaucugcggcgauuccaccgagugcuccaaccugcugcugcaguacggcagcuucugcacccagcugaauagagcccugacagggaucgccguggaacaggacaagaacacccaagagguguucgcccaagugaagcagaucuacaagaccccuccuaucaaggacuucggcggcuucaauuucagccagauucugcccgauccuagcaagcccagcaagcggagcuucaucgaggaccugcuguucaacaaagugacacuggccgacgccggcuucaucaagcaguauggcgauugucugggcgacauugccgccagggaucugauuugcgcccagaaguuuaacggacugacagugcugccuccucugcugaccgaugagaugaucgcccaguacacaucugcccugcuggccggcacaaucacaagcggcuggacauuuggagcaggcgccgcucugcagauccccuuugcuaugcagauggccuaccgguucaacggcaucggagugacccagaaugugcuguacgagaaccagaagcugaucgccaaccaguucaacagcgccaucggcaagauccaggacagccugagcagcacagcaagcgcccugggaaagcugcaggacguggucaaccagaaugcccaggcacugaacacccuggucaagcagcuguccuccaacuucggcgccaucagcucugugcugaacgauauccugagcagacuggacccuccugaggccgaggugcagaucgacagacugaucacaggcagacugcagagccuccagacauacgugacccagcagcugaucagagccgccgagauuagagccucugccaaucuggccgccaccaagaugucugagugugugcugggccagagcaagagaguggacuuuugcggcaagggcuaccaccugaugagcuucccucagucugccccucacggcgugguguuucugcacgugacauaugugcccgcucaagagaagaauuucaccaccgcuccagccaucugccacgacggcaaagcccacuuuccuagagaaggcguguucguguccaacggcacccauugguucgugacacagcggaacuucuacgagccccagaucaucaccaccgacaacaccuucgugucuggcaacugcgacgucgugaucggcauugugaacaauaccguguacgacccucugcagcccgagcuggacagcuucaaagaggaacuggacaaguacuuuaagaaccacacaagccccgacguggaccugggcgauaucagcggaaucaaugccagcgucgugaacauccagaaagagaucgaccggcugaacgagguggccaagaaucugaacgagagccugaucgaccugcaagaacuggggaaguacgagcaguacaucaaguggcccugguacaucuggcugggcuuuaucgccggacugauugccaucgugauggucacaaucaugcuguguugcaugaccagcugcuguagcugccugaagggcuguuguagcuguggcagcugcugcaaguucgacgaggacgauucugagcccgugcugaagggcgugaaacugcacuacacaugaugacucgagcugguacugcaugcacgcaaugcuagcugccccuuucccguccuggguaccccgagucucccccgaccucgggucccagguaugcucccaccuccaccugccccacucaccaccucugcuaguuccagacaccucccaagcacgcagcaaugcagcucaaaacgcuuagccuagccacacccccacgggaaacagcagugauuaaccuuuagcaauaaacgaaaguuuaacuaagcuauacuaaccccaggguuggucaauuucgugccagccacacccuggagcuagcaaaaaaaaaaaaaaaaaaaaaaaaaaaaaaaaaaaaaaaaaaaaaaaaaaaaaaaaaaaaaaaaaaaaaaaaaaaaaaaaaaaaaaaaaaaaaaaaaaaa

SEQ ID NO: 26482 - RNA, 4273 nt, Artificial Sequence
  SARS-CoV-2/Wuhan/WIV05/2019__EPI_ISL_402128 spike protein mRNA gc mod (1-1273)(K986P_V987P_K986P_V987P_E484K_D614G)
agaauaaacuaguauucuucugguccccacagacucagagagaacccgccaccauguucguguuccuggugcugcugccucugguguccagccagugugugaaccugaccaccagaacacagcugccuccagccuacaccaacagcuuuaccagaggcguguacuaccccgacaagguguucagauccagcgugcugcacucuacccaggaccuguuccugccuuucuucagcaacgugaccugguuccacgccauccacguguccggcaccaauggcaccaagagauucgacaaccccgugcugcccuucaacgacgggguguacuuugccagcaccgagaaguccaacaucaucagaggcuggaucuucggcaccacacuggacagcaagacccagagccugcugaucgugaacaacgccaccaacguggucaucaaagugugcgaguuccaguucugcaacgaccccuuccugggcgucuacuaccacaagaacaacaagagcuggauggaaagcgaguuccggguguacagcagcgccaacaacugcaccuucgaguacgugucccagccuuuccugauggaccuggaaggcaagcagggcaacuucaagaaccugcgcgaguucguguuuaagaacaucgacggcuacuucaagaucuacagcaagcacaccccuaucaaccucgugcgggaucugccucagggcuucucugcucuggaaccccugguggaucugcccaucggcaucaacaucacccgguuucagacacugcuggcccugcacagaagcuaccugacaccuggcgauagcagcagcggauggacagcuggugccgccgcuuacuaugugggcuaccugcagccuagaaccuuccugcugaaguacaacgagaacggcaccaucaccgacgccguggauugugcucuggauccucugagcgagacaaagugcacccugaaguccuucaccguggaaaagggcaucuaccagaccagcaacuuccgggugcagcccaccgaauccaucgugcgguuccccaauaucaccaaucugugccccuucggcgagguguucaaugccaccagauucgccucuguguacgccuggaaccggaagcggaucagcaauugcguggccgacuacuccgugcuguacaacuccgccagcuucagcaccuucaagugcuacggcguguccccuaccaagcugaacgaccugugcuucacaaacguguacgccgacagcuucgugauccggggagaugaagugcggcagauugccccuggacagacaggcaagaucgccgacuacaacuacaagcugcccgacgacuucaccggcugugugauugccuggaacagcaacaaccuggacuccaaagucggcggcaacuacaauuaccuguaccggcuguuccggaaguccaaucugaagcccuucgagcgggacaucuccaccgagaucuaucaggccggcagcaccccuuguaacggcgugaagggcuucaacugcuacuucccacugcaguccuacggcuuucagcccacaaauggcgugggcuaucagcccuacagagugguggugcugagcuucgaacugcugcaugccccugccacagugugcggcccuaagaaaagcaccaaucucgugaagaacaaaugcgugaacuucaacuucaacggccugaccggcaccggcgugcugacagagagcaacaagaaguuccugccauuccagcaguuuggccgggauaucgccgauaccacagacgccguuagagauccccagacacuggaaauccuggacaucaccccuugcagcuucggcggagugucugugaucaccccuggcaccaacaccagcaaucagguggcagugcuguaccagggcgugaacuguaccgaagugcccguggccauucacgccgaucagcugacaccuacauggcggguguacuccaccggcagcaauguguuucagaccagagccggcugucugaucggagccgagcacgugaacaauagcuacgagugcgacauccccaucggcgcuggaaucugcgccagcuaccagacacagacaaacagcccucggagagccagaagcguggccagccagagcaucauugccuacacaaugucucugggcgccgagaacagcguggccuacuccaacaacucuaucgcuauccccaccaacuucaccaucagcgugaccacagagauccugccuguguccaugaccaagaccagcguggacugcaccauguacaucugcggcgauuccaccgagugcuccaaccugcugcugcaguacggcagcuucugcacccagcugaauagagcccugacagggaucgccguggaacaggacaagaacacccaagagguguucgcccaagugaagcagaucuacaagaccccuccuaucaaggacuucggcggcuucaauuucagccagauucugcccgauccuagcaagcccagcaagcggagcuucaucgaggaccugcuguucaacaaagugacacuggccgacgccggcuucaucaagcaguauggcgauugucugggcgacauugccgccagggaucugauuugcgcccagaaguuuaacggacugacagugcugccuccucugcugaccgaugagaugaucgcccaguacacaucugcccugcuggccggcacaaucacaagcggcuggacauuuggagcaggcgccgcucugcagauccccuuugcuaugcagauggccuaccgguucaacggcaucggagugacccagaaugugcuguacgagaaccagaagcugaucgccaaccaguucaacagcgccaucggcaagauccaggacagccugagcagcacagcaagcgcccugggaaagcugcaggacguggucaaccagaaugcccaggcacugaacacccuggucaagcagcuguccuccaacuucggcgccaucagcucugugcugaacgauauccugagcagacuggacccuccugaggccgaggugcagaucgacagacugaucacaggcagacugcagagccuccagacauacgugacccagcagcugaucagagccgccgagauuagagccucugccaaucuggccgccaccaagaugucugagugugugcugggccagagcaagagaguggacuuuugcggcaagggcuaccaccugaugagcuucccucagucugccccucacggcgugguguuucugcacgugacauaugugcccgcucaagagaagaauuucaccaccgcuccagccaucugccacgacggcaaagcccacuuuccuagagaaggcguguucguguccaacggcacccauugguucgugacacagcggaacuucuacgagccccagaucaucaccaccgacaacaccuucgugucuggcaacugcgacgucgugaucggcauugugaacaauaccguguacgacccucugcagcccgagcuggacagcuucaaagaggaacuggacaaguacuuuaagaaccacacaagccccgacguggaccugggcgauaucagcggaaucaaugccagcgucgugaacauccagaaagagaucgaccggcugaacgagguggccaagaaucugaacgagagccugaucgaccugcaagaacuggggaaguacgagcaguacaucaaguggcccugguacaucuggcugggcuuuaucgccggacugauugccaucgugauggucacaaucaugcuguguugcaugaccagcugcuguagcugccugaagggcuguuguagcuguggcagcugcugcaaguucgacgaggacgauucugagcccgugcugaagggcgugaaacugcacuacacaugaugacucgagcugguacugcaugcacgcaaugcuagcugccccuuucccguccuggguaccccgagucucccccgaccucgggucccagguaugcucccaccuccaccugccccacucaccaccucugcuaguuccagacaccucccaagcacgcagcaaugcagcucaaaacgcuuagccuagccacacccccacgggaaacagcagugauuaaccuuuagcaauaaacgaaaguuuaacuaagcuauacuaaccccaggguuggucaauuucgugccagccacacccuggagcuagcaaaaaaaaaaaaaaaaaaaaaaaaaaaaaaaaaaaaaaaaaaaaaaaaaaaaaaaaaaaaaaaaaaaaaaaaaaaaaaaaaaaaaaaaaaaaaaaaaaaa

SEQ ID NO: 26483 - RNA, 4273 nt, Artificial Sequence
  SARS-CoV-2/Wuhan/WIV05/2019__EPI_ISL_402128 spike protein mRNA gc mod (1-1273)(K986P_V987P_K986P_V987P_L18F_T20N_P26S_D138Y_R190S_K417T _E484K_N501Y_D614G_H655Y_T1027I)
agaauaaacuaguauucuucugguccccacagacucagagagaacccgccaccauguucguguuccuggugcugcugccucugguguccagccagugugugaacuucaccaacagaacacagcugccuagcgccuacaccaacagcuuuaccagaggcguguacuaccccgacaagguguucagauccagcgugcugcacucuacccaggaccuguuccugccuuucuucagcaacgugaccugguuccacgccauccacguguccggcaccaauggcaccaagagauucgacaaccccgugcugcccuucaacgacgggguguacuuugccagcaccgagaaguccaacaucaucagaggcuggaucuucggcaccacacuggacagcaagacccagagccugcugaucgugaacaacgccaccaacguggucaucaaagugugcgaguuccaguucugcaacuaccccuuccugggcgucuacuaccacaagaacaacaagagcuggauggaaagcgaguuccggguguacagcagcgccaacaacugcaccuucgaguacgugucccagccuuuccugauggaccuggaaggcaagcagggcaacuucaagaaccugagcgaguucguguuuaagaacaucgacggcuacuucaagaucuacagcaagcacaccccuaucaaccucgugcgggaucugccucagggcuucucugcucuggaaccccugguggaucugcccaucggcaucaacaucacccgguuucagacacugcuggcccugcacagaagcuaccugacaccuggcgauagcagcagcggauggacagcuggugccgccgcuuacuaugugggcuaccugcagccuagaaccuuccugcugaaguacaacgagaacggcaccaucaccgacgccguggauugugcucuggauccucugagcgagacaaagugcacccugaaguccuucaccguggaaaagggcaucuaccagaccagcaacuuccgggugcagcccaccgaauccaucgugcgguuccccaauaucaccaaucugugccccuucggcgagguguucaaugccaccagauucgccucuguguacgccuggaaccggaagcggaucagcaauugcguggccgacuacuccgugcuguacaacuccgccagcuucagcaccuucaagugcuacggcguguccccuaccaagcugaacgaccugugcuucacaaacguguacgccgacagcuucgugauccggggagaugaagugcggcagauugccccuggacagacaggcaccaucgccgacuacaacuacaagcugcccgacgacuucaccggcugugugauugccuggaacagcaacaaccuggacuccaaagucggcggcaacuacaauuaccuguaccggcuguuccggaaguccaaucugaagcccuucgagcgggacaucuccaccgagaucuaucaggccggcagcaccccuuguaacggcgugaagggcuucaacugcuacuucccacugcaguccuacggcuuucagcccacauacggcgugggcuaucagcccuacagagugguggugcugagcuucgaacugcugcaugccccugccacagugugcggcccuaagaaaagcaccaaucucgugaagaacaaaugcgugaacuucaacuucaacggccugaccggcaccggcgugcugacagagagcaacaagaaguuccugccauuccagcaguuuggccgggauaucgccgauaccacagacgccguuagagauccccagacacuggaaauccuggacaucaccccuugcagcuucggcggagugucugugaucaccccuggcaccaacaccagcaaucagguggcagugcuguaccagggcgugaacuguaccgaagugcccguggccauucacgccgaucagcugacaccuacauggcggguguacuccaccggcagcaauguguuucagaccagagccggcugucugaucggagccgaguacgugaacaauagcuacgagugcgacauccccaucggcgcuggaaucugcgccagcuaccagacacagacaaacagcccucggagagccagaagcguggccagccagagcaucauugccuacacaaugucucugggcgccgagaacagcguggccuacuccaacaacucuaucgcuauccccaccaacuucaccaucagcgugaccacagagauccugccuguguccaugaccaagaccagcguggacugcaccauguacaucugcggcgauuccaccgagugcuccaaccugcugcugcaguacggcagcuucugcacccagcugaauagagcccugacagggaucgccguggaacaggacaagaacacccaagagguguucgcccaagugaagcagaucuacaagaccccuccuaucaaggacuucggcggcuucaauuucagccagauucugcccgauccuagcaagcccagcaagcggagcuucaucgaggaccugcuguucaacaaagugacacuggccgacgccggcuucaucaagcaguauggcgauugucugggcgacauugccgccagggaucugauuugcgcccagaaguuuaacggacugacagugcugccuccucugcugaccgaugagaugaucgcccaguacacaucugcccugcuggccggcacaaucacaagcggcuggacauuuggagcaggcgccgcucugcagauccccuuugcuaugcagauggccuaccgguucaacggcaucggagugacccagaaugugcuguacgagaaccagaagcugaucgccaaccaguucaacagcgccaucggcaagauccaggacagccugagcagcacagcaagcgcccugggaaagcugcaggacguggucaaccagaaugcccaggcacugaacacccuggucaagcagcuguccuccaacuucggcgccaucagcucugugcugaacgauauccugagcagacuggacccuccugaggccgaggugcagaucgacagacugaucacaggcagacugcagagccuccagacauacgugacccagcagcugaucagagccgccgagauuagagccucugccaaucuggccgccaucaagaugucugagugugugcugggccagagcaagagaguggacuuuugcggcaagggcuaccaccugaugagcuucccucagucugccccucacggcgugguguuucugcacgugacauaugugcccgcucaagagaagaauuucaccaccgcuccagccaucugccacgacggcaaagcccacuuuccuagagaaggcguguucguguccaacggcacccauugguucgugacacagcggaacuucuacgagccccagaucaucaccaccgacaacaccuucgugucuggcaacugcgacgucgugaucggcauugugaacaauaccguguacgacccucugcagcccgagcuggacagcuucaaagaggaacuggacaaguacuuuaagaaccacacaagccccgacguggaccugggcgauaucagcggaaucaaugccagcgucgugaacauccagaaagagaucgaccggcugaacgagguggccaagaaucugaacgagagccugaucgaccugcaagaacuggggaaguacgagcaguacaucaaguggcccugguacaucuggcugggcuuuaucgccggacugauugccaucgugauggucacaaucaugcuguguugcaugaccagcugcuguagcugccugaagggcuguuguagcuguggcagcugcugcaaguucgacgaggacgauucugagcccgugcugaagggcgugaaacugcacuacacaugaugacucgagcugguacugcaugcacgcaaugcuagcugccccuuucccguccuggguaccccgagucucccccgaccucgggucccagguaugcucccaccuccaccugccccacucaccaccucugcuaguuccagacaccucccaagcacgcagcaaugcagcucaaaacgcuuagccuagccacacccccacgggaaacagcagugauuaaccuuuagcaauaaacgaaaguuuaacuaagcuauacuaaccccaggguuggucaauuucgugccagccacacccuggagcuagcaaaaaaaaaaaaaaaaaaaaaaaaaaaaaaaaaaaaaaaaaaaaaaaaaaaaaaaaaaaaaaaaaaaaaaaaaaaaaaaaaaaaaaaaaaaaaaaaaaaa

SEQ ID NO: 26484 - RNA, 4273 nt, Artificial Sequence
  SARS-CoV-2/Wuhan/WIV05/2019__EPI_ISL_402128 spike protein mRNA gc mod (1-1273)(K986P_V987P_K986P_V987P_S13I_W152C_L452R_D614G)
agaauaaacuaguauucuucugguccccacagacucagagagaacccgccaccauguucguguuccuggugcugcugccucugguguccauccagugugugaaccugaccaccagaacacagcugccuccagccuacaccaacagcuuuaccagaggcguguacuaccccgacaagguguucagauccagcgugcugcacucuacccaggaccuguuccugccuuucuucagcaacgugaccugguuccacgccauccacguguccggcaccaauggcaccaagagauucgacaaccccgugcugcccuucaacgacgggguguacuuugccagcaccgagaaguccaacaucaucagaggcuggaucuucggcaccacacuggacagcaagacccagagccugcugaucgugaacaacgccaccaacguggucaucaaagugugcgaguuccaguucugcaacgaccccuuccugggcgucuacuaccacaagaacaacaagagcugcauggaaagcgaguuccggguguacagcagcgccaacaacugcaccuucgaguacgugucccagccuuuccugauggaccuggaaggcaagcagggcaacuucaagaaccugcgcgaguucguguuuaagaacaucgacggcuacuucaagaucuacagcaagcacaccccuaucaaccucgugcgggaucugccucagggcuucucugcucuggaaccccugguggaucugcccaucggcaucaacaucacccgguuucagacacugcuggcccugcacagaagcuaccugacaccuggcgauagcagcagcggauggacagcuggugccgccgcuuacuaugugggcuaccugcagccuagaaccuuccugcugaaguacaacgagaacggcaccaucaccgacgccguggauugugcucuggauccucugagcgagacaaagugcacccugaaguccuucaccguggaaaagggcaucuaccagaccagcaacuuccgggugcagcccaccgaauccaucgugcgguuccccaauaucaccaaucugugccccuucggcgagguguucaaugccaccagauucgccucuguguacgccuggaaccggaagcggaucagcaauugcguggccgacuacuccgugcuguacaacuccgccagcuucagcaccuucaagugcuacggcguguccccuaccaagcugaacgaccugugcuucacaaacguguacgccgacagcuucgugauccggggagaugaagugcggcagauugccccuggacagacaggcaagaucgccgacuacaacuacaagcugcccgacgacuucaccggcugugugauugccuggaacagcaacaaccuggacuccaaagucggcggcaacuacaauuaccgcuaccggcuguuccggaaguccaaucugaagcccuucgagcgggacaucuccaccgagaucuaucaggccggcagcaccccuuguaacggcguggaaggcuucaacugcuacuucccacugcaguccuacggcuuucagcccacaaauggcgugggcuaucagcccuacagagugguggugcugagcuucgaacugcugcaugccccugccacagugugcggcccuaagaaaagcaccaaucucgugaagaacaaaugcgugaacuucaacuucaacggccugaccggcaccggcgugcugacagagagcaacaagaaguuccugccauuccagcaguuuggccgggauaucgccgauaccacagacgccguuagagauccccagacacuggaaauccuggacaucaccccuugcagcuucggcggagugucugugaucaccccuggcaccaacaccagcaaucagguggcagugcuguaccagggcgugaacuguaccgaagugcccguggccauucacgccgaucagcugacaccuacauggcggguguacuccaccggcagcaauguguuucagaccagagccggcugucugaucggagccgagcacgugaacaauagcuacgagugcgacauccccaucggcgcuggaaucugcgccagcuaccagacacagacaaacagcccucggagagccagaagcguggccagccagagcaucauugccuacacaaugucucugggcgccgagaacagcguggccuacuccaacaacucuaucgcuauccccaccaacuucaccaucagcgugaccacagagauccugccuguguccaugaccaagaccagcguggacugcaccauguacaucugcggcgauuccaccgagugcuccaaccugcugcugcaguacggcagcuucugcacccagcugaauagagcccugacagggaucgccguggaacaggacaagaacacccaagagguguucgcccaagugaagcagaucuacaagaccccuccuaucaaggacuucggcggcuucaauuucagccagauucugcccgauccuagcaagcccagcaagcggagcuucaucgaggaccugcuguucaacaaagugacacuggccgacgccggcuucaucaagcaguauggcgauugucugggcgacauugccgccagggaucugauuugcgcccagaaguuuaacggacugacagugcugccuccucugcugaccgaugagaugaucgcccaguacacaucugcccugcuggccggcacaaucacaagcggcuggacauuuggagcaggcgccgcucugcagauccccuuugcuaugcagauggccuaccgguucaacggcaucggagugacccagaaugugcuguacgagaaccagaagcugaucgccaaccaguucaacagcgccaucggcaagauccaggacagccugagcagcacagcaagcgcccugggaaagcugcaggacguggucaaccagaaugcccaggcacugaacacccuggucaagcagcuguccuccaacuucggcgccaucagcucugugcugaacgauauccugagcagacuggacccuccugaggccgaggugcagaucgacagacugaucacaggcagacugcagagccuccagacauacgugacccagcagcugaucagagccgccgagauuagagccucugccaaucuggccgccaccaagaugucugagugugugcugggccagagcaagagaguggacuuuugcggcaagggcuaccaccugaugagcuucccucagucugccccucacggcgugguguuucugcacgugacauaugugcccgcucaagagaagaauuucaccaccgcuccagccaucugccacgacggcaaagcccacuuuccuagagaaggcguguucguguccaacggcacccauugguucgugacacagcggaacuucuacgagccccagaucaucaccaccgacaacaccuucgugucuggcaacugcgacgucgugaucggcauugugaacaauaccguguacgacccucugcagcccgagcuggacagcuucaaagaggaacuggacaaguacuuuaagaaccacacaagccccgacguggaccugggcgauaucagcggaaucaaugccagcgucgugaacauccagaaagagaucgaccggcugaacgagguggccaagaaucugaacgagagccugaucgaccugcaagaacuggggaaguacgagcaguacaucaaguggcccugguacaucuggcugggcuuuaucgccggacugauugccaucgugauggucacaaucaugcuguguugcaugaccagcugcuguagcugccugaagggcuguuguagcuguggcagcugcugcaaguucgacgaggacgauucugagcccgugcugaagggcgugaaacugcacuacacaugaugacucgagcugguacugcaugcacgcaaugcuagcugccccuuucccguccuggguaccccgagucucccccgaccucgggucccagguaugcucccaccuccaccugccccacucaccaccucugcuaguuccagacaccucccaagcacgcagcaaugcagcucaaaacgcuuagccuagccacacccccacgggaaacagcagugauuaaccuuuagcaauaaacgaaaguuuaacuaagcuauacuaaccccaggguuggucaauuucgugccagccacacccuggagcuagcaaaaaaaaaaaaaaaaaaaaaaaaaaaaaaaaaaaaaaaaaaaaaaaaaaaaaaaaaaaaaaaaaaaaaaaaaaaaaaaaaaaaaaaaaaaaaaaaaaaa

SEQ ID NO: 26485 - RNA, 1430 nt, Artificial Sequence
  SARS-CoV-2/Wuhan/WIV05/2019__EPI_ISL_402128 spike protein mRNA gc (1-15,334-528) Ferritin construct
gggaaauaagagagaaaagaagaguaagaagaaauauaagaccccggcgccgccaccauguucguguuccugguccuccugccccuggugagcucccagugcaaccugugccccuucggcgagguguucaacgccacccgguucgccagcgucuacgccuggaaccgcaagcggaucuccaacugcguggcggacuacagcgugcuguacaacuccgccagcuucuccacguucaagugcuacggcgucagccccaccaagcucaacgaccugugcuucaccaacguguacgccgacuccuucgugauccgcggggacgagguccggcagaucgcccccggccagaccgggaagaucgccgacuacaacuacaagcugccggacgacuucacgggcugcgugaucgcguggaacagcaacaaccucgacuccaaggucgggggcaacuacaacuaccuguaccgccuguuccgcaagagcaaccucaagcccuucgagcgggacaucuccaccgagaucuaccaggccggcagcacccccugcaacgggguggagggcuucaacugcuacuucccccugcaguccuacggguuccagccgaccaacggcgugggguaccagcccuaccggguggucgugcugagcuucgagcuccugcacgcccccgccacggugugcggccccaagggcggggguggaagcggcggggguggaagugacaucaucaagcuccugaacgagcaggucaacaaggagaugcaguccagcaaccuguacauguccaugagcuccuggugcuacacccacagccucgacggcgccgggcuguuccuguucgaccacgccgcggaggaguacgagcacgccaagaagcucaucaucuuccugaacgagaacaacgugcccgugcagcugaccuccaucagcgccccggagcacaaguucgagggccucacgcagaucuuccagaaggccuacgagcacgagcagcacaucuccgagagcaucaacaacaucguggaccacgccaucaaguccaaggaccacgcgaccuucaacuuccugcagugguacgucgccgagcagcacgaggaggaggugcuguucaaggacauccucgacaagaucgagcugaucgggaacgagaaccacggccuguaccucgccgaccaguacgugaaggggaucgccaagagccgcaaguccugauaauaggcuggagccucgguggccuagcuucuugccccuugggccuccccccagccccuccuccccuuccugcacccguacccccguggucuuugaauaaagucugagugggcggcaaaaaaaaaaaaaaaaaaaaaaaaaaaaaaaaaaaaaaaaaaaaaaaaaaaaaaaaaaaaaaaaaaaaaaaaaaaaaaaaaaaaaaaaaaaaaaaaaaaaucuag

SEQ ID NO: 26486 - RNA, 1028 nt, Artificial Sequence
  SARS-CoV-2/Wuhan/WIV05/2019__EPI_ISL_402128 spike protein mRNA gc (334-528) Foldon construct
gggaaauaagagagaaaagaagaguaagaagaaauauaagaccccggcgccgccaccaugcccaugggcagccugcagccgcucgccacccuguaccugcucgggaugcugguggccuccguccuggcgaaccugugccccuucggcgagguguucaacgccacccgguucgccagcgucuacgccuggaaccgcaagcggaucuccaacugcguggcggacuacagcgugcuguacaacuccgccagcuucuccacguucaagugcuacggcgucagccccaccaagcucaacgaccugugcuucaccaacguguacgccgacuccuucgugauccgcggggacgagguccggcagaucgcccccggccagaccgggaagaucgccgacuacaacuacaagcugccggacgacuucacgggcugcgugaucgcguggaacagcaacaaccucgacuccaaggucgggggcaacuacaacuaccuguaccgccuguuccgcaagagcaaccucaagcccuucgagcgggacaucuccaccgagaucuaccaggccggcagcacccccugcaacgggguggagggcuucaacugcuacuucccccugcaguccuacggguuccagccgaccaacggcgugggguaccagcccuaccggguggucgugcugagcuucgagcuccugcacgcccccgccacggugugcggccccaagggcagcggcggguacauccccgaggccccgcgcgacggccaggccuacgugcggaaggacggcgaguggguccugcugagcaccuuccucugauaauaggcuggagccucgguggccuagcuucuugccccuugggccuccccccagccccuccuccccuuccugcacccguacccccguggucuuugaauaaagucugagugggcggcaaaaaaaaaaaaaaaaaaaaaaaaaaaaaaaaaaaaaaaaaaaaaaaaaaaaaaaaaaaaaaaaaaaaaaaaaaaaaaaaaaaaaaaaaaaaaaaaaaaaucuag

SEQ ID NO: 26487 - RNA, 1406 nt, Artificial Sequence
  SARS-CoV-2/Wuhan/WIV05/2019__EPI_ISL_402128 spike protein mRNA gc (1-15,334-528) LumSynth construct
gggaaauaagagagaaaagaagaguaagaagaaauauaagaccccggcgccgccaccauguucguguuccugguccuccugccccuggugagcucccagugcaaccugugccccuucggcgagguguucaacgccacccgguucgccagcgucuacgccuggaaccgcaagcggaucuccaacugcguggcggacuacagcgugcuguacaacuccgccagcuucuccacguucaagugcuacggcgucagccccaccaagcucaacgaccugugcuucaccaacguguacgccgacuccuucgugauccgcggggacgagguccggcagaucgcccccggccagaccgggaagaucgccgacuacaacuacaagcugccggacgacuucacgggcugcgugaucgcguggaacagcaacaaccucgacuccaaggucgggggcaacuacaacuaccuguaccgccuguuccgcaagagcaaccucaagcccuucgagcgggacaucuccaccgagaucuaccaggccggcagcacccccugcaacgggguggagggcuucaacugcuacuucccccugcaguccuacggguuccagccgaccaacggcgugggguaccagcccuaccggguggucgugcugagcuucgagcuccugcacgcccccgccacggugugcggccccaagggcggcggcggcuccggaggcggagguagcgggggacagaucuacgagggcaagcugaccgccgaggggcuccgcuucggcaucguggccagccgguucaaccacgcgcuggucgaccgccugguggagggggccaucgacgccaucgugcggcacggcgggcgcgaggaggacaucacccucguccgggugcccggcuccugggagaucccgguggccgccggcgagcuggcccgcaaggaggacaucgacgcggucaucgccaucggggugcugauccggggcgccacgccccacuucgacuacaucgccagcgagguguccaaggggcucgcggaccugagccuggagcuccgcaagcccaucaccuucggcgucaucaccgccgacacccuggagcaggccaucgagcgggccgggacgaagcacggcaacaagggcugggaggccgcgcuguccgccaucgagauggccaaccucuucaagagccugcgcugauaauaggcuggagccucgguggccuagcuucuugccccuugggccuccccccagccccuccuccccuuccugcacccguacccccguggucuuugaauaaagucugagugggcggcaaaaaaaaaaaaaaaaaaaaaaaaaaaaaaaaaaaaaaaaaaaaaaaaaaaaaaaaaaaaaaaaaaaaaaaaaaaaaaaaaaaaaaaaaaaaaaaaaaaaucuag

SEQ ID NO: 26488 - RNA, 1367 nt, Artificial Sequence
  SARS-CoV-2/Wuhan/WIV05/2019__EPI_ISL_402128 spike protein mRNA gc (334-528) LumSynth construct
gggaaauaagagagaaaagaagaguaagaagaaauauaagaccccggcgccgccaccaugcagaucuacgagggcaagcugaccgccgaggggcuccgcuucggcaucguggccagccgguucaaccacgcgcuggucgaccgccugguggagggggccaucgacgccaucgugcggcacggcgggcgcgaggaggacaucacccucguccgggugcccggcuccugggagaucccgguggccgccggcgagcuggcccgcaaggaggacaucgacgcggucaucgccaucggggugcugauccggggcgccacgccccacuucgacuacaucgccagcgagguguccaaggggcucgcggaccugagccuggagcuccgcaagcccaucaccuucggcgucaucaccgccgacacccuggagcaggccaucgagcgggccgggacgaagcacggcaacaagggcugggaggccgcgcuguccgccaucgagauggccaaccucuucaagagccugcgcggcgggggcgggagcggcgggggcggcuccgggggcgggaaccugugccccuucggcgagguguucaacgccacccgguucgccagcgucuacgccuggaaccgcaagcggaucuccaacugcguggcggacuacagcgugcuguacaacuccgccagcuucuccacguucaagugcuacggcgucagccccaccaagcucaacgaccugugcuucaccaacguguacgccgacuccuucgugauccgcggggacgagguccggcagaucgcccccggccagaccgggaagaucgccgacuacaacuacaagcugccggacgacuucacgggcugcgugaucgcguggaacagcaacaaccucgacuccaaggucgggggcaacuacaacuaccuguaccgccuguuccgcaagagcaaccucaagcccuucgagcgggacaucuccaccgagaucuaccaggccggcagcacccccugcaacgggguggagggcuucaacugcuacuucccccugcaguccuacggguuccagccgaccaacggcgugggguaccagcccuaccggguggucgugcugagcuucgagcuccugcacgcccccgccacggugugcggccccaagugauaauaggcuggagccucgguggccuagcuucuugccccuugggccuccccccagccccuccuccccuuccugcacccguacccccguggucuuugaauaaagucugagugggcggcaaaaaaaaaaaaaaaaaaaaaaaaaaaaaaaaaaaaaaaaaaaaaaaaaaaaaaaaaaaaaaaaaaaaaaaaaaaaaaaaaaaaaaaaaaaaaaaaaaaaucuag

SEQ ID NO: 26489 - RNA, 4100 nt, Artificial Sequence
  SARS-CoV-2/Wuhan/WIV05/2019__EPI_ISL_402128 spike protein mRNA gc (1-1273)
gggaaauaagagagaaaagaagaguaagaagaaauauaagaccccggcgccgccaccauguucguguuccugguccuccugccccuggugagcucccagugcgugaaccucaccacccgcacgcagcugccgcccgccuacaccaacagcuucacccggggcgucuacuaccccgacaagguguuccgcuccagcgugcugcacuccacccaggaccucuuccugcccuucuucagcaacgucacgugguuccacgccauccacguguccgggaccaacggcaccaagcgguucgacaacccggugcugcccuucaacgacggggucuacuucgcgagcaccgagaaguccaacaucauccgcggcuggaucuucgggacgacccucgacagcaagacccagucccugcugaucgugaacaacgccaccaacguggucaucaaggugugcgaguuccaguucugcaacgaccccuuccucggcguguacuaccacaagaacaacaagagcuggauggaguccgaguuccgggucuacagcuccgccaacaacugcacguucgaguacgugagccagcccuuccugauggaccuggagggcaagcaggggaacuucaagaaccuccgcgaguucguguucaagaacaucgacggcuacuucaagaucuacuccaagcacaccccgaucaaccugguccgggaccugccccagggguucagcgcccucgagccccugguggaccugcccaucggcaucaacaucacccgcuuccagacccuccuggcccugcaccgguccuaccucacgccgggggacagcagcuccggcuggaccgcgggcgccgccgccuacuacgugggguaccugcagccccgcaccuuccugcucaaguacaacgagaacggcaccaucacggacgcggucgacugcgcccuggacccccugagcgagaccaagugcacccucaaguccuucaccguggagaaggggaucuaccagacgagcaacuuccgggugcagcccaccgaguccaucguccgcuucccgaacaucaccaaccugugccccuucggcgagguguucaacgccacccgguucgccagcgucuacgccuggaaccgcaagcggaucuccaacugcguggcggacuacagcgugcuguacaacuccgccagcuucuccacguucaagugcuacggcgucagccccaccaagcucaacgaccugugcuucaccaacguguacgccgacuccuucgugauccgcggggacgagguccggcagaucgcccccggccagaccgggaagaucgccgacuacaacuacaagcugccggacgacuucacgggcugcgugaucgcguggaacagcaacaaccucgacuccaaggucgggggcaacuacaacuaccuguaccgccuguuccgcaagagcaaccucaagcccuucgagcgggacaucuccaccgagaucuaccaggccggcagcacccccugcaacgggguggagggcuucaacugcuacuucccccugcaguccuacggguuccagccgaccaacggcgugggguaccagcccuaccggguggucgugcugagcuucgagcuccugcacgcccccgccacggugugcggccccaagaaguccaccaaccuggucaagaacaagugcgugaacuucaacuucaacggccucaccgggaccggcgugcugaccgagagcaacaagaaguuccugccguuccagcaguucgggcgcgacaucgccgacacgaccgacgcgguccgcgacccccagacccuggagauccucgacaucacccccugcagcuucggcgggguguccgugaucacgccgggcaccaacaccagcaaccaggucgccgugcuguaccaggacgugaacugcaccgagguccccguggccauccacgccgaccagcugacgcccaccuggcggguguacuccaccggcagcaacgucuuccagacccgcgccgggugccucaucggcgcggagcacgugaacaacuccuacgagugcgacauccccaucggggccggcaucugcgccagcuaccagacgcagaccaacuccccgcggcgcgcccggagcguggcgucccagagcaucaucgccuacaccaugucccugggcgccgagaacagcgucgccuacuccaacaacagcaucgccauccccaccaacuucacgaucuccgugaccaccgagauccugcccgugagcaugaccaagacgagcgucgacugcaccauguacaucugcggggacuccaccgagugcagcaaccuccugcugcaguacggcuccuucugcacccagcucaaccgcgcgcugacggggaucgccguggagcaggacaagaacacccaggagguguucgcccaggucaagcagaucuacaagacgcccccgaucaaggacuucggcggguucaacuucagccagauccugcccgaccccuccaagcccagcaagcgguccuucaucgaggaccuccuguucaacaaggugacccuggccgacgccggcuucaucaagcaguacggcgacugccucggggacaucgcggcccgcgaccugaucugcgcccagaaguucaacggccugaccgugcucccgccccugcugaccgacgagaugaucgcccaguacaccagcgcccuccuggcggggaccaucacguccggcuggaccuucggggccggcgccgcccugcagauccccuucgcgaugcagauggccuaccgguucaacggcaucggggucacccagaacgugcucuacgagaaccagaagcugaucgccaaccaguucaacagcgccaucggcaagauccaggacucccugagcuccaccgccagcgcgcucgggaagcugcaggacguggucaaccagaacgcccaggcccugaacacgcucgugaagcagcuguccagcaacuucggcgccaucuccagcgugcugaacgacauccucucccgccuggacaaggucgaggccgaggugcagaucgaccggcugaucaccgggcgccuccagagccugcagaccuacgugacccagcagcugauccgggcggccgagauccgcgccagcgccaaccucgccgcgaccaagauguccgagugcguccugggccagagcaagcggguggacuucugcggcaagggguaccaccugauguccuucccccagagcgccccgcacggcguggucuuccuccacgugacguacguccccgcccaggagaagaacuucaccaccgcccccgcgaucugccacgacgggaaggcccacuucccccgcgagggcguguucguguccaacgggacccacugguucgucacgcagcggaacuucuacgagccgcagaucaucaccaccgacaacaccuucgugagcggcaacugcgacguggucaucggcaucgugaacaacacgguguacgacccccugcagcccgagcuggacuccuucaaggaggagcucgacaaguacuucaagaaccacaccagccccgacgucgaccugggggacaucuccggcaucaacgccagcguggugaacauccagaaggagaucgaccgccugaacgaggucgccaagaaccucaacgagucccugaucgaccugcaggagcucgggaaguacgagcaguacaucaaguggccgugguacaucuggcugggcuucaucgccggccugaucgcgaucgugauggugaccaucaugcucugcugcaugaccagcugcugcuccugccugaaggggugcugcagcugcggcuccugcugcaaguucgacgaggacgacagcgagcccguccugaagggggugaagcuccacuacacgugauaauaggcuggagccucgguggccuagcuucuugccccuugggccuccccccagccccuccuccccuuccugcacccguacccccguggucuuugaauaaagucugagugggcggcaaaaaaaaaaaaaaaaaaaaaaaaaaaaaaaaaaaaaaaaaaaaaaaaaaaaaaaaaaaaaaaaaaaaaaaaaaaaaaaaaaaaaaaaaaaaaaaaaaaaucuag

SEQ ID NO: 26490 - RNA, 4100 nt, Artificial Sequence
  SARS-CoV-2/Wuhan/WIV05/2019__EPI_ISL_402128 spike protein mRNA gc (1-1273)(D614G)
gggaaauaagagagaaaagaagaguaagaagaaauauaagaccccggcgccgccaccauguucguguuccugguccuccugccccuggugagcucccagugcgugaaccucaccacccgcacgcagcugccgcccgccuacaccaacagcuucacccggggcgucuacuaccccgacaagguguuccgcuccagcgugcugcacuccacccaggaccucuuccugcccuucuucagcaacgucacgugguuccacgccauccacguguccgggaccaacggcaccaagcgguucgacaacccggugcugcccuucaacgacggggucuacuucgcgagcaccgagaaguccaacaucauccgcggcuggaucuucgggacgacccucgacagcaagacccagucccugcugaucgugaacaacgccaccaacguggucaucaaggugugcgaguuccaguucugcaacgaccccuuccucggcguguacuaccacaagaacaacaagagcuggauggaguccgaguuccgggucuacagcuccgccaacaacugcacguucgaguacgugagccagcccuuccugauggaccuggagggcaagcaggggaacuucaagaaccuccgcgaguucguguucaagaacaucgacggcuacuucaagaucuacuccaagcacaccccgaucaaccugguccgggaccugccccagggguucagcgcccucgagccccugguggaccugcccaucggcaucaacaucacccgcuuccagacccuccuggcccugcaccgguccuaccucacgccgggggacagcagcuccggcuggaccgcgggcgccgccgccuacuacgugggguaccugcagccccgcaccuuccugcucaaguacaacgagaacggcaccaucacggacgcggucgacugcgcccuggacccccugagcgagaccaagugcacccucaaguccuucaccguggagaaggggaucuaccagacgagcaacuuccgggugcagcccaccgaguccaucguccgcuucccgaacaucaccaaccugugccccuucggcgagguguucaacgccacccgguucgccagcgucuacgccuggaaccgcaagcggaucuccaacugcguggcggacuacagcgugcuguacaacuccgccagcuucuccacguucaagugcuacggcgucagccccaccaagcucaacgaccugugcuucaccaacguguacgccgacuccuucgugauccgcggggacgagguccggcagaucgcccccggccagaccgggaagaucgccgacuacaacuacaagcugccggacgacuucacgggcugcgugaucgcguggaacagcaacaaccucgacuccaaggucgggggcaacuacaacuaccuguaccgccuguuccgcaagagcaaccucaagcccuucgagcgggacaucuccaccgagaucuaccaggccggcagcacccccugcaacgggguggagggcuucaacugcuacuucccccugcaguccuacggguuccagccgaccaacggcgugggguaccagcccuaccggguggucgugcugagcuucgagcuccugcacgcccccgccacggugugcggccccaagaaguccaccaaccuggucaagaacaagugcgugaacuucaacuucaacggccucaccgggaccggcgugcugaccgagagcaacaagaaguuccugccguuccagcaguucgggcgcgacaucgccgacacgaccgacgcgguccgcgacccccagacccuggagauccucgacaucacccccugcagcuucggcgggguguccgugaucacgccgggcaccaacaccagcaaccaggucgccgugcuguaccagggcgugaacugcaccgagguccccguggccauccacgccgaccagcugacgcccaccuggcggguguacuccaccggcagcaacgucuuccagacccgcgccgggugccucaucggcgcggagcacgugaacaacuccuacgagugcgacauccccaucggggccggcaucugcgccagcuaccagacgcagaccaacuccccgcggcgcgcccggagcguggcgucccagagcaucaucgccuacaccaugucccugggcgccgagaacagcgucgccuacuccaacaacagcaucgccauccccaccaacuucacgaucuccgugaccaccgagauccugcccgugagcaugaccaagacgagcgucgacugcaccauguacaucugcggggacuccaccgagugcagcaaccuccugcugcaguacggcuccuucugcacccagcucaaccgcgcgcugacggggaucgccguggagcaggacaagaacacccaggagguguucgcccaggucaagcagaucuacaagacgcccccgaucaaggacuucggcggguucaacuucagccagauccugcccgaccccuccaagcccagcaagcgguccuucaucgaggaccuccuguucaacaaggugacccuggccgacgccggcuucaucaagcaguacggcgacugccucggggacaucgcggcccgcgaccugaucugcgcccagaaguucaacggccugaccgugcucccgccccugcugaccgacgagaugaucgcccaguacaccagcgcccuccuggcggggaccaucacguccggcuggaccuucggggccggcgccgcccugcagauccccuucgcgaugcagauggccuaccgguucaacggcaucggggucacccagaacgugcucuacgagaaccagaagcugaucgccaaccaguucaacagcgccaucggcaagauccaggacucccugagcuccaccgccagcgcgcucgggaagcugcaggacguggucaaccagaacgcccaggcccugaacacgcucgugaagcagcuguccagcaacuucggcgccaucuccagcgugcugaacgacauccucucccgccuggacaaggucgaggccgaggugcagaucgaccggcugaucaccgggcgccuccagagccugcagaccuacgugacccagcagcugauccgggcggccgagauccgcgccagcgccaaccucgccgcgaccaagauguccgagugcguccugggccagagcaagcggguggacuucugcggcaagggguaccaccugauguccuucccccagagcgccccgcacggcguggucuuccuccacgugacguacguccccgcccaggagaagaacuucaccaccgcccccgcgaucugccacgacgggaaggcccacuucccccgcgagggcguguucguguccaacgggacccacugguucgucacgcagcggaacuucuacgagccgcagaucaucaccaccgacaacaccuucgugagcggcaacugcgacguggucaucggcaucgugaacaacacgguguacgacccccugcagcccgagcuggacuccuucaaggaggagcucgacaaguacuucaagaaccacaccagccccgacgucgaccugggggacaucuccggcaucaacgccagcguggugaacauccagaaggagaucgaccgccugaacgaggucgccaagaaccucaacgagucccugaucgaccugcaggagcucgggaaguacgagcaguacaucaaguggccgugguacaucuggcugggcuucaucgccggccugaucgcgaucgugauggugaccaucaugcucugcugcaugaccagcugcugcuccugccugaaggggugcugcagcugcggcuccugcugcaaguucgacgaggacgacagcgagcccguccugaagggggugaagcuccacuacacgugauaauaggcuggagccucgguggccuagcuucuugccccuugggccuccccccagccccuccuccccuuccugcacccguacccccguggucuuugaauaaagucugagugggcggcaaaaaaaaaaaaaaaaaaaaaaaaaaaaaaaaaaaaaaaaaaaaaaaaaaaaaaaaaaaaaaaaaaaaaaaaaaaaaaaaaaaaaaaaaaaaaaaaaaaaucuag

SEQ ID NO: 26491 - RNA, 4100 nt, Artificial Sequence
  SARS-CoV-2/Wuhan/WIV05/2019__EPI_ISL_402128 spike protein mRNA gc (1-1273)(A222V_D614G)
gggaaauaagagagaaaagaagaguaagaagaaauauaagaccccggcgccgccaccauguucguguuccugguccuccugccccuggugagcucccagugcgugaaccucaccacccgcacgcagcugccgcccgccuacaccaacagcuucacccggggcgucuacuaccccgacaagguguuccgcuccagcgugcugcacuccacccaggaccucuuccugcccuucuucagcaacgucacgugguuccacgccauccacguguccgggaccaacggcaccaagcgguucgacaacccggugcugcccuucaacgacggggucuacuucgcgagcaccgagaaguccaacaucauccgcggcuggaucuucgggacgacccucgacagcaagacccagucccugcugaucgugaacaacgccaccaacguggucaucaaggugugcgaguuccaguucugcaacgaccccuuccucggcguguacuaccacaagaacaacaagagcuggauggaguccgaguuccgggucuacagcuccgccaacaacugcacguucgaguacgugagccagcccuuccugauggaccuggagggcaagcaggggaacuucaagaaccuccgcgaguucguguucaagaacaucgacggcuacuucaagaucuacuccaagcacaccccgaucaaccugguccgggaccugccccagggguucagcguccucgagccccugguggaccugcccaucggcaucaacaucacccgcuuccagacccuccuggcccugcaccgguccuaccucacgccgggggacagcagcuccggcuggaccgcgggcgccgccgccuacuacgugggguaccugcagccccgcaccuuccugcucaaguacaacgagaacggcaccaucacggacgcggucgacugcgcccuggacccccugagcgagaccaagugcacccucaaguccuucaccguggagaaggggaucuaccagacgagcaacuuccgggugcagcccaccgaguccaucguccgcuucccgaacaucaccaaccugugccccuucggcgagguguucaacgccacccgguucgccagcgucuacgccuggaaccgcaagcggaucuccaacugcguggcggacuacagcgugcuguacaacuccgccagcuucuccacguucaagugcuacggcgucagccccaccaagcucaacgaccugugcuucaccaacguguacgccgacuccuucgugauccgcggggacgagguccggcagaucgcccccggccagaccgggaagaucgccgacuacaacuacaagcugccggacgacuucacgggcugcgugaucgcguggaacagcaacaaccucgacuccaaggucgggggcaacuacaacuaccuguaccgccuguuccgcaagagcaaccucaagcccuucgagcgggacaucuccaccgagaucuaccaggccggcagcacccccugcaacgggguggagggcuucaacugcuacuucccccugcaguccuacggguuccagccgaccaacggcgugggguaccagcccuaccggguggucgugcugagcuucgagcuccugcacgcccccgccacggugugcggccccaagaaguccaccaaccuggucaagaacaagugcgugaacuucaacuucaacggccucaccgggaccggcgugcugaccgagagcaacaagaaguuccugccguuccagcaguucgggcgcgacaucgccgacacgaccgacgcgguccgcgacccccagacccuggagauccucgacaucacccccugcagcuucggcgggguguccgugaucacgccgggcaccaacaccagcaaccaggucgccgugcuguaccagggcgugaacugcaccgagguccccguggccauccacgccgaccagcugacgcccaccuggcggguguacuccaccggcagcaacgucuuccagacccgcgccgggugccucaucggcgcggagcacgugaacaacuccuacgagugcgacauccccaucggggccggcaucugcgccagcuaccagacgcagaccaacuccccgcggcgcgcccggagcguggcgucccagagcaucaucgccuacaccaugucccugggcgccgagaacagcgucgccuacuccaacaacagcaucgccauccccaccaacuucacgaucuccgugaccaccgagauccugcccgugagcaugaccaagacgagcgucgacugcaccauguacaucugcggggacuccaccgagugcagcaaccuccugcugcaguacggcuccuucugcacccagcucaaccgcgcgcugacggggaucgccguggagcaggacaagaacacccaggagguguucgcccaggucaagcagaucuacaagacgcccccgaucaaggacuucggcggguucaacuucagccagauccugcccgaccccuccaagcccagcaagcgguccuucaucgaggaccuccuguucaacaaggugacccuggccgacgccggcuucaucaagcaguacggcgacugccucggggacaucgcggcccgcgaccugaucugcgcccagaaguucaacggccugaccgugcucccgccccugcugaccgacgagaugaucgcccaguacaccagcgcccuccuggcggggaccaucacguccggcuggaccuucggggccggcgccgcccugcagauccccuucgcgaugcagauggccuaccgguucaacggcaucggggucacccagaacgugcucuacgagaaccagaagcugaucgccaaccaguucaacagcgccaucggcaagauccaggacucccugagcuccaccgccagcgcgcucgggaagcugcaggacguggucaaccagaacgcccaggcccugaacacgcucgugaagcagcuguccagcaacuucggcgccaucuccagcgugcugaacgacauccucucccgccuggacaaggucgaggccgaggugcagaucgaccggcugaucaccgggcgccuccagagccugcagaccuacgugacccagcagcugauccgggcggccgagauccgcgccagcgccaaccucgccgcgaccaagauguccgagugcguccugggccagagcaagcggguggacuucugcggcaagggguaccaccugauguccuucccccagagcgccccgcacggcguggucuuccuccacgugacguacguccccgcccaggagaagaacuucaccaccgcccccgcgaucugccacgacgggaaggcccacuucccccgcgagggcguguucguguccaacgggacccacugguucgucacgcagcggaacuucuacgagccgcagaucaucaccaccgacaacaccuucgugagcggcaacugcgacguggucaucggcaucgugaacaacacgguguacgacccccugcagcccgagcuggacuccuucaaggaggagcucgacaaguacuucaagaaccacaccagccccgacgucgaccugggggacaucuccggcaucaacgccagcguggugaacauccagaaggagaucgaccgccugaacgaggucgccaagaaccucaacgagucccugaucgaccugcaggagcucgggaaguacgagcaguacaucaaguggccgugguacaucuggcugggcuucaucgccggccugaucgcgaucgugauggugaccaucaugcucugcugcaugaccagcugcugcuccugccugaaggggugcugcagcugcggcuccugcugcaaguucgacgaggacgacagcgagcccguccugaagggggugaagcuccacuacacgugauaauaggcuggagccucgguggccuagcuucuugccccuugggccuccccccagccccuccuccccuuccugcacccguacccccguggucuuugaauaaagucugagugggcggcaaaaaaaaaaaaaaaaaaaaaaaaaaaaaaaaaaaaaaaaaaaaaaaaaaaaaaaaaaaaaaaaaaaaaaaaaaaaaaaaaaaaaaaaaaaaaaaaaaaaucuag

SEQ ID NO: 26492 - RNA, 4100 nt, Artificial Sequence
  SARS-CoV-2/Wuhan/WIV05/2019__EPI_ISL_402128 spike protein mRNA gc (1-1273)(N439K_D614G)
gggaaauaagagagaaaagaagaguaagaagaaauauaagaccccggcgccgccaccauguucguguuccugguccuccugccccuggugagcucccagugcgugaaccucaccacccgcacgcagcugccgcccgccuacaccaacagcuucacccggggcgucuacuaccccgacaagguguuccgcuccagcgugcugcacuccacccaggaccucuuccugcccuucuucagcaacgucacgugguuccacgccauccacguguccgggaccaacggcaccaagcgguucgacaacccggugcugcccuucaacgacggggucuacuucgcgagcaccgagaaguccaacaucauccgcggcuggaucuucgggacgacccucgacagcaagacccagucccugcugaucgugaacaacgccaccaacguggucaucaaggugugcgaguuccaguucugcaacgaccccuuccucggcguguacuaccacaagaacaacaagagcuggauggaguccgaguuccgggucuacagcuccgccaacaacugcacguucgaguacgugagccagcccuuccugauggaccuggagggcaagcaggggaacuucaagaaccuccgcgaguucguguucaagaacaucgacggcuacuucaagaucuacuccaagcacaccccgaucaaccugguccgggaccugccccagggguucagcgcccucgagccccugguggaccugcccaucggcaucaacaucacccgcuuccagacccuccuggcccugcaccgguccuaccucacgccgggggacagcagcuccggcuggaccgcgggcgccgccgccuacuacgugggguaccugcagccccgcaccuuccugcucaaguacaacgagaacggcaccaucacggacgcggucgacugcgcccuggacccccugagcgagaccaagugcacccucaaguccuucaccguggagaaggggaucuaccagacgagcaacuuccgggugcagcccaccgaguccaucguccgcuucccgaacaucaccaaccugugccccuucggcgagguguucaacgccacccgguucgccagcgucuacgccuggaaccgcaagcggaucuccaacugcguggcggacuacagcgugcuguacaacuccgccagcuucuccacguucaagugcuacggcgucagccccaccaagcucaacgaccugugcuucaccaacguguacgccgacuccuucgugauccgcggggacgagguccggcagaucgcccccggccagaccgggaagaucgccgacuacaacuacaagcugccggacgacuucacgggcugcgugaucgcguggaacagcaagaaccucgacuccaaggucgggggcaacuacaacuaccuguaccgccuguuccgcaagagcaaccucaagcccuucgagcgggacaucuccaccgagaucuaccaggccggcagcacccccugcaacgggguggagggcuucaacugcuacuucccccugcaguccuacggguuccagccgaccaacggcgugggguaccagcccuaccggguggucgugcugagcuucgagcuccugcacgcccccgccacggugugcggccccaagaaguccaccaaccuggucaagaacaagugcgugaacuucaacuucaacggccucaccgggaccggcgugcugaccgagagcaacaagaaguuccugccguuccagcaguucgggcgcgacaucgccgacacgaccgacgcgguccgcgacccccagacccuggagauccucgacaucacccccugcagcuucggcgggguguccgugaucacgccgggcaccaacaccagcaaccaggucgccgugcuguaccagggcgugaacugcaccgagguccccguggccauccacgccgaccagcugacgcccaccuggcggguguacuccaccggcagcaacgucuuccagacccgcgccgggugccucaucggcgcggagcacgugaacaacuccuacgagugcgacauccccaucggggccggcaucugcgccagcuaccagacgcagaccaacuccccgcggcgcgcccggagcguggcgucccagagcaucaucgccuacaccaugucccugggcgccgagaacagcgucgccuacuccaacaacagcaucgccauccccaccaacuucacgaucuccgugaccaccgagauccugcccgugagcaugaccaagacgagcgucgacugcaccauguacaucugcggggacuccaccgagugcagcaaccuccugcugcaguacggcuccuucugcacccagcucaaccgcgcgcugacggggaucgccguggagcaggacaagaacacccaggagguguucgcccaggucaagcagaucuacaagacgcccccgaucaaggacuucggcggguucaacuucagccagauccugcccgaccccuccaagcccagcaagcgguccuucaucgaggaccuccuguucaacaaggugacccuggccgacgccggcuucaucaagcaguacggcgacugccucggggacaucgcggcccgcgaccugaucugcgcccagaaguucaacggccugaccgugcucccgccccugcugaccgacgagaugaucgcccaguacaccagcgcccuccuggcggggaccaucacguccggcuggaccuucggggccggcgccgcccugcagauccccuucgcgaugcagauggccuaccgguucaacggcaucggggucacccagaacgugcucuacgagaaccagaagcugaucgccaaccaguucaacagcgccaucggcaagauccaggacucccugagcuccaccgccagcgcgcucgggaagcugcaggacguggucaaccagaacgcccaggcccugaacacgcucgugaagcagcuguccagcaacuucggcgccaucuccagcgugcugaacgacauccucucccgccuggacaaggucgaggccgaggugcagaucgaccggcugaucaccgggcgccuccagagccugcagaccuacgugacccagcagcugauccgggcggccgagauccgcgccagcgccaaccucgccgcgaccaagauguccgagugcguccugggccagagcaagcggguggacuucugcggcaagggguaccaccugauguccuucccccagagcgccccgcacggcguggucuuccuccacgugacguacguccccgcccaggagaagaacuucaccaccgcccccgcgaucugccacgacgggaaggcccacuucccccgcgagggcguguucguguccaacgggacccacugguucgucacgcagcggaacuucuacgagccgcagaucaucaccaccgacaacaccuucgugagcggcaacugcgacguggucaucggcaucgugaacaacacgguguacgacccccugcagcccgagcuggacuccuucaaggaggagcucgacaaguacuucaagaaccacaccagccccgacgucgaccugggggacaucuccggcaucaacgccagcguggugaacauccagaaggagaucgaccgccugaacgaggucgccaagaaccucaacgagucccugaucgaccugcaggagcucgggaaguacgagcaguacaucaaguggccgugguacaucuggcugggcuucaucgccggccugaucgcgaucgugauggugaccaucaugcucugcugcaugaccagcugcugcuccugccugaaggggugcugcagcugcggcuccugcugcaaguucgacgaggacgacagcgagcccguccugaagggggugaagcuccacuacacgugauaauaggcuggagccucgguggccuagcuucuugccccuugggccuccccccagccccuccuccccuuccugcacccguacccccguggucuuugaauaaagucugagugggcggcaaaaaaaaaaaaaaaaaaaaaaaaaaaaaaaaaaaaaaaaaaaaaaaaaaaaaaaaaaaaaaaaaaaaaaaaaaaaaaaaaaaaaaaaaaaaaaaaaaaaucuag

SEQ ID NO: 26493 - RNA, 4100 nt, Artificial Sequence
  SARS-CoV-2/Wuhan/WIV05/2019__EPI_ISL_402128 spike protein mRNA gc (1-1273)(S477N_D614G)
gggaaauaagagagaaaagaagaguaagaagaaauauaagaccccggcgccgccaccauguucguguuccugguccuccugccccuggugagcucccagugcgugaaccucaccacccgcacgcagcugccgcccgccuacaccaacagcuucacccggggcgucuacuaccccgacaagguguuccgcuccagcgugcugcacuccacccaggaccucuuccugcccuucuucagcaacgucacgugguuccacgccauccacguguccgggaccaacggcaccaagcgguucgacaacccggugcugcccuucaacgacggggucuacuucgcgagcaccgagaaguccaacaucauccgcggcuggaucuucgggacgacccucgacagcaagacccagucccugcugaucgugaacaacgccaccaacguggucaucaaggugugcgaguuccaguucugcaacgaccccuuccucggcguguacuaccacaagaacaacaagagcuggauggaguccgaguuccgggucuacagcuccgccaacaacugcacguucgaguacgugagccagcccuuccugauggaccuggagggcaagcaggggaacuucaagaaccuccgcgaguucguguucaagaacaucgacggcuacuucaagaucuacuccaagcacaccccgaucaaccugguccgggaccugccccagggguucagcgcccucgagccccugguggaccugcccaucggcaucaacaucacccgcuuccagacccuccuggcccugcaccgguccuaccucacgccgggggacagcagcuccggcuggaccgcgggcgccgccgccuacuacgugggguaccugcagccccgcaccuuccugcucaaguacaacgagaacggcaccaucacggacgcggucgacugcgcccuggacccccugagcgagaccaagugcacccucaaguccuucaccguggagaaggggaucuaccagacgagcaacuuccgggugcagcccaccgaguccaucguccgcuucccgaacaucaccaaccugugccccuucggcgagguguucaacgccacccgguucgccagcgucuacgccuggaaccgcaagcggaucuccaacugcguggcggacuacagcgugcuguacaacuccgccagcuucuccacguucaagugcuacggcgucagccccaccaagcucaacgaccugugcuucaccaacguguacgccgacuccuucgugauccgcggggacgagguccggcagaucgcccccggccagaccgggaagaucgccgacuacaacuacaagcugccggacgacuucacgggcugcgugaucgcguggaacagcaacaaccucgacuccaaggucgggggcaacuacaacuaccuguaccgccuguuccgcaagagcaaccucaagcccuucgagcgggacaucuccaccgagaucuaccaggccggcaacacccccugcaacgggguggagggcuucaacugcuacuucccccugcaguccuacggguuccagccgaccaacggcgugggguaccagcccuaccggguggucgugcugagcuucgagcuccugcacgcccccgccacggugugcggccccaagaaguccaccaaccuggucaagaacaagugcgugaacuucaacuucaacggccucaccgggaccggcgugcugaccgagagcaacaagaaguuccugccguuccagcaguucgggcgcgacaucgccgacacgaccgacgcgguccgcgacccccagacccuggagauccucgacaucacccccugcagcuucggcgggguguccgugaucacgccgggcaccaacaccagcaaccaggucgccgugcuguaccagggcgugaacugcaccgagguccccguggccauccacgccgaccagcugacgcccaccuggcggguguacuccaccggcagcaacgucuuccagacccgcgccgggugccucaucggcgcggagcacgugaacaacuccuacgagugcgacauccccaucggggccggcaucugcgccagcuaccagacgcagaccaacuccccgcggcgcgcccggagcguggcgucccagagcaucaucgccuacaccaugucccugggcgccgagaacagcgucgccuacuccaacaacagcaucgccauccccaccaacuucacgaucuccgugaccaccgagauccugcccgugagcaugaccaagacgagcgucgacugcaccauguacaucugcggggacuccaccgagugcagcaaccuccugcugcaguacggcuccuucugcacccagcucaaccgcgcgcugacggggaucgccguggagcaggacaagaacacccaggagguguucgcccaggucaagcagaucuacaagacgcccccgaucaaggacuucggcggguucaacuucagccagauccugcccgaccccuccaagcccagcaagcgguccuucaucgaggaccuccuguucaacaaggugacccuggccgacgccggcuucaucaagcaguacggcgacugccucggggacaucgcggcccgcgaccugaucugcgcccagaaguucaacggccugaccgugcucccgccccugcugaccgacgagaugaucgcccaguacaccagcgcccuccuggcggggaccaucacguccggcuggaccuucggggccggcgccgcccugcagauccccuucgcgaugcagauggccuaccgguucaacggcaucggggucacccagaacgugcucuacgagaaccagaagcugaucgccaaccaguucaacagcgccaucggcaagauccaggacucccugagcuccaccgccagcgcgcucgggaagcugcaggacguggucaaccagaacgcccaggcccugaacacgcucgugaagcagcuguccagcaacuucggcgccaucuccagcgugcugaacgacauccucucccgccuggacaaggucgaggccgaggugcagaucgaccggcugaucaccgggcgccuccagagccugcagaccuacgugacccagcagcugauccgggcggccgagauccgcgccagcgccaaccucgccgcgaccaagauguccgagugcguccugggccagagcaagcggguggacuucugcggcaagggguaccaccugauguccuucccccagagcgccccgcacggcguggucuuccuccacgugacguacguccccgcccaggagaagaacuucaccaccgcccccgcgaucugccacgacgggaaggcccacuucccccgcgagggcguguucguguccaacgggacccacugguucgucacgcagcggaacuucuacgagccgcagaucaucaccaccgacaacaccuucgugagcggcaacugcgacguggucaucggcaucgugaacaacacgguguacgacccccugcagcccgagcuggacuccuucaaggaggagcucgacaaguacuucaagaaccacaccagccccgacgucgaccugggggacaucuccggcaucaacgccagcguggugaacauccagaaggagaucgaccgccugaacgaggucgccaagaaccucaacgagucccugaucgaccugcaggagcucgggaaguacgagcaguacaucaaguggccgugguacaucuggcugggcuucaucgccggccugaucgcgaucgugauggugaccaucaugcucugcugcaugaccagcugcugcuccugccugaaggggugcugcagcugcggcuccugcugcaaguucgacgaggacgacagcgagcccguccugaagggggugaagcuccacuacacgugauaauaggcuggagccucgguggccuagcuucuugccccuugggccuccccccagccccuccuccccuuccugcacccguacccccguggucuuugaauaaagucugagugggcggcaaaaaaaaaaaaaaaaaaaaaaaaaaaaaaaaaaaaaaaaaaaaaaaaaaaaaaaaaaaaaaaaaaaaaaaaaaaaaaaaaaaaaaaaaaaaaaaaaaaaucuag

SEQ ID NO: 26494 - RNA, 4100 nt, Artificial Sequence
  SARS-CoV-2/Wuhan/WIV05/2019__EPI_ISL_402128 spike protein mRNA gc (1-1273)(N501Y_D614G)
gggaaauaagagagaaaagaagaguaagaagaaauauaagaccccggcgccgccaccauguucguguuccugguccuccugccccuggugagcucccagugcgugaaccucaccacccgcacgcagcugccgcccgccuacaccaacagcuucacccggggcgucuacuaccccgacaagguguuccgcuccagcgugcugcacuccacccaggaccucuuccugcccuucuucagcaacgucacgugguuccacgccauccacguguccgggaccaacggcaccaagcgguucgacaacccggugcugcccuucaacgacggggucuacuucgcgagcaccgagaaguccaacaucauccgcggcuggaucuucgggacgacccucgacagcaagacccagucccugcugaucgugaacaacgccaccaacguggucaucaaggugugcgaguuccaguucugcaacgaccccuuccucggcguguacuaccacaagaacaacaagagcuggauggaguccgaguuccgggucuacagcuccgccaacaacugcacguucgaguacgugagccagcccuuccugauggaccuggagggcaagcaggggaacuucaagaaccuccgcgaguucguguucaagaacaucgacggcuacuucaagaucuacuccaagcacaccccgaucaaccugguccgggaccugccccagggguucagcgcccucgagccccugguggaccugcccaucggcaucaacaucacccgcuuccagacccuccuggcccugcaccgguccuaccucacgccgggggacagcagcuccggcuggaccgcgggcgccgccgccuacuacgugggguaccugcagccccgcaccuuccugcucaaguacaacgagaacggcaccaucacggacgcggucgacugcgcccuggacccccugagcgagaccaagugcacccucaaguccuucaccguggagaaggggaucuaccagacgagcaacuuccgggugcagcccaccgaguccaucguccgcuucccgaacaucaccaaccugugccccuucggcgagguguucaacgccacccgguucgccagcgucuacgccuggaaccgcaagcggaucuccaacugcguggcggacuacagcgugcuguacaacuccgccagcuucuccacguucaagugcuacggcgucagccccaccaagcucaacgaccugugcuucaccaacguguacgccgacuccuucgugauccgcggggacgagguccggcagaucgcccccggccagaccgggaagaucgccgacuacaacuacaagcugccggacgacuucacgggcugcgugaucgcguggaacagcaacaaccucgacuccaaggucgggggcaacuacaacuaccuguaccgccuguuccgcaagagcaaccucaagcccuucgagcgggacaucuccaccgagaucuaccaggccggcagcacccccugcaacgggguggagggcuucaacugcuacuucccccugcaguccuacggguuccagccgaccuacggcgugggguaccagcccuaccggguggucgugcugagcuucgagcuccugcacgcccccgccacggugugcggccccaagaaguccaccaaccuggucaagaacaagugcgugaacuucaacuucaacggccucaccgggaccggcgugcugaccgagagcaacaagaaguuccugccguuccagcaguucgggcgcgacaucgccgacacgaccgacgcgguccgcgacccccagacccuggagauccucgacaucacccccugcagcuucggcgggguguccgugaucacgccgggcaccaacaccagcaaccaggucgccgugcuguaccagggcgugaacugcaccgagguccccguggccauccacgccgaccagcugacgcccaccuggcggguguacuccaccggcagcaacgucuuccagacccgcgccgggugccucaucggcgcggagcacgugaacaacuccuacgagugcgacauccccaucggggccggcaucugcgccagcuaccagacgcagaccaacuccccgcggcgcgcccggagcguggcgucccagagcaucaucgccuacaccaugucccugggcgccgagaacagcgucgccuacuccaacaacagcaucgccauccccaccaacuucacgaucuccgugaccaccgagauccugcccgugagcaugaccaagacgagcgucgacugcaccauguacaucugcggggacuccaccgagugcagcaaccuccugcugcaguacggcuccuucugcacccagcucaaccgcgcgcugacggggaucgccguggagcaggacaagaacacccaggagguguucgcccaggucaagcagaucuacaagacgcccccgaucaaggacuucggcggguucaacuucagccagauccugcccgaccccuccaagcccagcaagcgguccuucaucgaggaccuccuguucaacaaggugacccuggccgacgccggcuucaucaagcaguacggcgacugccucggggacaucgcggcccgcgaccugaucugcgcccagaaguucaacggccugaccgugcucccgccccugcugaccgacgagaugaucgcccaguacaccagcgcccuccuggcggggaccaucacguccggcuggaccuucggggccggcgccgcccugcagauccccuucgcgaugcagauggccuaccgguucaacggcaucggggucacccagaacgugcucuacgagaaccagaagcugaucgccaaccaguucaacagcgccaucggcaagauccaggacucccugagcuccaccgccagcgcgcucgggaagcugcaggacguggucaaccagaacgcccaggcccugaacacgcucgugaagcagcuguccagcaacuucggcgccaucuccagcgugcugaacgacauccucucccgccuggacaaggucgaggccgaggugcagaucgaccggcugaucaccgggcgccuccagagccugcagaccuacgugacccagcagcugauccgggcggccgagauccgcgccagcgccaaccucgccgcgaccaagauguccgagugcguccugggccagagcaagcggguggacuucugcggcaagggguaccaccugauguccuucccccagagcgccccgcacggcguggucuuccuccacgugacguacguccccgcccaggagaagaacuucaccaccgcccccgcgaucugccacgacgggaaggcccacuucccccgcgagggcguguucguguccaacgggacccacugguucgucacgcagcggaacuucuacgagccgcagaucaucaccaccgacaacaccuucgugagcggcaacugcgacguggucaucggcaucgugaacaacacgguguacgacccccugcagcccgagcuggacuccuucaaggaggagcucgacaaguacuucaagaaccacaccagccccgacgucgaccugggggacaucuccggcaucaacgccagcguggugaacauccagaaggagaucgaccgccugaacgaggucgccaagaaccucaacgagucccugaucgaccugcaggagcucgggaaguacgagcaguacaucaaguggccgugguacaucuggcugggcuucaucgccggccugaucgcgaucgugauggugaccaucaugcucugcugcaugaccagcugcugcuccugccugaaggggugcugcagcugcggcuccugcugcaaguucgacgaggacgacagcgagcccguccugaagggggugaagcuccacuacacgugauaauaggcuggagccucgguggccuagcuucuugccccuugggccuccccccagccccuccuccccuuccugcacccguacccccguggucuuugaauaaagucugagugggcggcaaaaaaaaaaaaaaaaaaaaaaaaaaaaaaaaaaaaaaaaaaaaaaaaaaaaaaaaaaaaaaaaaaaaaaaaaaaaaaaaaaaaaaaaaaaaaaaaaaaaucuag

SEQ ID NO: 26495 - RNA, 4094 nt, Artificial Sequence
  SARS-CoV-2/Wuhan/WIV05/2019__EPI_ISL_402128 spike protein mRNA gc (1-1273)(H69del_V70del_D614G)
gggaaauaagagagaaaagaagaguaagaagaaauauaagaccccggcgccgccaccauguucguguuccugguccuccugccccuggugagcucccagugcgugaaccucaccacccgcacgcagcugccgcccgccuacaccaacagcuucacccggggcgucuacuaccccgacaagguguuccgcuccagcgugcugcacuccacccaggaccucuuccugcccuucuucagcaacgucacgugguuccacgccaucuccgggaccaacggcaccaagcgguucgacaacccggugcugcccuucaacgacggggucuacuucgcgagcaccgagaaguccaacaucauccgcggcuggaucuucgggacgacccucgacagcaagacccagucccugcugaucgugaacaacgccaccaacguggucaucaaggugugcgaguuccaguucugcaacgaccccuuccucggcguguacuaccacaagaacaacaagagcuggauggaguccgaguuccgggucuacagcuccgccaacaacugcacguucgaguacgugagccagcccuuccugauggaccuggagggcaagcaggggaacuucaagaaccuccgcgaguucguguucaagaacaucgacggcuacuucaagaucuacuccaagcacaccccgaucaaccugguccgggaccugccccagggguucagcgcccucgagccccugguggaccugcccaucggcaucaacaucacccgcuuccagacccuccuggcccugcaccgguccuaccucacgccgggggacagcagcuccggcuggaccgcgggcgccgccgccuacuacgugggguaccugcagccccgcaccuuccugcucaaguacaacgagaacggcaccaucacggacgcggucgacugcgcccuggacccccugagcgagaccaagugcacccucaaguccuucaccguggagaaggggaucuaccagacgagcaacuuccgggugcagcccaccgaguccaucguccgcuucccgaacaucaccaaccugugccccuucggcgagguguucaacgccacccgguucgccagcgucuacgccuggaaccgcaagcggaucuccaacugcguggcggacuacagcgugcuguacaacuccgccagcuucuccacguucaagugcuacggcgucagccccaccaagcucaacgaccugugcuucaccaacguguacgccgacuccuucgugauccgcggggacgagguccggcagaucgcccccggccagaccgggaagaucgccgacuacaacuacaagcugccggacgacuucacgggcugcgugaucgcguggaacagcaacaaccucgacuccaaggucgggggcaacuacaacuaccuguaccgccuguuccgcaagagcaaccucaagcccuucgagcgggacaucuccaccgagaucuaccaggccggcagcacccccugcaacgggguggagggcuucaacugcuacuucccccugcaguccuacggguuccagccgaccaacggcgugggguaccagcccuaccggguggucgugcugagcuucgagcuccugcacgcccccgccacggugugcggccccaagaaguccaccaaccuggucaagaacaagugcgugaacuucaacuucaacggccucaccgggaccggcgugcugaccgagagcaacaagaaguuccugccguuccagcaguucgggcgcgacaucgccgacacgaccgacgcgguccgcgacccccagacccuggagauccucgacaucacccccugcagcuucggcgggguguccgugaucacgccgggcaccaacaccagcaaccaggucgccgugcuguaccagggcgugaacugcaccgagguccccguggccauccacgccgaccagcugacgcccaccuggcggguguacuccaccggcagcaacgucuuccagacccgcgccgggugccucaucggcgcggagcacgugaacaacuccuacgagugcgacauccccaucggggccggcaucugcgccagcuaccagacgcagaccaacuccccgcggcgcgcccggagcguggcgucccagagcaucaucgccuacaccaugucccugggcgccgagaacagcgucgccuacuccaacaacagcaucgccauccccaccaacuucacgaucuccgugaccaccgagauccugcccgugagcaugaccaagacgagcgucgacugcaccauguacaucugcggggacuccaccgagugcagcaaccuccugcugcaguacggcuccuucugcacccagcucaaccgcgcgcugacggggaucgccguggagcaggacaagaacacccaggagguguucgcccaggucaagcagaucuacaagacgcccccgaucaaggacuucggcggguucaacuucagccagauccugcccgaccccuccaagcccagcaagcgguccuucaucgaggaccuccuguucaacaaggugacccuggccgacgccggcuucaucaagcaguacggcgacugccucggggacaucgcggcccgcgaccugaucugcgcccagaaguucaacggccugaccgugcucccgccccugcugaccgacgagaugaucgcccaguacaccagcgcccuccuggcggggaccaucacguccggcuggaccuucggggccggcgccgcccugcagauccccuucgcgaugcagauggccuaccgguucaacggcaucggggucacccagaacgugcucuacgagaaccagaagcugaucgccaaccaguucaacagcgccaucggcaagauccaggacucccugagcuccaccgccagcgcgcucgggaagcugcaggacguggucaaccagaacgcccaggcccugaacacgcucgugaagcagcuguccagcaacuucggcgccaucuccagcgugcugaacgacauccucucccgccuggacaaggucgaggccgaggugcagaucgaccggcugaucaccgggcgccuccagagccugcagaccuacgugacccagcagcugauccgggcggccgagauccgcgccagcgccaaccucgccgcgaccaagauguccgagugcguccugggccagagcaagcggguggacuucugcggcaagggguaccaccugauguccuucccccagagcgccccgcacggcguggucuuccuccacgugacguacguccccgcccaggagaagaacuucaccaccgcccccgcgaucugccacgacgggaaggcccacuucccccgcgagggcguguucguguccaacgggacccacugguucgucacgcagcggaacuucuacgagccgcagaucaucaccaccgacaacaccuucgugagcggcaacugcgacguggucaucggcaucgugaacaacacgguguacgacccccugcagcccgagcuggacuccuucaaggaggagcucgacaaguacuucaagaaccacaccagccccgacgucgaccugggggacaucuccggcaucaacgccagcguggugaacauccagaaggagaucgaccgccugaacgaggucgccaagaaccucaacgagucccugaucgaccugcaggagcucgggaaguacgagcaguacaucaaguggccgugguacaucuggcugggcuucaucgccggccugaucgcgaucgugauggugaccaucaugcucugcugcaugaccagcugcugcuccugccugaaggggugcugcagcugcggcuccugcugcaaguucgacgaggacgacagcgagcccguccugaagggggugaagcuccacuacacgugauaauaggcuggagccucgguggccuagcuucuugccccuugggccuccccccagccccuccuccccuuccugcacccguacccccguggucuuugaauaaagucugagugggcggcaaaaaaaaaaaaaaaaaaaaaaaaaaaaaaaaaaaaaaaaaaaaaaaaaaaaaaaaaaaaaaaaaaaaaaaaaaaaaaaaaaaaaaaaaaaaaaaaaaaaucuag

SEQ ID NO: 26496 - RNA, 4100 nt, Artificial Sequence
  SARS-CoV-2/Wuhan/WIV05/2019__EPI_ISL_402128 spike protein mRNA gc (1-1273)(Y453F_D614G)
gggaaauaagagagaaaagaagaguaagaagaaauauaagaccccggcgccgccaccauguucguguuccugguccuccugccccuggugagcucccagugcgugaaccucaccacccgcacgcagcugccgcccgccuacaccaacagcuucacccggggcgucuacuaccccgacaagguguuccgcuccagcgugcugcacuccacccaggaccucuuccugcccuucuucagcaacgucacgugguuccacgccauccacguguccgggaccaacggcaccaagcgguucgacaacccggugcugcccuucaacgacggggucuacuucgcgagcaccgagaaguccaacaucauccgcggcuggaucuucgggacgacccucgacagcaagacccagucccugcugaucgugaacaacgccaccaacguggucaucaaggugugcgaguuccaguucugcaacgaccccuuccucggcguguacuaccacaagaacaacaagagcuggauggaguccgaguuccgggucuacagcuccgccaacaacugcacguucgaguacgugagccagcccuuccugauggaccuggagggcaagcaggggaacuucaagaaccuccgcgaguucguguucaagaacaucgacggcuacuucaagaucuacuccaagcacaccccgaucaaccugguccgggaccugccccagggguucagcgcccucgagccccugguggaccugcccaucggcaucaacaucacccgcuuccagacccuccuggcccugcaccgguccuaccucacgccgggggacagcagcuccggcuggaccgcgggcgccgccgccuacuacgugggguaccugcagccccgcaccuuccugcucaaguacaacgagaacggcaccaucacggacgcggucgacugcgcccuggacccccugagcgagaccaagugcacccucaaguccuucaccguggagaaggggaucuaccagacgagcaacuuccgggugcagcccaccgaguccaucguccgcuucccgaacaucaccaaccugugccccuucggcgagguguucaacgccacccgguucgccagcgucuacgccuggaaccgcaagcggaucuccaacugcguggcggacuacagcgugcuguacaacuccgccagcuucuccacguucaagugcuacggcgucagccccaccaagcucaacgaccugugcuucaccaacguguacgccgacuccuucgugauccgcggggacgagguccggcagaucgcccccggccagaccgggaagaucgccgacuacaacuacaagcugccggacgacuucacgggcugcgugaucgcguggaacagcaacaaccucgacuccaaggucgggggcaacuacaacuaccuguuccgccuguuccgcaagagcaaccucaagcccuucgagcgggacaucuccaccgagaucuaccaggccggcagcacccccugcaacgggguggagggcuucaacugcuacuucccccugcaguccuacggguuccagccgaccaacggcgugggguaccagcccuaccggguggucgugcugagcuucgagcuccugcacgcccccgccacggugugcggccccaagaaguccaccaaccuggucaagaacaagugcgugaacuucaacuucaacggccucaccgggaccggcgugcugaccgagagcaacaagaaguuccugccguuccagcaguucgggcgcgacaucgccgacacgaccgacgcgguccgcgacccccagacccuggagauccucgacaucacccccugcagcuucggcgggguguccgugaucacgccgggcaccaacaccagcaaccaggucgccgugcuguaccagggcgugaacugcaccgagguccccguggccauccacgccgaccagcugacgcccaccuggcggguguacuccaccggcagcaacgucuuccagacccgcgccgggugccucaucggcgcggagcacgugaacaacuccuacgagugcgacauccccaucggggccggcaucugcgccagcuaccagacgcagaccaacuccccgcggcgcgcccggagcguggcgucccagagcaucaucgccuacaccaugucccugggcgccgagaacagcgucgccuacuccaacaacagcaucgccauccccaccaacuucacgaucuccgugaccaccgagauccugcccgugagcaugaccaagacgagcgucgacugcaccauguacaucugcggggacuccaccgagugcagcaaccuccugcugcaguacggcuccuucugcacccagcucaaccgcgcgcugacggggaucgccguggagcaggacaagaacacccaggagguguucgcccaggucaagcagaucuacaagacgcccccgaucaaggacuucggcggguucaacuucagccagauccugcccgaccccuccaagcccagcaagcgguccuucaucgaggaccuccuguucaacaaggugacccuggccgacgccggcuucaucaagcaguacggcgacugccucggggacaucgcggcccgcgaccugaucugcgcccagaaguucaacggccugaccgugcucccgccccugcugaccgacgagaugaucgcccaguacaccagcgcccuccuggcggggaccaucacguccggcuggaccuucggggccggcgccgcccugcagauccccuucgcgaugcagauggccuaccgguucaacggcaucggggucacccagaacgugcucuacgagaaccagaagcugaucgccaaccaguucaacagcgccaucggcaagauccaggacucccugagcuccaccgccagcgcgcucgggaagcugcaggacguggucaaccagaacgcccaggcccugaacacgcucgugaagcagcuguccagcaacuucggcgccaucuccagcgugcugaacgacauccucucccgccuggacaaggucgaggccgaggugcagaucgaccggcugaucaccgggcgccuccagagccugcagaccuacgugacccagcagcugauccgggcggccgagauccgcgccagcgccaaccucgccgcgaccaagauguccgagugcguccugggccagagcaagcggguggacuucugcggcaagggguaccaccugauguccuucccccagagcgccccgcacggcguggucuuccuccacgugacguacguccccgcccaggagaagaacuucaccaccgcccccgcgaucugccacgacgggaaggcccacuucccccgcgagggcguguucguguccaacgggacccacugguucgucacgcagcggaacuucuacgagccgcagaucaucaccaccgacaacaccuucgugagcggcaacugcgacguggucaucggcaucgugaacaacacgguguacgacccccugcagcccgagcuggacuccuucaaggaggagcucgacaaguacuucaagaaccacaccagccccgacgucgaccugggggacaucuccggcaucaacgccagcguggugaacauccagaaggagaucgaccgccugaacgaggucgccaagaaccucaacgagucccugaucgaccugcaggagcucgggaaguacgagcaguacaucaaguggccgugguacaucuggcugggcuucaucgccggccugaucgcgaucgugauggugaccaucaugcucugcugcaugaccagcugcugcuccugccugaaggggugcugcagcugcggcuccugcugcaaguucgacgaggacgacagcgagcccguccugaagggggugaagcuccacuacacgugauaauaggcuggagccucgguggccuagcuucuugccccuugggccuccccccagccccuccuccccuuccugcacccguacccccguggucuuugaauaaagucugagugggcggcaaaaaaaaaaaaaaaaaaaaaaaaaaaaaaaaaaaaaaaaaaaaaaaaaaaaaaaaaaaaaaaaaaaaaaaaaaaaaaaaaaaaaaaaaaaaaaaaaaaaucuag

SEQ ID NO: 26497 - RNA, 4100 nt, Artificial Sequence
  SARS-CoV-2/Wuhan/WIV05/2019__EPI_ISL_402128 spike protein mRNA gc (1-1273)(D614G_I692V)
gggaaauaagagagaaaagaagaguaagaagaaauauaagaccccggcgccgccaccauguucguguuccugguccuccugccccuggugagcucccagugcgugaaccucaccacccgcacgcagcugccgcccgccuacaccaacagcuucacccggggcgucuacuaccccgacaagguguuccgcuccagcgugcugcacuccacccaggaccucuuccugcccuucuucagcaacgucacgugguuccacgccauccacguguccgggaccaacggcaccaagcgguucgacaacccggugcugcccuucaacgacggggucuacuucgcgagcaccgagaaguccaacaucauccgcggcuggaucuucgggacgacccucgacagcaagacccagucccugcugaucgugaacaacgccaccaacguggucaucaaggugugcgaguuccaguucugcaacgaccccuuccucggcguguacuaccacaagaacaacaagagcuggauggaguccgaguuccgggucuacagcuccgccaacaacugcacguucgaguacgugagccagcccuuccugauggaccuggagggcaagcaggggaacuucaagaaccuccgcgaguucguguucaagaacaucgacggcuacuucaagaucuacuccaagcacaccccgaucaaccugguccgggaccugccccagggguucagcgcccucgagccccugguggaccugcccaucggcaucaacaucacccgcuuccagacccuccuggcccugcaccgguccuaccucacgccgggggacagcagcuccggcuggaccgcgggcgccgccgccuacuacgugggguaccugcagccccgcaccuuccugcucaaguacaacgagaacggcaccaucacggacgcggucgacugcgcccuggacccccugagcgagaccaagugcacccucaaguccuucaccguggagaaggggaucuaccagacgagcaacuuccgggugcagcccaccgaguccaucguccgcuucccgaacaucaccaaccugugccccuucggcgagguguucaacgccacccgguucgccagcgucuacgccuggaaccgcaagcggaucuccaacugcguggcggacuacagcgugcuguacaacuccgccagcuucuccacguucaagugcuacggcgucagccccaccaagcucaacgaccugugcuucaccaacguguacgccgacuccuucgugauccgcggggacgagguccggcagaucgcccccggccagaccgggaagaucgccgacuacaacuacaagcugccggacgacuucacgggcugcgugaucgcguggaacagcaacaaccucgacuccaaggucgggggcaacuacaacuaccuguaccgccuguuccgcaagagcaaccucaagcccuucgagcgggacaucuccaccgagaucuaccaggccggcagcacccccugcaacgggguggagggcuucaacugcuacuucccccugcaguccuacggguuccagccgaccaacggcgugggguaccagcccuaccggguggucgugcugagcuucgagcuccugcacgcccccgccacggugugcggccccaagaaguccaccaaccuggucaagaacaagugcgugaacuucaacuucaacggccucaccgggaccggcgugcugaccgagagcaacaagaaguuccugccguuccagcaguucgggcgcgacaucgccgacacgaccgacgcgguccgcgacccccagacccuggagauccucgacaucacccccugcagcuucggcgggguguccgugaucacgccgggcaccaacaccagcaaccaggucgccgugcuguaccagggcgugaacugcaccgagguccccguggccauccacgccgaccagcugacgcccaccuggcggguguacuccaccggcagcaacgucuuccagacccgcgccgggugccucaucggcgcggagcacgugaacaacuccuacgagugcgacauccccaucggggccggcaucugcgccagcuaccagacgcagaccaacuccccgcggcgcgcccggagcguggcgucccagagcgucaucgccuacaccaugucccugggcgccgagaacagcgucgccuacuccaacaacagcaucgccauccccaccaacuucacgaucuccgugaccaccgagauccugcccgugagcaugaccaagacgagcgucgacugcaccauguacaucugcggggacuccaccgagugcagcaaccuccugcugcaguacggcuccuucugcacccagcucaaccgcgcgcugacggggaucgccguggagcaggacaagaacacccaggagguguucgcccaggucaagcagaucuacaagacgcccccgaucaaggacuucggcggguucaacuucagccagauccugcccgaccccuccaagcccagcaagcgguccuucaucgaggaccuccuguucaacaaggugacccuggccgacgccggcuucaucaagcaguacggcgacugccucggggacaucgcggcccgcgaccugaucugcgcccagaaguucaacggccugaccgugcucccgccccugcugaccgacgagaugaucgcccaguacaccagcgcccuccuggcggggaccaucacguccggcuggaccuucggggccggcgccgcccugcagauccccuucgcgaugcagauggccuaccgguucaacggcaucggggucacccagaacgugcucuacgagaaccagaagcugaucgccaaccaguucaacagcgccaucggcaagauccaggacucccugagcuccaccgccagcgcgcucgggaagcugcaggacguggucaaccagaacgcccaggcccugaacacgcucgugaagcagcuguccagcaacuucggcgccaucuccagcgugcugaacgacauccucucccgccuggacaaggucgaggccgaggugcagaucgaccggcugaucaccgggcgccuccagagccugcagaccuacgugacccagcagcugauccgggcggccgagauccgcgccagcgccaaccucgccgcgaccaagauguccgagugcguccugggccagagcaagcggguggacuucugcggcaagggguaccaccugauguccuucccccagagcgccccgcacggcguggucuuccuccacgugacguacguccccgcccaggagaagaacuucaccaccgcccccgcgaucugccacgacgggaaggcccacuucccccgcgagggcguguucguguccaacgggacccacugguucgucacgcagcggaacuucuacgagccgcagaucaucaccaccgacaacaccuucgugagcggcaacugcgacguggucaucggcaucgugaacaacacgguguacgacccccugcagcccgagcuggacuccuucaaggaggagcucgacaaguacuucaagaaccacaccagccccgacgucgaccugggggacaucuccggcaucaacgccagcguggugaacauccagaaggagaucgaccgccugaacgaggucgccaagaaccucaacgagucccugaucgaccugcaggagcucgggaaguacgagcaguacaucaaguggccgugguacaucuggcugggcuucaucgccggccugaucgcgaucgugauggugaccaucaugcucugcugcaugaccagcugcugcuccugccugaaggggugcugcagcugcggcuccugcugcaaguucgacgaggacgacagcgagcccguccugaagggggugaagcuccacuacacgugauaauaggcuggagccucgguggccuagcuucuugccccuugggccuccccccagccccuccuccccuuccugcacccguacccccguggucuuugaauaaagucugagugggcggcaaaaaaaaaaaaaaaaaaaaaaaaaaaaaaaaaaaaaaaaaaaaaaaaaaaaaaaaaaaaaaaaaaaaaaaaaaaaaaaaaaaaaaaaaaaaaaaaaaaaucuag

SEQ ID NO: 26498 - RNA, 4100 nt, Artificial Sequence
  SARS-CoV-2/Wuhan/WIV05/2019__EPI_ISL_402128 spike protein mRNA gc (1-1273)(D614G_M1229I)
gggaaauaagagagaaaagaagaguaagaagaaauauaagaccccggcgccgccaccauguucguguuccugguccuccugccccuggugagcucccagugcgugaaccucaccacccgcacgcagcugccgcccgccuacaccaacagcuucacccggggcgucuacuaccccgacaagguguuccgcuccagcgugcugcacuccacccaggaccucuuccugcccuucuucagcaacgucacgugguuccacgccauccacguguccgggaccaacggcaccaagcgguucgacaacccggugcugcccuucaacgacggggucuacuucgcgagcaccgagaaguccaacaucauccgcggcuggaucuucgggacgacccucgacagcaagacccagucccugcugaucgugaacaacgccaccaacguggucaucaaggugugcgaguuccaguucugcaacgaccccuuccucggcguguacuaccacaagaacaacaagagcuggauggaguccgaguuccgggucuacagcuccgccaacaacugcacguucgaguacgugagccagcccuuccugauggaccuggagggcaagcaggggaacuucaagaaccuccgcgaguucguguucaagaacaucgacggcuacuucaagaucuacuccaagcacaccccgaucaaccugguccgggaccugccccagggguucagcgcccucgagccccugguggaccugcccaucggcaucaacaucacccgcuuccagacccuccuggcccugcaccgguccuaccucacgccgggggacagcagcuccggcuggaccgcgggcgccgccgccuacuacgugggguaccugcagccccgcaccuuccugcucaaguacaacgagaacggcaccaucacggacgcggucgacugcgcccuggacccccugagcgagaccaagugcacccucaaguccuucaccguggagaaggggaucuaccagacgagcaacuuccgggugcagcccaccgaguccaucguccgcuucccgaacaucaccaaccugugccccuucggcgagguguucaacgccacccgguucgccagcgucuacgccuggaaccgcaagcggaucuccaacugcguggcggacuacagcgugcuguacaacuccgccagcuucuccacguucaagugcuacggcgucagccccaccaagcucaacgaccugugcuucaccaacguguacgccgacuccuucgugauccgcggggacgagguccggcagaucgcccccggccagaccgggaagaucgccgacuacaacuacaagcugccggacgacuucacgggcugcgugaucgcguggaacagcaacaaccucgacuccaaggucgggggcaacuacaacuaccuguaccgccuguuccgcaagagcaaccucaagcccuucgagcgggacaucuccaccgagaucuaccaggccggcagcacccccugcaacgggguggagggcuucaacugcuacuucccccugcaguccuacggguuccagccgaccaacggcgugggguaccagcccuaccggguggucgugcugagcuucgagcuccugcacgcccccgccacggugugcggccccaagaaguccaccaaccuggucaagaacaagugcgugaacuucaacuucaacggccucaccgggaccggcgugcugaccgagagcaacaagaaguuccugccguuccagcaguucgggcgcgacaucgccgacacgaccgacgcgguccgcgacccccagacccuggagauccucgacaucacccccugcagcuucggcgggguguccgugaucacgccgggcaccaacaccagcaaccaggucgccgugcuguaccagggcgugaacugcaccgagguccccguggccauccacgccgaccagcugacgcccaccuggcggguguacuccaccggcagcaacgucuuccagacccgcgccgggugccucaucggcgcggagcacgugaacaacuccuacgagugcgacauccccaucggggccggcaucugcgccagcuaccagacgcagaccaacuccccgcggcgcgcccggagcguggcgucccagagcaucaucgccuacaccaugucccugggcgccgagaacagcgucgccuacuccaacaacagcaucgccauccccaccaacuucacgaucuccgugaccaccgagauccugcccgugagcaugaccaagacgagcgucgacugcaccauguacaucugcggggacuccaccgagugcagcaaccuccugcugcaguacggcuccuucugcacccagcucaaccgcgcgcugacggggaucgccguggagcaggacaagaacacccaggagguguucgcccaggucaagcagaucuacaagacgcccccgaucaaggacuucggcggguucaacuucagccagauccugcccgaccccuccaagcccagcaagcgguccuucaucgaggaccuccuguucaacaaggugacccuggccgacgccggcuucaucaagcaguacggcgacugccucggggacaucgcggcccgcgaccugaucugcgcccagaaguucaacggccugaccgugcucccgccccugcugaccgacgagaugaucgcccaguacaccagcgcccuccuggcggggaccaucacguccggcuggaccuucggggccggcgccgcccugcagauccccuucgcgaugcagauggccuaccgguucaacggcaucggggucacccagaacgugcucuacgagaaccagaagcugaucgccaaccaguucaacagcgccaucggcaagauccaggacucccugagcuccaccgccagcgcgcucgggaagcugcaggacguggucaaccagaacgcccaggcccugaacacgcucgugaagcagcuguccagcaacuucggcgccaucuccagcgugcugaacgacauccucucccgccuggacaaggucgaggccgaggugcagaucgaccggcugaucaccgggcgccuccagagccugcagaccuacgugacccagcagcugauccgggcggccgagauccgcgccagcgccaaccucgccgcgaccaagauguccgagugcguccugggccagagcaagcggguggacuucugcggcaagggguaccaccugauguccuucccccagagcgccccgcacggcguggucuuccuccacgugacguacguccccgcccaggagaagaacuucaccaccgcccccgcgaucugccacgacgggaaggcccacuucccccgcgagggcguguucguguccaacgggacccacugguucgucacgcagcggaacuucuacgagccgcagaucaucaccaccgacaacaccuucgugagcggcaacugcgacguggucaucggcaucgugaacaacacgguguacgacccccugcagcccgagcuggacuccuucaaggaggagcucgacaaguacuucaagaaccacaccagccccgacgucgaccugggggacaucuccggcaucaacgccagcguggugaacauccagaaggagaucgaccgccugaacgaggucgccaagaaccucaacgagucccugaucgaccugcaggagcucgggaaguacgagcaguacaucaaguggccgugguacaucuggcugggcuucaucgccggccugaucgcgaucgugaucgugaccaucaugcucugcugcaugaccagcugcugcuccugccugaaggggugcugcagcugcggcuccugcugcaaguucgacgaggacgacagcgagcccguccugaagggggugaagcuccacuacacgugauaauaggcuggagccucgguggccuagcuucuugccccuugggccuccccccagccccuccuccccuuccugcacccguacccccguggucuuugaauaaagucugagugggcggcaaaaaaaaaaaaaaaaaaaaaaaaaaaaaaaaaaaaaaaaaaaaaaaaaaaaaaaaaaaaaaaaaaaaaaaaaaaaaaaaaaaaaaaaaaaaaaaaaaaaucuag

SEQ ID NO: 26499 - RNA, 4094 nt, Artificial Sequence
  SARS-CoV-2/Wuhan/WIV05/2019__EPI_ISL_402128 spike protein mRNA gc (1-1273)(H69del_V70del_A222V_Y453F_S477N_D614G_I692V)
gggaaauaagagagaaaagaagaguaagaagaaauauaagaccccggcgccgccaccauguucguguuccugguccuccugccccuggugagcucccagugcgugaaccucaccacccgcacgcagcugccgcccgccuacaccaacagcuucacccggggcgucuacuaccccgacaagguguuccgcuccagcgugcugcacuccacccaggaccucuuccugcccuucuucagcaacgucacgugguuccacgccaucuccgggaccaacggcaccaagcgguucgacaacccggugcugcccuucaacgacggggucuacuucgcgagcaccgagaaguccaacaucauccgcggcuggaucuucgggacgacccucgacagcaagacccagucccugcugaucgugaacaacgccaccaacguggucaucaaggugugcgaguuccaguucugcaacgaccccuuccucggcguguacuaccacaagaacaacaagagcuggauggaguccgaguuccgggucuacagcuccgccaacaacugcacguucgaguacgugagccagcccuuccugauggaccuggagggcaagcaggggaacuucaagaaccuccgcgaguucguguucaagaacaucgacggcuacuucaagaucuacuccaagcacaccccgaucaaccugguccgggaccugccccagggguucagcguccucgagccccugguggaccugcccaucggcaucaacaucacccgcuuccagacccuccuggcccugcaccgguccuaccucacgccgggggacagcagcuccggcuggaccgcgggcgccgccgccuacuacgugggguaccugcagccccgcaccuuccugcucaaguacaacgagaacggcaccaucacggacgcggucgacugcgcccuggacccccugagcgagaccaagugcacccucaaguccuucaccguggagaaggggaucuaccagacgagcaacuuccgggugcagcccaccgaguccaucguccgcuucccgaacaucaccaaccugugccccuucggcgagguguucaacgccacccgguucgccagcgucuacgccuggaaccgcaagcggaucuccaacugcguggcggacuacagcgugcuguacaacuccgccagcuucuccacguucaagugcuacggcgucagccccaccaagcucaacgaccugugcuucaccaacguguacgccgacuccuucgugauccgcggggacgagguccggcagaucgcccccggccagaccgggaagaucgccgacuacaacuacaagcugccggacgacuucacgggcugcgugaucgcguggaacagcaacaaccucgacuccaaggucgggggcaacuacaacuaccuguuccgccuguuccgcaagagcaaccucaagcccuucgagcgggacaucuccaccgagaucuaccaggccggcaacacccccugcaacgggguggagggcuucaacugcuacuucccccugcaguccuacggguuccagccgaccaacggcgugggguaccagcccuaccggguggucgugcugagcuucgagcuccugcacgcccccgccacggugugcggccccaagaaguccaccaaccuggucaagaacaagugcgugaacuucaacuucaacggccucaccgggaccggcgugcugaccgagagcaacaagaaguuccugccguuccagcaguucgggcgcgacaucgccgacacgaccgacgcgguccgcgacccccagacccuggagauccucgacaucacccccugcagcuucggcgggguguccgugaucacgccgggcaccaacaccagcaaccaggucgccgugcuguaccagggcgugaacugcaccgagguccccguggccauccacgccgaccagcugacgcccaccuggcggguguacuccaccggcagcaacgucuuccagacccgcgccgggugccucaucggcgcggagcacgugaacaacuccuacgagugcgacauccccaucggggccggcaucugcgccagcuaccagacgcagaccaacuccccgcggcgcgcccggagcguggcgucccagagcgucaucgccuacaccaugucccugggcgccgagaacagcgucgccuacuccaacaacagcaucgccauccccaccaacuucacgaucuccgugaccaccgagauccugcccgugagcaugaccaagacgagcgucgacugcaccauguacaucugcggggacuccaccgagugcagcaaccuccugcugcaguacggcuccuucugcacccagcucaaccgcgcgcugacggggaucgccguggagcaggacaagaacacccaggagguguucgcccaggucaagcagaucuacaagacgcccccgaucaaggacuucggcggguucaacuucagccagauccugcccgaccccuccaagcccagcaagcgguccuucaucgaggaccuccuguucaacaaggugacccuggccgacgccggcuucaucaagcaguacggcgacugccucggggacaucgcggcccgcgaccugaucugcgcccagaaguucaacggccugaccgugcucccgccccugcugaccgacgagaugaucgcccaguacaccagcgcccuccuggcggggaccaucacguccggcuggaccuucggggccggcgccgcccugcagauccccuucgcgaugcagauggccuaccgguucaacggcaucggggucacccagaacgugcucuacgagaaccagaagcugaucgccaaccaguucaacagcgccaucggcaagauccaggacucccugagcuccaccgccagcgcgcucgggaagcugcaggacguggucaaccagaacgcccaggcccugaacacgcucgugaagcagcuguccagcaacuucggcgccaucuccagcgugcugaacgacauccucucccgccuggacaaggucgaggccgaggugcagaucgaccggcugaucaccgggcgccuccagagccugcagaccuacgugacccagcagcugauccgggcggccgagauccgcgccagcgccaaccucgccgcgaccaagauguccgagugcguccugggccagagcaagcggguggacuucugcggcaagggguaccaccugauguccuucccccagagcgccccgcacggcguggucuuccuccacgugacguacguccccgcccaggagaagaacuucaccaccgcccccgcgaucugccacgacgggaaggcccacuucccccgcgagggcguguucguguccaacgggacccacugguucgucacgcagcggaacuucuacgagccgcagaucaucaccaccgacaacaccuucgugagcggcaacugcgacguggucaucggcaucgugaacaacacgguguacgacccccugcagcccgagcuggacuccuucaaggaggagcucgacaaguacuucaagaaccacaccagccccgacgucgaccugggggacaucuccggcaucaacgccagcguggugaacauccagaaggagaucgaccgccugaacgaggucgccaagaaccucaacgagucccugaucgaccugcaggagcucgggaaguacgagcaguacaucaaguggccgugguacaucuggcugggcuucaucgccggccugaucgcgaucgugauggugaccaucaugcucugcugcaugaccagcugcugcuccugccugaaggggugcugcagcugcggcuccugcugcaaguucgacgaggacgacagcgagcccguccugaagggggugaagcuccacuacacgugauaauaggcuggagccucgguggccuagcuucuugccccuugggccuccccccagccccuccuccccuuccugcacccguacccccguggucuuugaauaaagucugagugggcggcaaaaaaaaaaaaaaaaaaaaaaaaaaaaaaaaaaaaaaaaaaaaaaaaaaaaaaaaaaaaaaaaaaaaaaaaaaaaaaaaaaaaaaaaaaaaaaaaaaaaucuag

SEQ ID NO: 26500 - RNA, 4094 nt, Artificial Sequence
  SARS-CoV-2/Wuhan/WIV05/2019__EPI_ISL_402128 spike protein mRNA gc (1-1273)(H69del_V70del_Y453F_D614G_I692V_M1229I)
gggaaauaagagagaaaagaagaguaagaagaaauauaagaccccggcgccgccaccauguucguguuccugguccuccugccccuggugagcucccagugcgugaaccucaccacccgcacgcagcugccgcccgccuacaccaacagcuucacccggggcgucuacuaccccgacaagguguuccgcuccagcgugcugcacuccacccaggaccucuuccugcccuucuucagcaacgucacgugguuccacgccaucuccgggaccaacggcaccaagcgguucgacaacccggugcugcccuucaacgacggggucuacuucgcgagcaccgagaaguccaacaucauccgcggcuggaucuucgggacgacccucgacagcaagacccagucccugcugaucgugaacaacgccaccaacguggucaucaaggugugcgaguuccaguucugcaacgaccccuuccucggcguguacuaccacaagaacaacaagagcuggauggaguccgaguuccgggucuacagcuccgccaacaacugcacguucgaguacgugagccagcccuuccugauggaccuggagggcaagcaggggaacuucaagaaccuccgcgaguucguguucaagaacaucgacggcuacuucaagaucuacuccaagcacaccccgaucaaccugguccgggaccugccccagggguucagcgcccucgagccccugguggaccugcccaucggcaucaacaucacccgcuuccagacccuccuggcccugcaccgguccuaccucacgccgggggacagcagcuccggcuggaccgcgggcgccgccgccuacuacgugggguaccugcagccccgcaccuuccugcucaaguacaacgagaacggcaccaucacggacgcggucgacugcgcccuggacccccugagcgagaccaagugcacccucaaguccuucaccguggagaaggggaucuaccagacgagcaacuuccgggugcagcccaccgaguccaucguccgcuucccgaacaucaccaaccugugccccuucggcgagguguucaacgccacccgguucgccagcgucuacgccuggaaccgcaagcggaucuccaacugcguggcggacuacagcgugcuguacaacuccgccagcuucuccacguucaagugcuacggcgucagccccaccaagcucaacgaccugugcuucaccaacguguacgccgacuccuucgugauccgcggggacgagguccggcagaucgcccccggccagaccgggaagaucgccgacuacaacuacaagcugccggacgacuucacgggcugcgugaucgcguggaacagcaacaaccucgacuccaaggucgggggcaacuacaacuaccuguuccgccuguuccgcaagagcaaccucaagcccuucgagcgggacaucuccaccgagaucuaccaggccggcagcacccccugcaacgggguggagggcuucaacugcuacuucccccugcaguccuacggguuccagccgaccaacggcgugggguaccagcccuaccggguggucgugcugagcuucgagcuccugcacgcccccgccacggugugcggccccaagaaguccaccaaccuggucaagaacaagugcgugaacuucaacuucaacggccucaccgggaccggcgugcugaccgagagcaacaagaaguuccugccguuccagcaguucgggcgcgacaucgccgacacgaccgacgcgguccgcgacccccagacccuggagauccucgacaucacccccugcagcuucggcgggguguccgugaucacgccgggcaccaacaccagcaaccaggucgccgugcuguaccagggcgugaacugcaccgagguccccguggccauccacgccgaccagcugacgcccaccuggcggguguacuccaccggcagcaacgucuuccagacccgcgccgggugccucaucggcgcggagcacgugaacaacuccuacgagugcgacauccccaucggggccggcaucugcgccagcuaccagacgcagaccaacuccccgcggcgcgcccggagcguggcgucccagagcgugaucgccuacaccaugucccugggcgccgagaacagcgucgccuacuccaacaacagcaucgccauccccaccaacuucacgaucuccgugaccaccgagauccugcccgugagcaugaccaagacgagcgucgacugcaccauguacaucugcggggacuccaccgagugcagcaaccuccugcugcaguacggcuccuucugcacccagcucaaccgcgcgcugacggggaucgccguggagcaggacaagaacacccaggagguguucgcccaggucaagcagaucuacaagacgcccccgaucaaggacuucggcggguucaacuucagccagauccugcccgaccccuccaagcccagcaagcgguccuucaucgaggaccuccuguucaacaaggugacccuggccgacgccggcuucaucaagcaguacggcgacugccucggggacaucgcggcccgcgaccugaucugcgcccagaaguucaacggccugaccgugcucccgccccugcugaccgacgagaugaucgcccaguacaccagcgcccuccuggcggggaccaucacguccggcuggaccuucggggccggcgccgcccugcagauccccuucgcgaugcagauggccuaccgguucaacggcaucggggucacccagaacgugcucuacgagaaccagaagcugaucgccaaccaguucaacagcgccaucggcaagauccaggacucccugagcuccaccgccagcgcgcucgggaagcugcaggacguggucaaccagaacgcccaggcccugaacacgcucgugaagcagcuguccagcaacuucggcgccaucuccagcgugcugaacgacauccucucccgccuggacaaggucgaggccgaggugcagaucgaccggcugaucaccgggcgccuccagagccugcagaccuacgugacccagcagcugauccgggcggccgagauccgcgccagcgccaaccucgccgcgaccaagauguccgagugcguccugggccagagcaagcggguggacuucugcggcaagggguaccaccugauguccuucccccagagcgccccgcacggcguggucuuccuccacgugacguacguccccgcccaggagaagaacuucaccaccgcccccgcgaucugccacgacgggaaggcccacuucccccgcgagggcguguucguguccaacgggacccacugguucgucacgcagcggaacuucuacgagccgcagaucaucaccaccgacaacaccuucgugagcggcaacugcgacguggucaucggcaucgugaacaacacgguguacgacccccugcagcccgagcuggacuccuucaaggaggagcucgacaaguacuucaagaaccacaccagccccgacgucgaccugggggacaucuccggcaucaacgccagcguggugaacauccagaaggagaucgaccgccugaacgaggucgccaagaaccucaacgagucccugaucgaccugcaggagcucgggaaguacgagcaguacaucaaguggccgugguacaucuggcugggcuucaucgccggccugaucgcgaucgugaucgugaccaucaugcucugcugcaugaccagcugcugcuccugccugaaggggugcugcagcugcggcuccugcugcaaguucgacgaggacgacagcgagcccguccugaagggggugaagcuccacuacacgugauaauaggcuggagccucgguggccuagcuucuugccccuugggccuccccccagccccuccuccccuuccugcacccguacccccguggucuuugaauaaagucugagugggcggcaaaaaaaaaaaaaaaaaaaaaaaaaaaaaaaaaaaaaaaaaaaaaaaaaaaaaaaaaaaaaaaaaaaaaaaaaaaaaaaaaaaaaaaaaaaaaaaaaaaaucuag

SEQ ID NO: 26501 - RNA, 4091 nt, Artificial Sequence
  SARS-CoV-2/Wuhan/WIV05/2019__EPI_ISL_402128 spike protein mRNA gc (1-1273)(H69del_V70del_Y144del_N501Y_A570D_D614G_P681H_T716I_S982 A_D1118H)
gggaaauaagagagaaaagaagaguaagaagaaauauaagaccccggcgccgccaccauguucguguuccugguccuccugccccuggugagcucccagugcgugaaccucaccacccgcacgcagcugccgcccgccuacaccaacagcuucacccggggcgucuacuaccccgacaagguguuccgcuccagcgugcugcacuccacccaggaccucuuccugcccuucuucagcaacgucacgugguuccacgccaucuccgggaccaacggcaccaagcgguucgacaacccggugcugcccuucaacgacggggucuacuucgcgagcaccgagaaguccaacaucauccgcggcuggaucuucgggacgacccucgacagcaagacccagucccugcugaucgugaacaacgccaccaacguggucaucaaggugugcgaguuccaguucugcaacgaccccuuccucggcguguaccacaagaacaacaagagcuggauggaguccgaguuccgggucuacagcuccgccaacaacugcacguucgaguacgugagccagcccuuccugauggaccuggagggcaagcaggggaacuucaagaaccuccgcgaguucguguucaagaacaucgacggcuacuucaagaucuacuccaagcacaccccgaucaaccugguccgggaccugccccagggguucagcgcccucgagccccugguggaccugcccaucggcaucaacaucacccgcuuccagacccuccuggcccugcaccgguccuaccucacgccgggggacagcagcuccggcuggaccgcgggcgccgccgccuacuacgugggguaccugcagccccgcaccuuccugcucaaguacaacgagaacggcaccaucacggacgcggucgacugcgcccuggacccccugagcgagaccaagugcacccucaaguccuucaccguggagaaggggaucuaccagacgagcaacuuccgggugcagcccaccgaguccaucguccgcuucccgaacaucaccaaccugugccccuucggcgagguguucaacgccacccgguucgccagcgucuacgccuggaaccgcaagcggaucuccaacugcguggcggacuacagcgugcuguacaacuccgccagcuucuccacguucaagugcuacggcgucagccccaccaagcucaacgaccugugcuucaccaacguguacgccgacuccuucgugauccgcggggacgagguccggcagaucgcccccggccagaccgggaagaucgccgacuacaacuacaagcugccggacgacuucacgggcugcgugaucgcguggaacagcaacaaccucgacuccaaggucgggggcaacuacaacuaccuguaccgccuguuccgcaagagcaaccucaagcccuucgagcgggacaucuccaccgagaucuaccaggccggcagcacccccugcaacgggguggagggcuucaacugcuacuucccccugcaguccuacggguuccagccgaccuacggcgugggguaccagcccuaccggguggucgugcugagcuucgagcuccugcacgcccccgccacggugugcggccccaagaaguccaccaaccuggucaagaacaagugcgugaacuucaacuucaacggccucaccgggaccggcgugcugaccgagagcaacaagaaguuccugccguuccagcaguucgggcgcgacaucgacgacacgaccgacgcgguccgcgacccccagacccuggagauccucgacaucacccccugcagcuucggcgggguguccgugaucacgccgggcaccaacaccagcaaccaggucgccgugcuguaccagggcgugaacugcaccgagguccccguggccauccacgccgaccagcugacgcccaccuggcggguguacuccaccggcagcaacgucuuccagacccgcgccgggugccucaucggcgcggagcacgugaacaacuccuacgagugcgacauccccaucggggccggcaucugcgccagcuaccagacgcagaccaacucccaccggcgcgcccggagcguggcgucccagagcaucaucgccuacaccaugucccugggcgccgagaacagcgucgccuacuccaacaacagcaucgccauccccaucaacuucacgaucuccgugaccaccgagauccugcccgugagcaugaccaagacgagcgucgacugcaccauguacaucugcggggacuccaccgagugcagcaaccuccugcugcaguacggcuccuucugcacccagcucaaccgcgcgcugacggggaucgccguggagcaggacaagaacacccaggagguguucgcccaggucaagcagaucuacaagacgcccccgaucaaggacuucggcggguucaacuucagccagauccugcccgaccccuccaagcccagcaagcgguccuucaucgaggaccuccuguucaacaaggugacccuggccgacgccggcuucaucaagcaguacggcgacugccucggggacaucgcggcccgcgaccugaucugcgcccagaaguucaacggccugaccgugcucccgccccugcugaccgacgagaugaucgcccaguacaccagcgcccuccuggcggggaccaucacguccggcuggaccuucggggccggcgccgcccugcagauccccuucgcgaugcagauggccuaccgguucaacggcaucggggucacccagaacgugcucuacgagaaccagaagcugaucgccaaccaguucaacagcgccaucggcaagauccaggacucccugagcuccaccgccagcgcgcucgggaagcugcaggacguggucaaccagaacgcccaggcccugaacacgcucgugaagcagcuguccagcaacuucggcgccaucuccagcgugcugaacgacauccucgcccgccuggacaaggucgaggccgaggugcagaucgaccggcugaucaccgggcgccuccagagccugcagaccuacgugacccagcagcugauccgggcggccgagauccgcgccagcgccaaccucgccgcgaccaagauguccgagugcguccugggccagagcaagcggguggacuucugcggcaagggguaccaccugauguccuucccccagagcgccccgcacggcguggucuuccuccacgugacguacguccccgcccaggagaagaacuucaccaccgcccccgcgaucugccacgacgggaaggcccacuucccccgcgagggcguguucguguccaacgggacccacugguucgucacgcagcggaacuucuacgagccgcagaucaucaccacccacaacaccuucgugagcggcaacugcgacguggucaucggcaucgugaacaacacgguguacgacccccugcagcccgagcuggacuccuucaaggaggagcucgacaaguacuucaagaaccacaccagccccgacgucgaccugggggacaucuccggcaucaacgccagcguggugaacauccagaaggagaucgaccgccugaacgaggucgccaagaaccucaacgagucccugaucgaccugcaggagcucgggaaguacgagcaguacaucaaguggccgugguacaucuggcugggcuucaucgccggccugaucgcgaucgugauggugaccaucaugcucugcugcaugaccagcugcugcuccugccugaaggggugcugcagcugcggcuccugcugcaaguucgacgaggacgacagcgagcccguccugaagggggugaagcuccacuacacgugauaauaggcuggagccucgguggccuagcuucuugccccuugggccuccccccagccccuccuccccuuccugcacccguacccccguggucuuugaauaaagucugagugggcggcaaaaaaaaaaaaaaaaaaaaaaaaaaaaaaaaaaaaaaaaaaaaaaaaaaaaaaaaaaaaaaaaaaaaaaaaaaaaaaaaaaaaaaaaaaaaaaaaaaaaucuag

SEQ ID NO: 26502 - RNA, 4100 nt, Artificial Sequence
  SARS-CoV-2/Wuhan/WIV05/2019__EPI_ISL_402128 spike protein mRNA gc (1-1273)(K417N_E484K_N501Y_D614G)
gggaaauaagagagaaaagaagaguaagaagaaauauaagaccccggcgccgccaccauguucguguuccugguccuccugccccuggugagcucccagugcgugaaccucaccacccgcacgcagcugccgcccgccuacaccaacagcuucacccggggcgucuacuaccccgacaagguguuccgcuccagcgugcugcacuccacccaggaccucuuccugcccuucuucagcaacgucacgugguuccacgccauccacguguccgggaccaacggcaccaagcgguucgacaacccggugcugcccuucaacgacggggucuacuucgcgagcaccgagaaguccaacaucauccgcggcuggaucuucgggacgacccucgacagcaagacccagucccugcugaucgugaacaacgccaccaacguggucaucaaggugugcgaguuccaguucugcaacgaccccuuccucggcguguacuaccacaagaacaacaagagcuggauggaguccgaguuccgggucuacagcuccgccaacaacugcacguucgaguacgugagccagcccuuccugauggaccuggagggcaagcaggggaacuucaagaaccuccgcgaguucguguucaagaacaucgacggcuacuucaagaucuacuccaagcacaccccgaucaaccugguccgggaccugccccagggguucagcgcccucgagccccugguggaccugcccaucggcaucaacaucacccgcuuccagacccuccuggcccugcaccgguccuaccucacgccgggggacagcagcuccggcuggaccgcgggcgccgccgccuacuacgugggguaccugcagccccgcaccuuccugcucaaguacaacgagaacggcaccaucacggacgcggucgacugcgcccuggacccccugagcgagaccaagugcacccucaaguccuucaccguggagaaggggaucuaccagacgagcaacuuccgggugcagcccaccgaguccaucguccgcuucccgaacaucaccaaccugugccccuucggcgagguguucaacgccacccgguucgccagcgucuacgccuggaaccgcaagcggaucuccaacugcguggcggacuacagcgugcuguacaacuccgccagcuucuccacguucaagugcuacggcgucagccccaccaagcucaacgaccugugcuucaccaacguguacgccgacuccuucgugauccgcggggacgagguccggcagaucgcccccggccagaccgggaacaucgccgacuacaacuacaagcugccggacgacuucacgggcugcgugaucgcguggaacagcaacaaccucgacuccaaggucgggggcaacuacaacuaccuguaccgccuguuccgcaagagcaaccucaagcccuucgagcgggacaucuccaccgagaucuaccaggccggcagcacccccugcaacggggugaagggcuucaacugcuacuucccccugcaguccuacggguuccagccgaccuacggcgugggguaccagcccuaccggguggucgugcugagcuucgagcuccugcacgcccccgccacggugugcggccccaagaaguccaccaaccuggucaagaacaagugcgugaacuucaacuucaacggccucaccgggaccggcgugcugaccgagagcaacaagaaguuccugccguuccagcaguucgggcgcgacaucgccgacacgaccgacgcgguccgcgacccccagacccuggagauccucgacaucacccccugcagcuucggcgggguguccgugaucacgccgggcaccaacaccagcaaccaggucgccgugcuguaccagggcgugaacugcaccgagguccccguggccauccacgccgaccagcugacgcccaccuggcggguguacuccaccggcagcaacgucuuccagacccgcgccgggugccucaucggcgcggagcacgugaacaacuccuacgagugcgacauccccaucggggccggcaucugcgccagcuaccagacgcagaccaacuccccgcggcgcgcccggagcguggcgucccagagcaucaucgccuacaccaugucccugggcgccgagaacagcgucgccuacuccaacaacagcaucgccauccccaccaacuucacgaucuccgugaccaccgagauccugcccgugagcaugaccaagacgagcgucgacugcaccauguacaucugcggggacuccaccgagugcagcaaccuccugcugcaguacggcuccuucugcacccagcucaaccgcgcgcugacggggaucgccguggagcaggacaagaacacccaggagguguucgcccaggucaagcagaucuacaagacgcccccgaucaaggacuucggcggguucaacuucagccagauccugcccgaccccuccaagcccagcaagcgguccuucaucgaggaccuccuguucaacaaggugacccuggccgacgccggcuucaucaagcaguacggcgacugccucggggacaucgcggcccgcgaccugaucugcgcccagaaguucaacggccugaccgugcucccgccccugcugaccgacgagaugaucgcccaguacaccagcgcccuccuggcggggaccaucacguccggcuggaccuucggggccggcgccgcccugcagauccccuucgcgaugcagauggccuaccgguucaacggcaucggggucacccagaacgugcucuacgagaaccagaagcugaucgccaaccaguucaacagcgccaucggcaagauccaggacucccugagcuccaccgccagcgcgcucgggaagcugcaggacguggucaaccagaacgcccaggcccugaacacgcucgugaagcagcuguccagcaacuucggcgccaucuccagcgugcugaacgacauccucucccgccuggacaaggucgaggccgaggugcagaucgaccggcugaucaccgggcgccuccagagccugcagaccuacgugacccagcagcugauccgggcggccgagauccgcgccagcgccaaccucgccgcgaccaagauguccgagugcguccugggccagagcaagcggguggacuucugcggcaagggguaccaccugauguccuucccccagagcgccccgcacggcguggucuuccuccacgugacguacguccccgcccaggagaagaacuucaccaccgcccccgcgaucugccacgacgggaaggcccacuucccccgcgagggcguguucguguccaacgggacccacugguucgucacgcagcggaacuucuacgagccgcagaucaucaccaccgacaacaccuucgugagcggcaacugcgacguggucaucggcaucgugaacaacacgguguacgacccccugcagcccgagcuggacuccuucaaggaggagcucgacaaguacuucaagaaccacaccagccccgacgucgaccugggggacaucuccggcaucaacgccagcguggugaacauccagaaggagaucgaccgccugaacgaggucgccaagaaccucaacgagucccugaucgaccugcaggagcucgggaaguacgagcaguacaucaaguggccgugguacaucuggcugggcuucaucgccggccugaucgcgaucgugauggugaccaucaugcucugcugcaugaccagcugcugcuccugccugaaggggugcugcagcugcggcuccugcugcaaguucgacgaggacgacagcgagcccguccugaagggggugaagcuccacuacacgugauaauaggcuggagccucgguggccuagcuucuugccccuugggccuccccccagccccuccuccccuuccugcacccguacccccguggucuuugaauaaagucugagugggcggcaaaaaaaaaaaaaaaaaaaaaaaaaaaaaaaaaaaaaaaaaaaaaaaaaaaaaaaaaaaaaaaaaaaaaaaaaaaaaaaaaaaaaaaaaaaaaaaaaaaaucuag

SEQ ID NO: 26503 - RNA, 4091 nt, Artificial Sequence
  SARS-CoV-2/Wuhan/WIV05/2019__EPI_ISL_402128 spike protein mRNA gc (1-1273)(L18F_D80A_D215G_L242del_A243del_L244del_R246I_K417N_E484 K_N501Y_D614G_A701V)
gggaaauaagagagaaaagaagaguaagaagaaauauaagaccccggcgccgccaccauguucguguuccugguccuccugccccuggugagcucccagugcgugaacuucaccacccgcacgcagcugccgcccgccuacaccaacagcuucacccggggcgucuacuaccccgacaagguguuccgcuccagcgugcugcacuccacccaggaccucuuccugcccuucuucagcaacgucacgugguuccacgccauccacguguccgggaccaacggcaccaagcgguucgccaacccggugcugcccuucaacgacggggucuacuucgcgagcaccgagaaguccaacaucauccgcggcuggaucuucgggacgacccucgacagcaagacccagucccugcugaucgugaacaacgccaccaacguggucaucaaggugugcgaguuccaguucugcaacgaccccuuccucggcguguacuaccacaagaacaacaagagcuggauggaguccgaguuccgggucuacagcuccgccaacaacugcacguucgaguacgugagccagcccuuccugauggaccuggagggcaagcaggggaacuucaagaaccuccgcgaguucguguucaagaacaucgacggcuacuucaagaucuacuccaagcacaccccgaucaaccugguccggggccugccccagggguucagcgcccucgagccccugguggaccugcccaucggcaucaacaucacccgcuuccagacccuccacaucuccuaccucacgccgggggacagcagcuccggcuggaccgcgggcgccgccgccuacuacgugggguaccugcagccccgcaccuuccugcucaaguacaacgagaacggcaccaucacggacgcggucgacugcgcccuggacccccugagcgagaccaagugcacccucaaguccuucaccguggagaaggggaucuaccagacgagcaacuuccgggugcagcccaccgaguccaucguccgcuucccgaacaucaccaaccugugccccuucggcgagguguucaacgccacccgguucgccagcgucuacgccuggaaccgcaagcggaucuccaacugcguggcggacuacagcgugcuguacaacuccgccagcuucuccacguucaagugcuacggcgucagccccaccaagcucaacgaccugugcuucaccaacguguacgccgacuccuucgugauccgcggggacgagguccggcagaucgcccccggccagaccgggaacaucgccgacuacaacuacaagcugccggacgacuucacgggcugcgugaucgcguggaacagcaacaaccucgacuccaaggucgggggcaacuacaacuaccuguaccgccuguuccgcaagagcaaccucaagcccuucgagcgggacaucuccaccgagaucuaccaggccggcagcacccccugcaacggggugaagggcuucaacugcuacuucccccugcaguccuacggguuccagccgaccuacggcgugggguaccagcccuaccggguggucgugcugagcuucgagcuccugcacgcccccgccacggugugcggccccaagaaguccaccaaccuggucaagaacaagugcgugaacuucaacuucaacggccucaccgggaccggcgugcugaccgagagcaacaagaaguuccugccguuccagcaguucgggcgcgacaucgccgacacgaccgacgcgguccgcgacccccagacccuggagauccucgacaucacccccugcagcuucggcgggguguccgugaucacgccgggcaccaacaccagcaaccaggucgccgugcuguaccagggcgugaacugcaccgagguccccguggccauccacgccgaccagcugacgcccaccuggcggguguacuccaccggcagcaacgucuuccagacccgcgccgggugccucaucggcgcggagcacgugaacaacuccuacgagugcgacauccccaucggggccggcaucugcgccagcuaccagacgcagaccaacuccccgcggcgcgcccggagcguggcgucccagagcaucaucgccuacaccaugucccugggcguggagaacagcgucgccuacuccaacaacagcaucgccauccccaccaacuucacgaucuccgugaccaccgagauccugcccgugagcaugaccaagacgagcgucgacugcaccauguacaucugcggggacuccaccgagugcagcaaccuccugcugcaguacggcuccuucugcacccagcucaaccgcgcgcugacggggaucgccguggagcaggacaagaacacccaggagguguucgcccaggucaagcagaucuacaagacgcccccgaucaaggacuucggcggguucaacuucagccagauccugcccgaccccuccaagcccagcaagcgguccuucaucgaggaccuccuguucaacaaggugacccuggccgacgccggcuucaucaagcaguacggcgacugccucggggacaucgcggcccgcgaccugaucugcgcccagaaguucaacggccugaccgugcucccgccccugcugaccgacgagaugaucgcccaguacaccagcgcccuccuggcggggaccaucacguccggcuggaccuucggggccggcgccgcccugcagauccccuucgcgaugcagauggccuaccgguucaacggcaucggggucacccagaacgugcucuacgagaaccagaagcugaucgccaaccaguucaacagcgccaucggcaagauccaggacucccugagcuccaccgccagcgcgcucgggaagcugcaggacguggucaaccagaacgcccaggcccugaacacgcucgugaagcagcuguccagcaacuucggcgccaucuccagcgugcugaacgacauccucucccgccuggacaaggucgaggccgaggugcagaucgaccggcugaucaccgggcgccuccagagccugcagaccuacgugacccagcagcugauccgggcggccgagauccgcgccagcgccaaccucgccgcgaccaagauguccgagugcguccugggccagagcaagcggguggacuucugcggcaagggguaccaccugauguccuucccccagagcgccccgcacggcguggucuuccuccacgugacguacguccccgcccaggagaagaacuucaccaccgcccccgcgaucugccacgacgggaaggcccacuucccccgcgagggcguguucguguccaacgggacccacugguucgucacgcagcggaacuucuacgagccgcagaucaucaccaccgacaacaccuucgugagcggcaacugcgacguggucaucggcaucgugaacaacacgguguacgacccccugcagcccgagcuggacuccuucaaggaggagcucgacaaguacuucaagaaccacaccagccccgacgucgaccugggggacaucuccggcaucaacgccagcguggugaacauccagaaggagaucgaccgccugaacgaggucgccaagaaccucaacgagucccugaucgaccugcaggagcucgggaaguacgagcaguacaucaaguggccgugguacaucuggcugggcuucaucgccggccugaucgcgaucgugauggugaccaucaugcucugcugcaugaccagcugcugcuccugccugaaggggugcugcagcugcggcuccugcugcaaguucgacgaggacgacagcgagcccguccugaagggggugaagcuccacuacacgugauaauaggcuggagccucgguggccuagcuucuugccccuugggccuccccccagccccuccuccccuuccugcacccguacccccguggucuuugaauaaagucugagugggcggcaaaaaaaaaaaaaaaaaaaaaaaaaaaaaaaaaaaaaaaaaaaaaaaaaaaaaaaaaaaaaaaaaaaaaaaaaaaaaaaaaaaaaaaaaaaaaaaaaaaaucuag

SEQ ID NO: 26504 - RNA, 4100 nt, Artificial Sequence
  SARS-CoV-2/Wuhan/WIV05/2019__EPI_ISL_402128 spike protein mRNA gc (1-1273)(E484K_D614G)
gggaaauaagagagaaaagaagaguaagaagaaauauaagaccccggcgccgccaccauguucguguuccugguccuccugccccuggugagcucccagugcgugaaccucaccacccgcacgcagcugccgcccgccuacaccaacagcuucacccggggcgucuacuaccccgacaagguguuccgcuccagcgugcugcacuccacccaggaccucuuccugcccuucuucagcaacgucacgugguuccacgccauccacguguccgggaccaacggcaccaagcgguucgacaacccggugcugcccuucaacgacggggucuacuucgcgagcaccgagaaguccaacaucauccgcggcuggaucuucgggacgacccucgacagcaagacccagucccugcugaucgugaacaacgccaccaacguggucaucaaggugugcgaguuccaguucugcaacgaccccuuccucggcguguacuaccacaagaacaacaagagcuggauggaguccgaguuccgggucuacagcuccgccaacaacugcacguucgaguacgugagccagcccuuccugauggaccuggagggcaagcaggggaacuucaagaaccuccgcgaguucguguucaagaacaucgacggcuacuucaagaucuacuccaagcacaccccgaucaaccugguccgggaccugccccagggguucagcgcccucgagccccugguggaccugcccaucggcaucaacaucacccgcuuccagacccuccuggcccugcaccgguccuaccucacgccgggggacagcagcuccggcuggaccgcgggcgccgccgccuacuacgugggguaccugcagccccgcaccuuccugcucaaguacaacgagaacggcaccaucacggacgcggucgacugcgcccuggacccccugagcgagaccaagugcacccucaaguccuucaccguggagaaggggaucuaccagacgagcaacuuccgggugcagcccaccgaguccaucguccgcuucccgaacaucaccaaccugugccccuucggcgagguguucaacgccacccgguucgccagcgucuacgccuggaaccgcaagcggaucuccaacugcguggcggacuacagcgugcuguacaacuccgccagcuucuccacguucaagugcuacggcgucagccccaccaagcucaacgaccugugcuucaccaacguguacgccgacuccuucgugauccgcggggacgagguccggcagaucgcccccggccagaccgggaagaucgccgacuacaacuacaagcugccggacgacuucacgggcugcgugaucgcguggaacagcaacaaccucgacuccaaggucgggggcaacuacaacuaccuguaccgccuguuccgcaagagcaaccucaagcccuucgagcgggacaucuccaccgagaucuaccaggccggcagcacccccugcaacggggugaagggcuucaacugcuacuucccccugcaguccuacggguuccagccgaccaacggcgugggguaccagcccuaccggguggucgugcugagcuucgagcuccugcacgcccccgccacggugugcggccccaagaaguccaccaaccuggucaagaacaagugcgugaacuucaacuucaacggccucaccgggaccggcgugcugaccgagagcaacaagaaguuccugccguuccagcaguucgggcgcgacaucgccgacacgaccgacgcgguccgcgacccccagacccuggagauccucgacaucacccccugcagcuucggcgggguguccgugaucacgccgggcaccaacaccagcaaccaggucgccgugcuguaccagggcgugaacugcaccgagguccccguggccauccacgccgaccagcugacgcccaccuggcggguguacuccaccggcagcaacgucuuccagacccgcgccgggugccucaucggcgcggagcacgugaacaacuccuacgagugcgacauccccaucggggccggcaucugcgccagcuaccagacgcagaccaacuccccgcggcgcgcccggagcguggcgucccagagcaucaucgccuacaccaugucccugggcgccgagaacagcgucgccuacuccaacaacagcaucgccauccccaccaacuucacgaucuccgugaccaccgagauccugcccgugagcaugaccaagacgagcgucgacugcaccauguacaucugcggggacuccaccgagugcagcaaccuccugcugcaguacggcuccuucugcacccagcucaaccgcgcgcugacggggaucgccguggagcaggacaagaacacccaggagguguucgcccaggucaagcagaucuacaagacgcccccgaucaaggacuucggcggguucaacuucagccagauccugcccgaccccuccaagcccagcaagcgguccuucaucgaggaccuccuguucaacaaggugacccuggccgacgccggcuucaucaagcaguacggcgacugccucggggacaucgcggcccgcgaccugaucugcgcccagaaguucaacggccugaccgugcucccgccccugcugaccgacgagaugaucgcccaguacaccagcgcccuccuggcggggaccaucacguccggcuggaccuucggggccggcgccgcccugcagauccccuucgcgaugcagauggccuaccgguucaacggcaucggggucacccagaacgugcucuacgagaaccagaagcugaucgccaaccaguucaacagcgccaucggcaagauccaggacucccugagcuccaccgccagcgcgcucgggaagcugcaggacguggucaaccagaacgcccaggcccugaacacgcucgugaagcagcuguccagcaacuucggcgccaucuccagcgugcugaacgacauccucucccgccuggacaaggucgaggccgaggugcagaucgaccggcugaucaccgggcgccuccagagccugcagaccuacgugacccagcagcugauccgggcggccgagauccgcgccagcgccaaccucgccgcgaccaagauguccgagugcguccugggccagagcaagcggguggacuucugcggcaagggguaccaccugauguccuucccccagagcgccccgcacggcguggucuuccuccacgugacguacguccccgcccaggagaagaacuucaccaccgcccccgcgaucugccacgacgggaaggcccacuucccccgcgagggcguguucguguccaacgggacccacugguucgucacgcagcggaacuucuacgagccgcagaucaucaccaccgacaacaccuucgugagcggcaacugcgacguggucaucggcaucgugaacaacacgguguacgacccccugcagcccgagcuggacuccuucaaggaggagcucgacaaguacuucaagaaccacaccagccccgacgucgaccugggggacaucuccggcaucaacgccagcguggugaacauccagaaggagaucgaccgccugaacgaggucgccaagaaccucaacgagucccugaucgaccugcaggagcucgggaaguacgagcaguacaucaaguggccgugguacaucuggcugggcuucaucgccggccugaucgcgaucgugauggugaccaucaugcucugcugcaugaccagcugcugcuccugccugaaggggugcugcagcugcggcuccugcugcaaguucgacgaggacgacagcgagcccguccugaagggggugaagcuccacuacacgugauaauaggcuggagccucgguggccuagcuucuugccccuugggccuccccccagccccuccuccccuuccugcacccguacccccguggucuuugaauaaagucugagugggcggcaaaaaaaaaaaaaaaaaaaaaaaaaaaaaaaaaaaaaaaaaaaaaaaaaaaaaaaaaaaaaaaaaaaaaaaaaaaaaaaaaaaaaaaaaaaaaaaaaaaaucuag

SEQ ID NO: 26505 - RNA, 4100 nt, Artificial Sequence
  SARS-CoV-2/Wuhan/WIV05/2019__EPI_ISL_402128 spike protein mRNA gc (1-1273)(L18F_T20N_P26S_D138Y_R190S_K417T_E484K_N501Y_D614G_H655Y _T1027I)
gggaaauaagagagaaaagaagaguaagaagaaauauaagaccccggcgccgccaccauguucguguuccugguccuccugccccuggugagcucccagugcgugaacuucaccaaccgcacgcagcugccgagcgccuacaccaacagcuucacccggggcgucuacuaccccgacaagguguuccgcuccagcgugcugcacuccacccaggaccucuuccugcccuucuucagcaacgucacgugguuccacgccauccacguguccgggaccaacggcaccaagcgguucgacaacccggugcugcccuucaacgacggggucuacuucgcgagcaccgagaaguccaacaucauccgcggcuggaucuucgggacgacccucgacagcaagacccagucccugcugaucgugaacaacgccaccaacguggucaucaaggugugcgaguuccaguucugcaacuaccccuuccucggcguguacuaccacaagaacaacaagagcuggauggaguccgaguuccgggucuacagcuccgccaacaacugcacguucgaguacgugagccagcccuuccugauggaccuggagggcaagcaggggaacuucaagaaccucagcgaguucguguucaagaacaucgacggcuacuucaagaucuacuccaagcacaccccgaucaaccugguccgggaccugccccagggguucagcgcccucgagccccugguggaccugcccaucggcaucaacaucacccgcuuccagacccuccuggcccugcaccgguccuaccucacgccgggggacagcagcuccggcuggaccgcgggcgccgccgccuacuacgugggguaccugcagccccgcaccuuccugcucaaguacaacgagaacggcaccaucacggacgcggucgacugcgcccuggacccccugagcgagaccaagugcacccucaaguccuucaccguggagaaggggaucuaccagacgagcaacuuccgggugcagcccaccgaguccaucguccgcuucccgaacaucaccaaccugugccccuucggcgagguguucaacgccacccgguucgccagcgucuacgccuggaaccgcaagcggaucuccaacugcguggcggacuacagcgugcuguacaacuccgccagcuucuccacguucaagugcuacggcgucagccccaccaagcucaacgaccugugcuucaccaacguguacgccgacuccuucgugauccgcggggacgagguccggcagaucgcccccggccagaccgggaccaucgccgacuacaacuacaagcugccggacgacuucacgggcugcgugaucgcguggaacagcaacaaccucgacuccaaggucgggggcaacuacaacuaccuguaccgccuguuccgcaagagcaaccucaagcccuucgagcgggacaucuccaccgagaucuaccaggccggcagcacccccugcaacggggugaagggcuucaacugcuacuucccccugcaguccuacggguuccagccgaccuacggcgugggguaccagcccuaccggguggucgugcugagcuucgagcuccugcacgcccccgccacggugugcggccccaagaaguccaccaaccuggucaagaacaagugcgugaacuucaacuucaacggccucaccgggaccggcgugcugaccgagagcaacaagaaguuccugccguuccagcaguucgggcgcgacaucgccgacacgaccgacgcgguccgcgacccccagacccuggagauccucgacaucacccccugcagcuucggcgggguguccgugaucacgccgggcaccaacaccagcaaccaggucgccgugcuguaccagggcgugaacugcaccgagguccccguggccauccacgccgaccagcugacgcccaccuggcggguguacuccaccggcagcaacgucuuccagacccgcgccgggugccucaucggcgcggaguacgugaacaacuccuacgagugcgacauccccaucggggccggcaucugcgccagcuaccagacgcagaccaacuccccgcggcgcgcccggagcguggcgucccagagcaucaucgccuacaccaugucccugggcgccgagaacagcgucgccuacuccaacaacagcaucgccauccccaccaacuucacgaucuccgugaccaccgagauccugcccgugagcaugaccaagacgagcgucgacugcaccauguacaucugcggggacuccaccgagugcagcaaccuccugcugcaguacggcuccuucugcacccagcucaaccgcgcgcugacggggaucgccguggagcaggacaagaacacccaggagguguucgcccaggucaagcagaucuacaagacgcccccgaucaaggacuucggcggguucaacuucagccagauccugcccgaccccuccaagcccagcaagcgguccuucaucgaggaccuccuguucaacaaggugacccuggccgacgccggcuucaucaagcaguacggcgacugccucggggacaucgcggcccgcgaccugaucugcgcccagaaguucaacggccugaccgugcucccgccccugcugaccgacgagaugaucgcccaguacaccagcgcccuccuggcggggaccaucacguccggcuggaccuucggggccggcgccgcccugcagauccccuucgcgaugcagauggccuaccgguucaacggcaucggggucacccagaacgugcucuacgagaaccagaagcugaucgccaaccaguucaacagcgccaucggcaagauccaggacucccugagcuccaccgccagcgcgcucgggaagcugcaggacguggucaaccagaacgcccaggcccugaacacgcucgugaagcagcuguccagcaacuucggcgccaucuccagcgugcugaacgacauccucucccgccuggacaaggucgaggccgaggugcagaucgaccggcugaucaccgggcgccuccagagccugcagaccuacgugacccagcagcugauccgggcggccgagauccgcgccagcgccaaccucgccgcgaucaagauguccgagugcguccugggccagagcaagcggguggacuucugcggcaagggguaccaccugauguccuucccccagagcgccccgcacggcguggucuuccuccacgugacguacguccccgcccaggagaagaacuucaccaccgcccccgcgaucugccacgacgggaaggcccacuucccccgcgagggcguguucguguccaacgggacccacugguucgucacgcagcggaacuucuacgagccgcagaucaucaccaccgacaacaccuucgugagcggcaacugcgacguggucaucggcaucgugaacaacacgguguacgacccccugcagcccgagcuggacuccuucaaggaggagcucgacaaguacuucaagaaccacaccagccccgacgucgaccugggggacaucuccggcaucaacgccagcguggugaacauccagaaggagaucgaccgccugaacgaggucgccaagaaccucaacgagucccugaucgaccugcaggagcucgggaaguacgagcaguacaucaaguggccgugguacaucuggcugggcuucaucgccggccugaucgcgaucgugauggugaccaucaugcucugcugcaugaccagcugcugcuccugccugaaggggugcugcagcugcggcuccugcugcaaguucgacgaggacgacagcgagcccguccugaagggggugaagcuccacuacacgugauaauaggcuggagccucgguggccuagcuucuugccccuugggccuccccccagccccuccuccccuuccugcacccguacccccguggucuuugaauaaagucugagugggcggcaaaaaaaaaaaaaaaaaaaaaaaaaaaaaaaaaaaaaaaaaaaaaaaaaaaaaaaaaaaaaaaaaaaaaaaaaaaaaaaaaaaaaaaaaaaaaaaaaaaaucuag

SEQ ID NO: 26506 - RNA, 4100 nt, Artificial Sequence
  SARS-CoV-2/Wuhan/WIV05/2019__EPI_ISL_402128 spike protein mRNA gc (1-1273)(S13I_W152C_L452R_D614G)
gggaaauaagagagaaaagaagaguaagaagaaauauaagaccccggcgccgccaccauguucguguuccugguccuccugccccuggugagcauccagugcgugaaccucaccacccgcacgcagcugccgcccgccuacaccaacagcuucacccggggcgucuacuaccccgacaagguguuccgcuccagcgugcugcacuccacccaggaccucuuccugcccuucuucagcaacgucacgugguuccacgccauccacguguccgggaccaacggcaccaagcgguucgacaacccggugcugcccuucaacgacggggucuacuucgcgagcaccgagaaguccaacaucauccgcggcuggaucuucgggacgacccucgacagcaagacccagucccugcugaucgugaacaacgccaccaacguggucaucaaggugugcgaguuccaguucugcaacgaccccuuccucggcguguacuaccacaagaacaacaagagcugcauggaguccgaguuccgggucuacagcuccgccaacaacugcacguucgaguacgugagccagcccuuccugauggaccuggagggcaagcaggggaacuucaagaaccuccgcgaguucguguucaagaacaucgacggcuacuucaagaucuacuccaagcacaccccgaucaaccugguccgggaccugccccagggguucagcgcccucgagccccugguggaccugcccaucggcaucaacaucacccgcuuccagacccuccuggcccugcaccgguccuaccucacgccgggggacagcagcuccggcuggaccgcgggcgccgccgccuacuacgugggguaccugcagccccgcaccuuccugcucaaguacaacgagaacggcaccaucacggacgcggucgacugcgcccuggacccccugagcgagaccaagugcacccucaaguccuucaccguggagaaggggaucuaccagacgagcaacuuccgggugcagcccaccgaguccaucguccgcuucccgaacaucaccaaccugugccccuucggcgagguguucaacgccacccgguucgccagcgucuacgccuggaaccgcaagcggaucuccaacugcguggcggacuacagcgugcuguacaacuccgccagcuucuccacguucaagugcuacggcgucagccccaccaagcucaacgaccugugcuucaccaacguguacgccgacuccuucgugauccgcggggacgagguccggcagaucgcccccggccagaccgggaagaucgccgacuacaacuacaagcugccggacgacuucacgggcugcgugaucgcguggaacagcaacaaccucgacuccaaggucgggggcaacuacaacuaccgcuaccgccuguuccgcaagagcaaccucaagcccuucgagcgggacaucuccaccgagaucuaccaggccggcagcacccccugcaacgggguggagggcuucaacugcuacuucccccugcaguccuacggguuccagccgaccaacggcgugggguaccagcccuaccggguggucgugcugagcuucgagcuccugcacgcccccgccacggugugcggccccaagaaguccaccaaccuggucaagaacaagugcgugaacuucaacuucaacggccucaccgggaccggcgugcugaccgagagcaacaagaaguuccugccguuccagcaguucgggcgcgacaucgccgacacgaccgacgcgguccgcgacccccagacccuggagauccucgacaucacccccugcagcuucggcgggguguccgugaucacgccgggcaccaacaccagcaaccaggucgccgugcuguaccagggcgugaacugcaccgagguccccguggccauccacgccgaccagcugacgcccaccuggcggguguacuccaccggcagcaacgucuuccagacccgcgccgggugccucaucggcgcggagcacgugaacaacuccuacgagugcgacauccccaucggggccggcaucugcgccagcuaccagacgcagaccaacuccccgcggcgcgcccggagcguggcgucccagagcaucaucgccuacaccaugucccugggcgccgagaacagcgucgccuacuccaacaacagcaucgccauccccaccaacuucacgaucuccgugaccaccgagauccugcccgugagcaugaccaagacgagcgucgacugcaccauguacaucugcggggacuccaccgagugcagcaaccuccugcugcaguacggcuccuucugcacccagcucaaccgcgcgcugacggggaucgccguggagcaggacaagaacacccaggagguguucgcccaggucaagcagaucuacaagacgcccccgaucaaggacuucggcggguucaacuucagccagauccugcccgaccccuccaagcccagcaagcgguccuucaucgaggaccuccuguucaacaaggugacccuggccgacgccggcuucaucaagcaguacggcgacugccucggggacaucgcggcccgcgaccugaucugcgcccagaaguucaacggccugaccgugcucccgccccugcugaccgacgagaugaucgcccaguacaccagcgcccuccuggcggggaccaucacguccggcuggaccuucggggccggcgccgcccugcagauccccuucgcgaugcagauggccuaccgguucaacggcaucggggucacccagaacgugcucuacgagaaccagaagcugaucgccaaccaguucaacagcgccaucggcaagauccaggacucccugagcuccaccgccagcgcgcucgggaagcugcaggacguggucaaccagaacgcccaggcccugaacacgcucgugaagcagcuguccagcaacuucggcgccaucuccagcgugcugaacgacauccucucccgccuggacaaggucgaggccgaggugcagaucgaccggcugaucaccgggcgccuccagagccugcagaccuacgugacccagcagcugauccgggcggccgagauccgcgccagcgccaaccucgccgcgaccaagauguccgagugcguccugggccagagcaagcggguggacuucugcggcaagggguaccaccugauguccuucccccagagcgccccgcacggcguggucuuccuccacgugacguacguccccgcccaggagaagaacuucaccaccgcccccgcgaucugccacgacgggaaggcccacuucccccgcgagggcguguucguguccaacgggacccacugguucgucacgcagcggaacuucuacgagccgcagaucaucaccaccgacaacaccuucgugagcggcaacugcgacguggucaucggcaucgugaacaacacgguguacgacccccugcagcccgagcuggacuccuucaaggaggagcucgacaaguacuucaagaaccacaccagccccgacgucgaccugggggacaucuccggcaucaacgccagcguggugaacauccagaaggagaucgaccgccugaacgaggucgccaagaaccucaacgagucccugaucgaccugcaggagcucgggaaguacgagcaguacaucaaguggccgugguacaucuggcugggcuucaucgccggccugaucgcgaucgugauggugaccaucaugcucugcugcaugaccagcugcugcuccugccugaaggggugcugcagcugcggcuccugcugcaaguucgacgaggacgacagcgagcccguccugaagggggugaagcuccacuacacgugauaauaggcuggagccucgguggccuagcuucuugccccuugggccuccccccagccccuccuccccuuccugcacccguacccccguggucuuugaauaaagucugagugggcggcaaaaaaaaaaaaaaaaaaaaaaaaaaaaaaaaaaaaaaaaaaaaaaaaaaaaaaaaaaaaaaaaaaaaaaaaaaaaaaaaaaaaaaaaaaaaaaaaaaaaucuag

SEQ ID NO: 26507 - RNA, 4100 nt, Artificial Sequence; identical to SEQ ID NO: 26489
  SARS-CoV-2/Wuhan/WIV05/2019__EPI_ISL_402128 spike protein mRNA gc (1-1273)

SEQ ID NO: 26508 - RNA, 4100 nt, Artificial Sequence
  SARS-CoV-2/Wuhan/WIV05/2019__EPI_ISL_402128 spike protein mRNA gc (1-1273)(D614G)
gggaaauaagagagaaaagaagaguaagaagaaauauaagaccccggcgccgccaccauguucguguuccugguccuccugccccuggugagcucccagugcgugaaccucaccacccgcacgcagcugccgcccgccuacaccaacagcuucacccggggcgucuacuaccccgacaagguguuccgcuccagcgugcugcacuccacccaggaccucuuccugcccuucuucagcaacgucacgugguuccacgccauccacguguccgggaccaacggcaccaagcgguucgacaacccggugcugcccuucaacgacggggucuacuucgcgagcaccgagaaguccaacaucauccgcggcuggaucuucgggacgacccucgacagcaagacccagucccugcugaucgugaacaacgccaccaacguggucaucaaggugugcgaguuccaguucugcaacgaccccuuccucggcguguacuaccacaagaacaacaagagcuggauggaguccgaguuccgggucuacagcuccgccaacaacugcacguucgaguacgugagccagcccuuccugauggaccuggagggcaagcaggggaacuucaagaaccuccgcgaguucguguucaagaacaucgacggcuacuucaagaucuacuccaagcacaccccgaucaaccugguccgggaccugccccagggguucagcgcccucgagccccugguggaccugcccaucggcaucaacaucacccgcuuccagacccuccuggcccugcaccgguccuaccucacgccgggggacagcagcuccggcuggaccgcgggcgccgccgccuacuacgugggguaccugcagccccgcaccuuccugcucaaguacaacgagaacggcaccaucacggacgcggucgacugcgcccuggacccccugagcgagaccaagugcacccucaaguccuucaccguggagaaggggaucuaccagacgagcaacuuccgggugcagcccaccgaguccaucguccgcuucccgaacaucaccaaccugugccccuucggcgagguguucaacgccacccgguucgccagcgucuacgccuggaaccgcaagcggaucuccaacugcguggcggacuacagcgugcuguacaacuccgccagcuucuccacguucaagugcuacggcgucagccccaccaagcucaacgaccugugcuucaccaacguguacgccgacuccuucgugauccgcggggacgagguccggcagaucgcccccggccagaccgggaagaucgccgacuacaacuacaagcugccggacgacuucacgggcugcgugaucgcguggaacagcaacaaccucgacuccaaggucgggggcaacuacaacuaccuguaccgccuguuccgcaagagcaaccucaagcccuucgagcgggacaucuccaccgagaucuaccaggccggcagcacccccugcaacgggguggagggcuucaacugcuacuucccccugcaguccuacggguuccagccgaccaacggcgugggguaccagcccuaccggguggucgugcugagcuucgagcuccugcacgcccccgccacggugugcggccccaagaaguccaccaaccuggucaagaacaagugcgugaacuucaacuucaacggccucaccgggaccggcgugcugaccgagagcaacaagaaguuccugccguuccagcaguucgggcgcgacaucgccgacacgaccgacgcgguccgcgacccccagacccuggagauccucgacaucacccccugcagcuucggcgggguguccgugaucacgccgggcaccaacaccagcaaccaggucgccgugcuguaccagggcgugaacugcaccgagguccccguggccauccacgccgaccagcugacgcccaccuggcggguguacuccaccgggagcaacgucuuccagacccgcgccggcugccucaucggggcggagcacgugaacaacuccuacgagugcgacauccccaucggcgccggcaucugcgccagcuaccagacgcagaccaacuccccgcggcgcgcccggagcguggcgucccagagcaucaucgccuacaccaugucccugggggccgagaacagcgucgccuacuccaacaacagcaucgccauccccaccaacuucacgaucuccgugaccaccgagauccugcccgugagcaugaccaagacgagcgucgacugcaccauguacaucugcggcgacuccaccgagugcagcaaccuccugcugcaguacggguccuucugcacccagcucaaccgcgcgcugacgggcaucgccguggagcaggacaagaacacccaggagguguucgcccaggucaagcagaucuacaagacgcccccgaucaaggacuucgggggcuucaacuucagccagauccugcccgaccccuccaagcccagcaagcgguccuucaucgaggaccuccuguucaacaaggugacccuggccgacgccggcuucaucaagcaguacggggacugccucggcgacaucgcggcccgcgaccugaucugcgcccagaaguucaacgggcugaccgugcucccgccccugcugaccgacgagaugaucgcccaguacaccagcgcccuccuggcgggcaccaucacguccggguggaccuucggcgccggcgccgcccugcagauccccuucgcgaugcagauggccuaccgguucaacgggaucggcgucacccagaacgugcucuacgagaaccagaagcugaucgccaaccaguucaacagcgccaucgggaagauccaggacucccugagcuccaccgccagcgcgcucggcaagcugcaggacguggucaaccagaacgcccaggcccugaacacgcucgugaagcagcuguccagcaacuucggggccaucuccagcgugcugaacgacauccucucccgccuggacaaggucgaggccgaggugcagaucgaccggcugaucaccggccgccuccagagccugcagaccuacgugacccagcagcugauccgggcggccgagauccgcgccagcgccaaccucgccgcgaccaagauguccgagugcguccugggccagagcaagcggguggacuucugcgggaagggcuaccaccugauguccuucccccagagcgccccgcacgggguggucuuccuccacgugacguacguccccgcccaggagaagaacuucaccaccgcccccgcgaucugccacgacggcaaggcccacuucccccgcgaggggguguucguguccaacggcacccacugguucgucacgcagcggaacuucuacgagccgcagaucaucaccaccgacaacaccuucgugagcggcaacugcgacguggucaucgggaucgugaacaacacgguguacgacccccugcagcccgagcuggacuccuucaaggaggagcucgacaaguacuucaagaaccacaccagccccgacgucgaccugggcgacaucuccgggaucaacgccagcguggugaacauccagaaggagaucgaccgccugaacgaggucgccaagaaccucaacgagucccugaucgaccugcaggagcucggcaaguacgagcaguacaucaaguggccgugguacaucuggcugggcuucaucgccgggcugaucgcgaucgugauggugaccaucaugcucugcugcaugaccagcugcugcuccugccugaagggcugcugcagcugcggguccugcugcaaguucgacgaggacgacagcgagcccguccugaagggcgugaagcuccacuacacgugauaauaggcuggagccucgguggccuagcuucuugccccuugggccuccccccagccccuccuccccuuccugcacccguacccccguggucuuugaauaaagucugagugggcggcaaaaaaaaaaaaaaaaaaaaaaaaaaaaaaaaaaaaaaaaaaaaaaaaaaaaaaaaaaaaaaaaaaaaaaaaaaaaaaaaaaaaaaaaaaaaaaaaaaaaucuag

SEQ ID NO: 26509 - RNA, 4100 nt, Artificial Sequence
  SARS-CoV-2/Wuhan/WIV05/2019__EPI_ISL_402128 spike protein mRNA gc (1-1273)(A222V_D614G)
gggaaauaagagagaaaagaagaguaagaagaaauauaagaccccggcgccgccaccauguucguguuccugguccuccugccccuggugagcucccagugcgugaaccucaccacccgcacgcagcugccgcccgccuacaccaacagcuucacccggggcgucuacuaccccgacaagguguuccgcuccagcgugcugcacuccacccaggaccucuuccugcccuucuucagcaacgucacgugguuccacgccauccacguguccgggaccaacggcaccaagcgguucgacaacccggugcugcccuucaacgacggggucuacuucgcgagcaccgagaaguccaacaucauccgcggcuggaucuucgggacgacccucgacagcaagacccagucccugcugaucgugaacaacgccaccaacguggucaucaaggugugcgaguuccaguucugcaacgaccccuuccucggcguguacuaccacaagaacaacaagagcuggauggaguccgaguuccgggucuacagcuccgccaacaacugcacguucgaguacgugagccagcccuuccugauggaccuggagggcaagcaggggaacuucaagaaccuccgcgaguucguguucaagaacaucgacggcuacuucaagaucuacuccaagcacaccccgaucaaccugguccgggaccugccccagggguucagcgugcucgagccccugguggaccugcccaucggcaucaacaucacccgcuuccagacccuccuggcccugcaccgguccuaccucacgccgggggacagcagcuccggcuggaccgccggcgcggccgccuacuacgucggguaccugcagccccgcaccuuccugcucaaguacaacgagaacggcaccaucacggacgccguggacugcgcgcuggacccccugagcgagaccaagugcacccucaaguccuucaccguggagaaggggaucuaccagacgagcaacuuccggguccagcccaccgaguccaucgugcgcuucccgaacaucaccaaccugugccccuucggcgaggucuucaacgccacccgguucgccagcguguacgccuggaaccgcaagcggaucuccaacugcguggccgacuacagcguccuguacaacuccgcgagcuucuccacguucaagugcuacggcgugagccccaccaagcucaacgaccugugcuucaccaacguguacgccgacuccuucgucauccgcggggacgaggugcggcagaucgcccccggccagaccgggaagaucgccgacuacaacuacaagcugccggacgacuucacgggcugcgugaucgccuggaacagcaacaaccucgacuccaaggucgggggcaacuacaacuaccuguaccgccuguuccgcaagagcaaccucaagcccuucgagcgggacaucuccaccgagaucuaccaggcgggcagcacccccugcaacgggguggagggcuucaacugcuacuucccccugcaguccuacggguuccagccgaccaacggcgugggguaccagcccuaccgggucguggugcugagcuucgagcuccugcacgcccccgccacggucugcggccccaagaaguccaccaaccuggugaagaacaagugcgugaacuucaacuucaacggccucaccgggaccggcguccugaccgagagcaacaagaaguuccugccguuccagcaguucgggcgcgacaucgccgacacgaccgacgccgugcgcgacccccagacccuggagauccucgacaucacccccugcagcuucggcgggguguccgucaucacgccgggcaccaacaccagcaaccagguggcggugcuguaccagggcgucaacugcaccgaggugcccguggccauccacgccgaccagcugacgcccaccuggcgggucuacuccaccgggagcaacguguuccagacccgcgccggcugccucaucggggccgagcacgugaacaacuccuacgagugcgacauccccaucggcgcgggcaucugcgccagcuaccagacgcagaccaacuccccgcggcgcgcccggagcgucgccucccagagcaucaucgcguacaccaugucccugggggccgagaacagcguggccuacuccaacaacagcaucgccauccccaccaacuucacgaucuccgugaccaccgagauccugcccgucagcaugaccaagacgagcguggacugcaccauguacaucugcggcgacuccaccgagugcagcaaccuccugcugcaguacggguccuucugcacccagcucaaccgcgcccugacgggcaucgcgguggagcaggacaagaacacccaggaggucuucgcccaggugaagcagaucuacaagacgcccccgaucaaggacuucgggggcuucaacuucagccagauccugcccgaccccuccaagcccagcaagcgguccuucaucgaggaccuccuguucaacaaggugacccuggccgacgccggcuucaucaagcaguacggggacugccucggcgacaucgccgcgcgcgaccugaucugcgcccagaaguucaacgggcugaccguccucccgccccugcugaccgacgagaugaucgcccaguacaccagcgcccuccuggccggcaccaucacguccggguggaccuucggcgcgggcgccgcccugcagauccccuucgccaugcagauggcguaccgguucaacgggaucggcgugacccagaacgugcucuacgagaaccagaagcugaucgccaaccaguucaacagcgccaucgggaagauccaggacucccugagcuccaccgccagcgcccucggcaagcugcaggacgucgugaaccagaacgcgcaggcccugaacacgcucgugaagcagcuguccagcaacuucggggccaucuccagcguccugaacgacauccucucccgccuggacaagguggaggccgaggugcagaucgaccggcugaucaccggccgccuccagagccugcagaccuacgucacccagcagcugauccgggccgcggagauccgcgccagcgccaaccucgccgccaccaagauguccgagugcgugcugggccagagcaagcggguggacuucugcgggaagggcuaccaccugauguccuucccccagagcgcgccgcacggggucguguuccuccacgucacguacgugcccgcccaggagaagaacuucaccaccgcccccgccaucugccacgacggcaaggcgcacuucccccgcgaggggguguucgucuccaacggcacccacugguucgugacgcagcggaacuucuacgagccgcagaucaucaccaccgacaacaccuucgugagcggcaacugcgacgucgugaucgggaucgugaacaacacggucuacgacccccugcagcccgagcuggacuccuucaaggaggagcucgacaaguacuucaagaaccacaccagccccgacguggaccugggcgacaucuccgggaucaacgccagcguggucaacauccagaaggagaucgaccgccugaacgagguggccaagaaccucaacgagucccugaucgaccugcaggagcucggcaaguacgagcaguacaucaaguggccgugguacaucuggcugggcuucaucgccgggcugaucgccaucgugauggucaccaucaugcucugcugcaugaccagcugcugcuccugccugaagggcugcugcagcugcggguccugcugcaaguucgacgaggacgacagcgagcccgugcugaagggcgugaagcuccacuacacgugauaauaggcuggagccucgguggccuagcuucuugccccuugggccuccccccagccccuccuccccuuccugcacccguacccccguggucuuugaauaaagucugagugggcggcaaaaaaaaaaaaaaaaaaaaaaaaaaaaaaaaaaaaaaaaaaaaaaaaaaaaaaaaaaaaaaaaaaaaaaaaaaaaaaaaaaaaaaaaaaaaaaaaaaaaucuag

SEQ ID NO: 26510 - RNA, 4100 nt, Artificial Sequence
  SARS-CoV-2/Wuhan/WIV05/2019__EPI_ISL_402128 spike protein mRNA gc (1-1273)(N439K_D614G)
gggaaauaagagagaaaagaagaguaagaagaaauauaagaccccggcgccgccaccauguucguguuccugguccuccugccccuggugagcucccagugcgugaaccucaccacccgcacgcagcugccgcccgccuacaccaacagcuucacccggggcgucuacuaccccgacaagguguuccgcuccagcgugcugcacuccacccaggaccucuuccugcccuucuucagcaacgucacgugguuccacgccauccacguguccgggaccaacggcaccaagcgguucgacaacccggugcugcccuucaacgacggggucuacuucgcgagcaccgagaaguccaacaucauccgcggcuggaucuucgggacgacccucgacagcaagacccagucccugcugaucgugaacaacgccaccaacguggucaucaaggugugcgaguuccaguucugcaacgaccccuuccucggcguguacuaccacaagaacaacaagagcuggauggaguccgaguuccgggucuacagcuccgccaacaacugcacguucgaguacgugagccagcccuuccugauggaccuggagggcaagcaggggaacuucaagaaccuccgcgaguucguguucaagaacaucgacggcuacuucaagaucuacuccaagcacaccccgaucaaccugguccgggaccugccccagggguucagcgcccucgagccccugguggaccugcccaucggcaucaacaucacccgcuuccagacccuccuggcccugcaccgguccuaccucacgccgggggacagcagcuccggcuggaccgcgggcgccgccgccuacuacgugggguaccugcagccccgcaccuuccugcucaaguacaacgagaacggcaccaucacggacgcggucgacugcgcccuggacccccugagcgagaccaagugcacccucaaguccuucaccguggagaaggggaucuaccagacgagcaacuuccgggugcagcccaccgaguccaucguccgcuucccgaacaucaccaaccugugccccuucggcgagguguucaacgccacccgguucgccagcgucuacgccuggaaccgcaagcggaucuccaacugcguggcggacuacagcgugcuguacaacuccgccagcuucuccacguucaagugcuacggcgucagccccaccaagcucaacgaccugugcuucaccaacguguacgccgacuccuucgugauccgcggggacgagguccggcagaucgcccccggccagaccgggaagaucgccgacuacaacuacaagcugccggacgacuucacgggcugcgugaucgcguggaacagcaagaaccucgacuccaaggucgggggcaacuacaacuaccuguaccgccuguuccgcaagagcaaccucaagcccuucgagcgggacaucuccaccgagaucuaccaggccggcagcacccccugcaacgggguggagggcuucaacugcuacuucccccugcaguccuacggguuccagccgaccaacggcgugggguaccagcccuaccggguggucgugcugagcuucgagcuccugcacgcccccgccacggugugcggccccaagaaguccaccaaccuggucaagaacaagugcgugaacuucaacuucaacggccucaccgggaccggcgugcugaccgagagcaacaagaaguuccugccguuccagcaguucgggcgcgacaucgccgacacgaccgacgcgguccgcgacccccagacccuggagauccucgacaucacccccugcagcuucggcgggguguccgugaucacgccgggcaccaacaccagcaaccaggucgccgugcuguaccagggcgugaacugcaccgagguccccguggccauccacgccgaccagcugacgcccaccuggcggguguacuccaccgggagcaacgucuuccagacccgcgccggcugccucaucggggcggagcacgugaacaacuccuacgagugcgacauccccaucggcgccggcaucugcgccagcuaccagacgcagaccaacuccccgcggcgcgcccggagcguggcgucccagagcaucaucgccuacaccaugucccugggggccgagaacagcgucgccuacuccaacaacagcaucgccauccccaccaacuucacgaucuccgugaccaccgagauccugcccgugagcaugaccaagacgagcgucgacugcaccauguacaucugcggcgacuccaccgagugcagcaaccuccugcugcaguacggguccuucugcacccagcucaaccgcgcgcugacgggcaucgccguggagcaggacaagaacacccaggagguguucgcccaggucaagcagaucuacaagacgcccccgaucaaggacuucgggggcuucaacuucagccagauccugcccgaccccuccaagcccagcaagcgguccuucaucgaggaccuccuguucaacaaggugacccuggccgacgccggcuucaucaagcaguacggggacugccucggcgacaucgcggcccgcgaccugaucugcgcccagaaguucaacgggcugaccgugcucccgccccugcugaccgacgagaugaucgcccaguacaccagcgcccuccuggcgggcaccaucacguccggguggaccuucggcgccggcgccgcccugcagauccccuucgcgaugcagauggccuaccgguucaacgggaucggcgucacccagaacgugcucuacgagaaccagaagcugaucgccaaccaguucaacagcgccaucgggaagauccaggacucccugagcuccaccgccagcgcgcucggcaagcugcaggacguggucaaccagaacgcccaggcccugaacacgcucgugaagcagcuguccagcaacuucggggccaucuccagcgugcugaacgacauccucucccgccuggacaaggucgaggccgaggugcagaucgaccggcugaucaccggccgccuccagagccugcagaccuacgugacccagcagcugauccgggcggccgagauccgcgccagcgccaaccucgccgcgaccaagauguccgagugcguccugggccagagcaagcggguggacuucugcgggaagggcuaccaccugauguccuucccccagagcgccccgcacgggguggucuuccuccacgugacguacguccccgcccaggagaagaacuucaccaccgcccccgcgaucugccacgacggcaaggcccacuucccccgcgaggggguguucguguccaacggcacccacugguucgucacgcagcggaacuucuacgagccgcagaucaucaccaccgacaacaccuucgugagcggcaacugcgacguggucaucgggaucgugaacaacacgguguacgacccccugcagcccgagcuggacuccuucaaggaggagcucgacaaguacuucaagaaccacaccagccccgacgucgaccugggcgacaucuccgggaucaacgccagcguggugaacauccagaaggagaucgaccgccugaacgaggucgccaagaaccucaacgagucccugaucgaccugcaggagcucggcaaguacgagcaguacaucaaguggccgugguacaucuggcugggcuucaucgccgggcugaucgcgaucgugauggugaccaucaugcucugcugcaugaccagcugcugcuccugccugaagggcugcugcagcugcggguccugcugcaaguucgacgaggacgacagcgagcccguccugaagggcgugaagcuccacuacacgugauaauaggcuggagccucgguggccuagcuucuugccccuugggccuccccccagccccuccuccccuuccugcacccguacccccguggucuuugaauaaagucugagugggcggcaaaaaaaaaaaaaaaaaaaaaaaaaaaaaaaaaaaaaaaaaaaaaaaaaaaaaaaaaaaaaaaaaaaaaaaaaaaaaaaaaaaaaaaaaaaaaaaaaaaaucuag

SEQ ID NO: 26511 - RNA, 4100 nt, Artificial Sequence
  SARS-CoV-2/Wuhan/WIV05/2019__EPI_ISL_402128 spike protein mRNA gc (1-1273)(S477N_D614G)
gggaaauaagagagaaaagaagaguaagaagaaauauaagaccccggcgccgccaccauguucguguuccugguccuccugccccuggugagcucccagugcgugaaccucaccacccgcacgcagcugccgcccgccuacaccaacagcuucacccggggcgucuacuaccccgacaagguguuccgcuccagcgugcugcacuccacccaggaccucuuccugcccuucuucagcaacgucacgugguuccacgccauccacguguccgggaccaacggcaccaagcgguucgacaacccggugcugcccuucaacgacggggucuacuucgcgagcaccgagaaguccaacaucauccgcggcuggaucuucgggacgacccucgacagcaagacccagucccugcugaucgugaacaacgccaccaacguggucaucaaggugugcgaguuccaguucugcaacgaccccuuccucggcguguacuaccacaagaacaacaagagcuggauggaguccgaguuccgggucuacagcuccgccaacaacugcacguucgaguacgugagccagcccuuccugauggaccuggagggcaagcaggggaacuucaagaaccuccgcgaguucguguucaagaacaucgacggcuacuucaagaucuacuccaagcacaccccgaucaaccugguccgggaccugccccagggguucagcgcccucgagccccugguggaccugcccaucggcaucaacaucacccgcuuccagacccuccuggcccugcaccgguccuaccucacgccgggggacagcagcuccggcuggaccgcgggcgccgccgccuacuacgugggguaccugcagccccgcaccuuccugcucaaguacaacgagaacggcaccaucacggacgcggucgacugcgcccuggacccccugagcgagaccaagugcacccucaaguccuucaccguggagaaggggaucuaccagacgagcaacuuccgggugcagcccaccgaguccaucguccgcuucccgaacaucaccaaccugugccccuucggcgagguguucaacgccacccgguucgccagcgucuacgccuggaaccgcaagcggaucuccaacugcguggcggacuacagcgugcuguacaacuccgccagcuucuccacguucaagugcuacggcgucagccccaccaagcucaacgaccugugcuucaccaacguguacgccgacuccuucgugauccgcggggacgagguccggcagaucgcccccggccagaccgggaagaucgccgacuacaacuacaagcugccggacgacuucacgggcugcgugaucgcguggaacagcaacaaccucgacuccaaggucgggggcaacuacaacuaccuguaccgccuguuccgcaagagcaaccucaagcccuucgagcgggacaucuccaccgagaucuaccaggccggcaacacccccugcaacgggguggagggcuucaacugcuacuucccccugcagagcuacggguuccagccgaccaacggcgugggguaccagcccuaccggguggucgugcuguccuucgagcuccugcacgcccccgccacggugugcggccccaagaaguccaccaaccuggucaagaacaagugcgugaacuucaacuucaacggccucaccgggaccggcgugcugaccgagagcaacaagaaguuccugccguuccagcaguucgggcgcgacaucgccgacacgaccgacgcgguccgcgacccccagacccuggagauccucgacaucacccccugcagcuucggcggggugagcgugaucacgccgggcaccaacaccuccaaccaggucgccgugcuguaccagggcgugaacugcaccgagguccccguggccauccacgccgaccagcugacgcccaccuggcggguguacagcaccggguccaacgucuuccagacccgcgccggcugccucaucggggcggagcacgugaacaacagcuacgagugcgacauccccaucggcgccggcaucugcgccuccuaccagacgcagaccaacagcccgcggcgcgcccgguccguggcgagccaguccaucaucgccuacaccaugagccugggggccgagaacuccgucgccuacagcaacaacuccaucgccauccccaccaacuucacgaucagcgugaccaccgagauccugcccguguccaugaccaagacgagcgucgacugcaccauguacaucugcggcgacagcaccgagugcuccaaccuccugcugcaguacgggagcuucugcacccagcucaaccgcgcgcugacgggcaucgccguggagcaggacaagaacacccaggagguguucgcccaggucaagcagaucuacaagacgcccccgaucaaggacuucgggggcuucaacuucucccagauccugcccgaccccagcaagcccuccaagcggagcuucaucgaggaccuccuguucaacaaggugacccuggccgacgccggcuucaucaagcaguacggggacugccucggcgacaucgcggcccgcgaccugaucugcgcccagaaguucaacgggcugaccgugcucccgccccugcugaccgacgagaugaucgcccaguacaccuccgcccuccuggcgggcaccaucacgagcggguggaccuucggcgccggcgccgcccugcagauccccuucgcgaugcagauggccuaccgguucaacgggaucggcgucacccagaacgugcucuacgagaaccagaagcugaucgccaaccaguucaacuccgccaucgggaagauccaggacagccuguccagcaccgccuccgcgcucggcaagcugcaggacguggucaaccagaacgcccaggcccugaacacgcucgugaagcagcugagcuccaacuucggggccaucagcuccgugcugaacgacauccucagccgccuggacaaggucgaggccgaggugcagaucgaccggcugaucaccggccgccuccagucccugcagaccuacgugacccagcagcugauccgggcggccgagauccgcgccagcgccaaccucgccgcgaccaagaugagcgagugcguccugggccaguccaagcggguggacuucugcgggaagggcuaccaccugaugagcuucccccaguccgccccgcacgggguggucuuccuccacgugacguacguccccgcccaggagaagaacuucaccaccgcccccgcgaucugccacgacggcaaggcccacuucccccgcgaggggguguucgugagcaacggcacccacugguucgucacgcagcggaacuucuacgagccgcagaucaucaccaccgacaacaccuucguguccggcaacugcgacguggucaucgggaucgugaacaacacgguguacgacccccugcagcccgagcuggacagcuucaaggaggagcucgacaaguacuucaagaaccacaccucccccgacgucgaccugggcgacaucagcgggaucaacgccuccguggugaacauccagaaggagaucgaccgccugaacgaggucgccaagaaccucaacgagagccugaucgaccugcaggagcucggcaaguacgagcaguacaucaaguggccgugguacaucuggcugggcuucaucgccgggcugaucgcgaucgugauggugaccaucaugcucugcugcaugaccuccugcugcagcugccugaagggcugcugcuccugcgggagcugcugcaaguucgacgaggacgacuccgagcccguccugaagggcgugaagcuccacuacacgugauaauaggcuggagccucgguggccuagcuucuugccccuugggccuccccccagccccuccuccccuuccugcacccguacccccguggucuuugaauaaagucugagugggcggcaaaaaaaaaaaaaaaaaaaaaaaaaaaaaaaaaaaaaaaaaaaaaaaaaaaaaaaaaaaaaaaaaaaaaaaaaaaaaaaaaaaaaaaaaaaaaaaaaaaaucuag

SEQ ID NO: 26512 - RNA, 4100 nt, Artificial Sequence
  SARS-CoV-2/Wuhan/WIV05/2019__EPI_ISL_402128 spike protein mRNA gc (1-1273)(N501Y_D614G)
gggaaauaagagagaaaagaagaguaagaagaaauauaagaccccggcgccgccaccauguucguguuccugguccuccugccccuggugagcucccagugcgugaaccucaccacccgcacgcagcugccgcccgccuacaccaacagcuucacccggggcgucuacuaccccgacaagguguuccgcuccagcgugcugcacuccacccaggaccucuuccugcccuucuucagcaacgucacgugguuccacgccauccacguguccgggaccaacggcaccaagcgguucgacaacccggugcugcccuucaacgacggggucuacuucgcgagcaccgagaaguccaacaucauccgcggcuggaucuucgggacgacccucgacagcaagacccagucccugcugaucgugaacaacgccaccaacguggucaucaaggugugcgaguuccaguucugcaacgaccccuuccucggcguguacuaccacaagaacaacaagagcuggauggaguccgaguuccgggucuacagcuccgccaacaacugcacguucgaguacgugagccagcccuuccugauggaccuggagggcaagcaggggaacuucaagaaccuccgcgaguucguguucaagaacaucgacggcuacuucaagaucuacuccaagcacaccccgaucaaccugguccgggaccugccccagggguucagcgcccucgagccccugguggaccugcccaucggcaucaacaucacccgcuuccagacccuccuggcccugcaccgguccuaccucacgccgggggacagcagcuccggcuggaccgcgggcgccgccgccuacuacgugggguaccugcagccccgcaccuuccugcucaaguacaacgagaacggcaccaucacggacgcggucgacugcgcccuggacccccugagcgagaccaagugcacccucaaguccuucaccguggagaaggggaucuaccagacgagcaacuuccgggugcagcccaccgaguccaucguccgcuucccgaacaucaccaaccugugccccuucggcgagguguucaacgccacccgguucgccagcgucuacgccuggaaccgcaagcggaucuccaacugcguggcggacuacagcgugcuguacaacuccgccagcuucuccacguucaagugcuacggcgucagccccaccaagcucaacgaccugugcuucaccaacguguacgccgacuccuucgugauccgcggggacgagguccggcagaucgcccccggccagaccgggaagaucgccgacuacaacuacaagcugccggacgacuucacgggcugcgugaucgcguggaacagcaacaaccucgacuccaaggucgggggcaacuacaacuaccuguaccgccuguuccgcaagagcaaccucaagcccuucgagcgggacaucuccaccgagaucuaccaggccggcagcacccccugcaacgggguggagggcuucaacugcuacuucccccugcaguccuacggguuccagccgaccuacggcgugggguaccagcccuaccggguggucgugcugagcuucgagcuccugcacgcccccgccacggugugcggccccaagaaguccaccaaccuggucaagaacaagugcgugaacuucaacuucaacggccucaccgggaccggcgugcugaccgagagcaacaagaaguuccugccguuccagcaguucgggcgcgacaucgccgacacgaccgacgcgguccgcgacccccagacccuggagauccucgacaucacccccugcagcuucggcgggguguccgugaucacgccgggcaccaacaccagcaaccaggucgccgugcuguaccagggcgugaacugcaccgagguccccguggccauccacgccgaccagcugacgcccaccuggcggguguacuccaccgggagcaacgucuuccagacccgcgccggcugccucaucggggcggagcacgugaacaacuccuacgagugcgacauccccaucggcgccggcaucugcgccagcuaccagacgcagaccaacuccccgcggcgcgcccggagcguggcgucccagagcaucaucgccuacaccaugucccugggggccgagaacagcgucgccuacuccaacaacagcaucgccauccccaccaacuucacgaucuccgugaccaccgagauccugcccgugagcaugaccaagacgagcgucgacugcaccauguacaucugcggcgacuccaccgagugcagcaaccuccugcugcaguacggguccuucugcacccagcucaaccgcgcgcugacgggcaucgccguggagcaggacaagaacacccaggagguguucgcccaggucaagcagaucuacaagacgcccccgaucaaggacuucgggggcuucaacuucagccagauccugcccgaccccuccaagcccagcaagcgguccuucaucgaggaccuccuguucaacaaggugacccuggccgacgccggcuucaucaagcaguacggggacugccucggcgacaucgcggcccgcgaccugaucugcgcccagaaguucaacgggcugaccgugcucccgccccugcugaccgacgagaugaucgcccaguacaccagcgcccuccuggcgggcaccaucacguccggguggaccuucggcgccggcgccgcccugcagauccccuucgcgaugcagauggccuaccgguucaacgggaucggcgucacccagaacgugcucuacgagaaccagaagcugaucgccaaccaguucaacagcgccaucgggaagauccaggacucccugagcuccaccgccagcgcgcucggcaagcugcaggacguggucaaccagaacgcccaggcccugaacacgcucgugaagcagcuguccagcaacuucggggccaucuccagcgugcugaacgacauccucucccgccuggacaaggucgaggccgaggugcagaucgaccggcugaucaccggccgccuccagagccugcagaccuacgugacccagcagcugauccgggcggccgagauccgcgccagcgccaaccucgccgcgaccaagauguccgagugcguccugggccagagcaagcggguggacuucugcgggaagggcuaccaccugauguccuucccccagagcgccccgcacgggguggucuuccuccacgugacguacguccccgcccaggagaagaacuucaccaccgcccccgcgaucugccacgacggcaaggcccacuucccccgcgaggggguguucguguccaacggcacccacugguucgucacgcagcggaacuucuacgagccgcagaucaucaccaccgacaacaccuucgugagcggcaacugcgacguggucaucgggaucgugaacaacacgguguacgacccccugcagcccgagcuggacuccuucaaggaggagcucgacaaguacuucaagaaccacaccagccccgacgucgaccugggcgacaucuccgggaucaacgccagcguggugaacauccagaaggagaucgaccgccugaacgaggucgccaagaaccucaacgagucccugaucgaccugcaggagcucggcaaguacgagcaguacaucaaguggccgugguacaucuggcugggcuucaucgccgggcugaucgcgaucgugauggugaccaucaugcucugcugcaugaccagcugcugcuccugccugaagggcugcugcagcugcggguccugcugcaaguucgacgaggacgacagcgagcccguccugaagggcgugaagcuccacuacacgugauaauaggcuggagccucgguggccuagcuucuugccccuugggccuccccccagccccuccuccccuuccugcacccguacccccguggucuuugaauaaagucugagugggcggcaaaaaaaaaaaaaaaaaaaaaaaaaaaaaaaaaaaaaaaaaaaaaaaaaaaaaaaaaaaaaaaaaaaaaaaaaaaaaaaaaaaaaaaaaaaaaaaaaaaaucuag

SEQ ID NO: 26513 - RNA, 4094 nt, Artificial Sequence
  SARS-CoV-2/Wuhan/WIV05/2019__EPI_ISL_402128 spike protein mRNA gc (1-1273)(H69del_V70del_D614G)
gggaaauaagagagaaaagaagaguaagaagaaauauaagaccccggcgccgccaccauguucguguuccugguccuccugccccuggugagcucccagugcgugaaccucaccacccgcacgcagcugccgcccgccuacaccaacagcuucacccggggcgucuacuaccccgacaagguguuccgcuccagcgugcugcacuccacccaggaccucuuccugcccuucuucagcaacgucacgugguuccacgccaucuccgggaccaacggcaccaagcgguucgacaacccggugcugcccuucaacgacgggguguacuucgcgagcaccgagaaguccaacaucauccgcggcuggaucuucgggacgacccucgacagcaagacccagucccugcugaucgucaacaacgccaccaacguggugaucaaggucugcgaguuccaguucugcaacgaccccuuccucggcguguacuaccacaagaacaacaagagcuggauggaguccgaguuccggguguacagcuccgccaacaacugcacguucgaguacgucagccagcccuuccugauggaccuggagggcaagcaggggaacuucaagaaccuccgcgaguucguguucaagaacaucgacggcuacuucaagaucuacuccaagcacaccccgaucaaccuggugcgggaccugccccagggguucagcgcccucgagccccuggucgaccugcccaucggcaucaacaucacccgcuuccagacccuccuggcccugcaccgguccuaccucacgccgggggacagcagcuccggcuggaccgcgggcgccgccgccuacuacgugggguaccugcagccccgcaccuuccugcucaaguacaacgagaacggcaccaucacggacgcgguggacugcgcccuggacccccugagcgagaccaagugcacccucaaguccuucaccgucgagaaggggaucuaccagacgagcaacuuccgggugcagcccaccgaguccaucgugcgcuucccgaacaucaccaaccugugccccuucggcgaggucuucaacgccacccgguucgccagcguguacgccuggaaccgcaagcggaucuccaacugcgucgcggacuacagcgugcuguacaacuccgccagcuucuccacguucaagugcuacggcgugagccccaccaagcucaacgaccugugcuucaccaacgucuacgccgacuccuucgugauccgcggggacgaggugcggcagaucgcccccggccagaccgggaagaucgccgacuacaacuacaagcugccggacgacuucacgggcugcgucaucgcguggaacagcaacaaccucgacuccaaggucgggggcaacuacaacuaccuguaccgccuguuccgcaagagcaaccucaagcccuucgagcgggacaucuccaccgagaucuaccaggccggcagcacccccugcaacgggguggagggcuucaacugcuacuucccccugcaguccuacggguuccagccgaccaacggcgugggguaccagcccuaccggguggugguccugagcuucgagcuccugcacgcccccgccacggugugcggccccaagaaguccaccaaccuggugaagaacaagugcgucaacuucaacuucaacggccucaccgggaccggcgugcugaccgagagcaacaagaaguuccugccguuccagcaguucgggcgcgacaucgccgacacgaccgacgcggugcgcgacccccagacccuggagauccucgacaucacccccugcagcuucggcggggucuccgugaucacgccgggcaccaacaccagcaaccagguggccguccuguaccagggcgugaacugcaccgaggugcccgucgccauccacgccgaccagcugacgcccaccuggcggguguacuccaccgggagcaacguguuccagacccgcgccggcugccucaucggggcggagcacgucaacaacuccuacgagugcgacauccccaucggcgccggcaucugcgccagcuaccagacgcagaccaacuccccgcggcgcgcccggagcguggcgucccagagcaucaucgccuacaccaugucccugggggccgagaacagcguggccuacuccaacaacagcaucgccauccccaccaacuucacgaucuccgucaccaccgagauccugcccgugagcaugaccaagacgagcguggacugcaccauguacaucugcggcgacuccaccgagugcagcaaccuccugcugcaguacggguccuucugcacccagcucaaccgcgcgcugacgggcaucgccgucgagcaggacaagaacacccaggagguguucgcccaggugaagcagaucuacaagacgcccccgaucaaggacuucgggggcuucaacuucagccagauccugcccgaccccuccaagcccagcaagcgguccuucaucgaggaccuccuguucaacaaggucacccuggccgacgccggcuucaucaagcaguacggggacugccucggcgacaucgcggcccgcgaccugaucugcgcccagaaguucaacgggcugaccgugcucccgccccugcugaccgacgagaugaucgcccaguacaccagcgcccuccuggcgggcaccaucacguccggguggaccuucggcgccggcgccgcccugcagauccccuucgcgaugcagauggccuaccgguucaacgggaucggcgugacccagaacguccucuacgagaaccagaagcugaucgccaaccaguucaacagcgccaucgggaagauccaggacucccugagcuccaccgccagcgcgcucggcaagcugcaggacguggugaaccagaacgcccaggcccugaacacgcucgucaagcagcuguccagcaacuucggggccaucuccagcgugcugaacgacauccucucccgccuggacaagguggaggccgagguccagaucgaccggcugaucaccggccgccuccagagccugcagaccuacgugacccagcagcugauccgggcggccgagauccgcgccagcgccaaccucgccgcgaccaagauguccgagugcgugcugggccagagcaagcgggucgacuucugcgggaagggcuaccaccugauguccuucccccagagcgccccgcacggggugguguuccuccacgucacguacgugcccgcccaggagaagaacuucaccaccgcccccgcgaucugccacgacggcaaggcccacuucccccgcgagggggucuucguguccaacggcacccacugguucgugacgcagcggaacuucuacgagccgcagaucaucaccaccgacaacaccuucgucagcggcaacugcgacguggugaucgggaucgucaacaacacgguguacgacccccugcagcccgagcuggacuccuucaaggaggagcucgacaaguacuucaagaaccacaccagccccgacguggaccugggcgacaucuccgggaucaacgccagcgucgugaacauccagaaggagaucgaccgccugaacgagguggccaagaaccucaacgagucccugaucgaccugcaggagcucggcaaguacgagcaguacaucaaguggccgugguacaucuggcugggcuucaucgccgggcugaucgcgaucgucauggugaccaucaugcucugcugcaugaccagcugcugcuccugccugaagggcugcugcagcugcggguccugcugcaaguucgacgaggacgacagcgagcccgugcugaagggcgucaagcuccacuacacgugauaauaggcuggagccucgguggccuagcuucuugccccuugggccuccccccagccccuccuccccuuccugcacccguacccccguggucuuugaauaaagucugagugggcggcaaaaaaaaaaaaaaaaaaaaaaaaaaaaaaaaaaaaaaaaaaaaaaaaaaaaaaaaaaaaaaaaaaaaaaaaaaaaaaaaaaaaaaaaaaaaaaaaaaaaucuag

SEQ ID NO: 26514 - RNA, 4100 nt, Artificial Sequence
  SARS-CoV-2/Wuhan/WIV05/2019__EPI_ISL_402128 spike protein mRNA gc (1-1273)(Y453F_D614G)
gggaaauaagagagaaaagaagaguaagaagaaauauaagaccccggcgccgccaccauguucguguuccugguccuccugccccuggugagcucccagugcgugaaccucaccacccgcacgcagcugccgcccgccuacaccaacagcuucacccggggcgucuacuaccccgacaagguguuccgcuccagcgugcugcacuccacccaggaccucuuccugcccuucuucagcaacgucacgugguuccacgccauccacguguccgggaccaacggcaccaagcgguucgacaacccggugcugcccuucaacgacggggucuacuucgcgagcaccgagaaguccaacaucauccgcggcuggaucuucgggacgacccucgacagcaagacccagucccugcugaucgugaacaacgccaccaacguggucaucaaggugugcgaguuccaguucugcaacgaccccuuccucggcguguacuaccacaagaacaacaagagcuggauggaguccgaguuccgggucuacagcuccgccaacaacugcacguucgaguacgugagccagcccuuccugauggaccuggagggcaagcaggggaacuucaagaaccuccgcgaguucguguucaagaacaucgacggcuacuucaagaucuacuccaagcacaccccgaucaaccugguccgggaccugccccagggguucagcgcccucgagccccugguggaccugcccaucggcaucaacaucacccgcuuccagacccuccuggcccugcaccgguccuaccucacgccgggggacagcagcuccggcuggaccgcgggcgccgccgccuacuacgugggguaccugcagccccgcaccuuccugcucaaguacaacgagaacggcaccaucacggacgcggucgacugcgcccuggacccccugagcgagaccaagugcacccucaaguccuucaccguggagaaggggaucuaccagacgagcaacuuccgggugcagcccaccgaguccaucguccgcuucccgaacaucaccaaccugugccccuucggcgagguguucaacgccacccgguucgccagcgucuacgccuggaaccgcaagcggaucuccaacugcguggcggacuacagcgugcuguacaacuccgccagcuucuccacguucaagugcuacggcgucagccccaccaagcucaacgaccugugcuucaccaacguguacgccgacuccuucgugauccgcggggacgagguccggcagaucgcccccggccagaccgggaagaucgccgacuacaacuacaagcugccggacgacuucacgggcugcgugaucgcguggaacagcaacaaccucgacuccaaggucgggggcaacuacaacuaccuguuccgccuguuccgcaagagcaaccucaagcccuucgagcgggacaucuccaccgagaucuaccaggccggcagcacccccugcaacgggguggagggcuucaacugcuacuucccccugcaguccuacggguuccagccgaccaacggcgugggguaccagcccuaccggguggucgugcugagcuucgagcuccugcacgcccccgccacggugugcggccccaagaaguccaccaaccuggucaagaacaagugcgugaacuucaacuucaacggccucaccgggaccggcgugcugaccgagagcaacaagaaguuccugccguuccagcaguucgggcgcgacaucgccgacacgaccgacgcgguccgcgacccccagacccuggagauccucgacaucacccccugcagcuucggcgggguguccgugaucacgccgggcaccaacaccagcaaccaggucgccgugcuguaccagggcgugaacugcaccgagguccccguggccauccacgccgaccagcugacgcccaccuggcggguguacuccaccgggagcaacgucuuccagacccgcgccggcugccucaucggggcggagcacgugaacaacuccuacgagugcgacauccccaucggcgccggcaucugcgccagcuaccagacgcagaccaacuccccgcggcgcgcccggagcguggcgucccagagcaucaucgccuacaccaugucccugggggccgagaacagcgucgccuacuccaacaacagcaucgccauccccaccaacuucacgaucuccgugaccaccgagauccugcccgugagcaugaccaagacgagcgucgacugcaccauguacaucugcggcgacuccaccgagugcagcaaccuccugcugcaguacggguccuucugcacccagcucaaccgcgcgcugacgggcaucgccguggagcaggacaagaacacccaggagguguucgcccaggucaagcagaucuacaagacgcccccgaucaaggacuucgggggcuucaacuucagccagauccugcccgaccccuccaagcccagcaagcgguccuucaucgaggaccuccuguucaacaaggugacccuggccgacgccggcuucaucaagcaguacggggacugccucggcgacaucgcggcccgcgaccugaucugcgcccagaaguucaacgggcugaccgugcucccgccccugcugaccgacgagaugaucgcccaguacaccagcgcccuccuggcgggcaccaucacguccggguggaccuucggcgccggcgccgcccugcagauccccuucgcgaugcagauggccuaccgguucaacgggaucggcgucacccagaacgugcucuacgagaaccagaagcugaucgccaaccaguucaacagcgccaucgggaagauccaggacucccugagcuccaccgccagcgcgcucggcaagcugcaggacguggucaaccagaacgcccaggcccugaacacgcucgugaagcagcuguccagcaacuucggggccaucuccagcgugcugaacgacauccucucccgccuggacaaggucgaggccgaggugcagaucgaccggcugaucaccggccgccuccagagccugcagaccuacgugacccagcagcugauccgggcggccgagauccgcgccagcgccaaccucgccgcgaccaagauguccgagugcguccugggccagagcaagcggguggacuucugcgggaagggcuaccaccugauguccuucccccagagcgccccgcacgggguggucuuccuccacgugacguacguccccgcccaggagaagaacuucaccaccgcccccgcgaucugccacgacggcaaggcccacuucccccgcgaggggguguucguguccaacggcacccacugguucgucacgcagcggaacuucuacgagccgcagaucaucaccaccgacaacaccuucgugagcggcaacugcgacguggucaucgggaucgugaacaacacgguguacgacccccugcagcccgagcuggacuccuucaaggaggagcucgacaaguacuucaagaaccacaccagccccgacgucgaccugggcgacaucuccgggaucaacgccagcguggugaacauccagaaggagaucgaccgccugaacgaggucgccaagaaccucaacgagucccugaucgaccugcaggagcucggcaaguacgagcaguacaucaaguggccgugguacaucuggcugggcuucaucgccgggcugaucgcgaucgugauggugaccaucaugcucugcugcaugaccagcugcugcuccugccugaagggcugcugcagcugcggguccugcugcaaguucgacgaggacgacagcgagcccguccugaagggcgugaagcuccacuacacgugauaauaggcuggagccucgguggccuagcuucuugccccuugggccuccccccagccccuccuccccuuccugcacccguacccccguggucuuugaauaaagucugagugggcggcaaaaaaaaaaaaaaaaaaaaaaaaaaaaaaaaaaaaaaaaaaaaaaaaaaaaaaaaaaaaaaaaaaaaaaaaaaaaaaaaaaaaaaaaaaaaaaaaaaaaucuag

SEQ ID NO: 26515 - RNA, 4100 nt, Artificial Sequence
  SARS-CoV-2/Wuhan/WIV05/2019__EPI_ISL_402128 spike protein mRNA gc (1-1273)(D614G_I692V)
gggaaauaagagagaaaagaagaguaagaagaaauauaagaccccggcgccgccaccauguucguguuccugguccuccugccccuggugagcucccagugcgugaaccucaccacccgcacgcagcugccgcccgccuacaccaacagcuucacccggggcgucuacuaccccgacaagguguuccgcuccagcgugcugcacuccacccaggaccucuuccugcccuucuucagcaacgucacgugguuccacgccauccacguguccgggaccaacggcaccaagcgguucgacaacccggugcugcccuucaacgacggggucuacuucgcgagcaccgagaaguccaacaucauccgcggcuggaucuucgggacgacccucgacagcaagacccagucccugcugaucgugaacaacgccaccaacguggucaucaaggugugcgaguuccaguucugcaacgaccccuuccucggcguguacuaccacaagaacaacaagagcuggauggaguccgaguuccgggucuacagcuccgccaacaacugcacguucgaguacgugagccagcccuuccugauggaccuggagggcaagcaggggaacuucaagaaccuccgcgaguucguguucaagaacaucgacggcuacuucaagaucuacuccaagcacaccccgaucaaccugguccgggaccugccccagggguucagcgcccucgagccccugguggaccugcccaucggcaucaacaucacccgcuuccagacccuccuggcccugcaccgguccuaccucacgccgggggacagcagcuccggcuggaccgcgggcgccgccgccuacuacgugggguaccugcagccccgcaccuuccugcucaaguacaacgagaacggcaccaucacggacgcggucgacugcgcccuggacccccugagcgagaccaagugcacccucaaguccuucaccguggagaaggggaucuaccagacgagcaacuuccgggugcagcccaccgaguccaucguccgcuucccgaacaucaccaaccugugccccuucggcgagguguucaacgccacccgguucgccagcgucuacgccuggaaccgcaagcggaucuccaacugcguggcggacuacagcgugcuguacaacuccgccagcuucuccacguucaagugcuacggcgucagccccaccaagcucaacgaccugugcuucaccaacguguacgccgacuccuucgugauccgcggggacgagguccggcagaucgcccccggccagaccgggaagaucgccgacuacaacuacaagcugccggacgacuucacgggcugcgugaucgcguggaacagcaacaaccucgacuccaaggucgggggcaacuacaacuaccuguaccgccuguuccgcaagagcaaccucaagcccuucgagcgggacaucuccaccgagaucuaccaggccggcagcacccccugcaacgggguggagggcuucaacugcuacuucccccugcaguccuacggguuccagccgaccaacggcgugggguaccagcccuaccggguggucgugcugagcuucgagcuccugcacgcccccgccacggugugcggccccaagaaguccaccaaccuggucaagaacaagugcgugaacuucaacuucaacggccucaccgggaccggcgugcugaccgagagcaacaagaaguuccugccguuccagcaguucgggcgcgacaucgccgacacgaccgacgcgguccgcgacccccagacccuggagauccucgacaucacccccugcagcuucggcgggguguccgugaucacgccgggcaccaacaccagcaaccaggucgccgugcuguaccagggcgugaacugcaccgagguccccguggccauccacgccgaccagcugacgcccaccuggcggguguacuccaccgggagcaacgucuuccagacccgcgccggcugccucaucggggcggagcacgugaacaacuccuacgagugcgacauccccaucggcgccggcaucugcgccagcuaccagacgcagaccaacuccccgcggcgcgcccggagcguggcgucccagagcgucaucgccuacaccaugucccugggggccgagaacagcguggccuacuccaacaacagcaucgccauccccaccaacuucacgaucuccgugaccaccgagauccugcccgucagcaugaccaagacgagcguggacugcaccauguacaucugcggcgacuccaccgagugcagcaaccuccugcugcaguacggguccuucugcacccagcucaaccgcgcgcugacgggcaucgccguggagcaggacaagaacacccaggaggucuucgcccaggugaagcagaucuacaagacgcccccgaucaaggacuucgggggcuucaacuucagccagauccugcccgaccccuccaagcccagcaagcgguccuucaucgaggaccuccuguucaacaaggugacccuggccgacgccggcuucaucaagcaguacggggacugccucggcgacaucgcggcccgcgaccugaucugcgcccagaaguucaacgggcugaccguccucccgccccugcugaccgacgagaugaucgcccaguacaccagcgcccuccuggcgggcaccaucacguccggguggaccuucggcgccggcgccgcccugcagauccccuucgcgaugcagauggccuaccgguucaacgggaucggcgugacccagaacgugcucuacgagaaccagaagcugaucgccaaccaguucaacagcgccaucgggaagauccaggacucccugagcuccaccgccagcgcgcucggcaagcugcaggacgucgugaaccagaacgcccaggcccugaacacgcucgugaagcagcuguccagcaacuucggggccaucuccagcguccugaacgacauccucucccgccuggacaagguggaggccgaggugcagaucgaccggcugaucaccggccgccuccagagccugcagaccuacgucacccagcagcugauccgggcggccgagauccgcgccagcgccaaccucgccgcgaccaagauguccgagugcgugcugggccagagcaagcggguggacuucugcgggaagggcuaccaccugauguccuucccccagagcgccccgcacggggucguguuccuccacgucacguacgugcccgcccaggagaagaacuucaccaccgcccccgcgaucugccacgacggcaaggcccacuucccccgcgaggggguguucgucuccaacggcacccacugguucgugacgcagcggaacuucuacgagccgcagaucaucaccaccgacaacaccuucgugagcggcaacugcgacgucgugaucgggaucgugaacaacacggucuacgacccccugcagcccgagcuggacuccuucaaggaggagcucgacaaguacuucaagaaccacaccagccccgacguggaccugggcgacaucuccgggaucaacgccagcguggucaacauccagaaggagaucgaccgccugaacgagguggccaagaaccucaacgagucccugaucgaccugcaggagcucggcaaguacgagcaguacaucaaguggccgugguacaucuggcugggcuucaucgccgggcugaucgcgaucgugauggucaccaucaugcucugcugcaugaccagcugcugcuccugccugaagggcugcugcagcugcggguccugcugcaaguucgacgaggacgacagcgagcccgugcugaagggcgugaagcuccacuacacgugauaauaggcuggagccucgguggccuagcuucuugccccuugggccuccccccagccccuccuccccuuccugcacccguacccccguggucuuugaauaaagucugagugggcggcaaaaaaaaaaaaaaaaaaaaaaaaaaaaaaaaaaaaaaaaaaaaaaaaaaaaaaaaaaaaaaaaaaaaaaaaaaaaaaaaaaaaaaaaaaaaaaaaaaaaucuag

SEQ ID NO: 26516 - RNA, 4100 nt, Artificial Sequence
  SARS-CoV-2/Wuhan/WIV05/2019__EPI_ISL_402128 spike protein mRNA gc (1-1273)(D614G_M1229I)
gggaaauaagagagaaaagaagaguaagaagaaauauaagaccccggcgccgccaccauguucguguuccugguccuccugccccuggugagcucccagugcgugaaccucaccacccgcacgcagcugccgcccgccuacaccaacagcuucacccggggcgucuacuaccccgacaagguguuccgcuccagcgugcugcacuccacccaggaccucuuccugcccuucuucagcaacgucacgugguuccacgccauccacguguccgggaccaacggcaccaagcgguucgacaacccggugcugcccuucaacgacggggucuacuucgcgagcaccgagaaguccaacaucauccgcggcuggaucuucgggacgacccucgacagcaagacccagucccugcugaucgugaacaacgccaccaacguggucaucaaggugugcgaguuccaguucugcaacgaccccuuccucggcguguacuaccacaagaacaacaagagcuggauggaguccgaguuccgggucuacagcuccgccaacaacugcacguucgaguacgugagccagcccuuccugauggaccuggagggcaagcaggggaacuucaagaaccuccgcgaguucguguucaagaacaucgacggcuacuucaagaucuacuccaagcacaccccgaucaaccugguccgggaccugccccagggguucagcgcccucgagccccugguggaccugcccaucggcaucaacaucacccgcuuccagacccuccuggcccugcaccgguccuaccucacgccgggggacagcagcuccggcuggaccgcgggcgccgccgccuacuacgugggguaccugcagccccgcaccuuccugcucaaguacaacgagaacggcaccaucacggacgcggucgacugcgcccuggacccccugagcgagaccaagugcacccucaaguccuucaccguggagaaggggaucuaccagacgagcaacuuccgggugcagcccaccgaguccaucguccgcuucccgaacaucaccaaccugugccccuucggcgagguguucaacgccacccgguucgccagcgucuacgccuggaaccgcaagcggaucuccaacugcguggcggacuacagcgugcuguacaacuccgccagcuucuccacguucaagugcuacggcgucagccccaccaagcucaacgaccugugcuucaccaacguguacgccgacuccuucgugauccgcggggacgagguccggcagaucgcccccggccagaccgggaagaucgccgacuacaacuacaagcugccggacgacuucacgggcugcgugaucgcguggaacagcaacaaccucgacuccaaggucgggggcaacuacaacuaccuguaccgccuguuccgcaagagcaaccucaagcccuucgagcgggacaucuccaccgagaucuaccaggccggcagcacccccugcaacgggguggagggcuucaacugcuacuucccccugcaguccuacggguuccagccgaccaacggcgugggguaccagcccuaccggguggucgugcugagcuucgagcuccugcacgcccccgccacggugugcggccccaagaaguccaccaaccuggucaagaacaagugcgugaacuucaacuucaacggccucaccgggaccggcgugcugaccgagagcaacaagaaguuccugccguuccagcaguucgggcgcgacaucgccgacacgaccgacgcgguccgcgacccccagacccuggagauccucgacaucacccccugcagcuucggcgggguguccgugaucacgccgggcaccaacaccagcaaccaggucgccgugcuguaccagggcgugaacugcaccgagguccccguggccauccacgccgaccagcugacgcccaccuggcggguguacuccaccgggagcaacgucuuccagacccgcgccggcugccucaucggggcggagcacgugaacaacuccuacgagugcgacauccccaucggcgccggcaucugcgccagcuaccagacgcagaccaacuccccgcggcgcgcccggagcguggcgucccagagcaucaucgccuacaccaugucccugggggccgagaacagcgucgccuacuccaacaacagcaucgccauccccaccaacuucacgaucuccgugaccaccgagauccugcccgugagcaugaccaagacgagcgucgacugcaccauguacaucugcggcgacuccaccgagugcagcaaccuccugcugcaguacggguccuucugcacccagcucaaccgcgcgcugacgggcaucgccguggagcaggacaagaacacccaggagguguucgcccaggucaagcagaucuacaagacgcccccgaucaaggacuucgggggcuucaacuucagccagauccugcccgaccccuccaagcccagcaagcgguccuucaucgaggaccuccuguucaacaaggugacccuggccgacgccggcuucaucaagcaguacggggacugccucggcgacaucgcggcccgcgaccugaucugcgcccagaaguucaacgggcugaccgugcucccgccccugcugaccgacgagaugaucgcccaguacaccagcgcccuccuggcgggcaccaucacguccggguggaccuucggcgccggcgccgcccugcagauccccuucgcgaugcagauggccuaccgguucaacgggaucggcgucacccagaacgugcucuacgagaaccagaagcugaucgccaaccaguucaacagcgccaucgggaagauccaggacucccugagcuccaccgccagcgcgcucggcaagcugcaggacguggucaaccagaacgcccaggcccugaacacgcucgugaagcagcuguccagcaacuucggggccaucuccagcgugcugaacgacauccucucccgccuggacaaggucgaggccgaggugcagaucgaccggcugaucaccggccgccuccagagccugcagaccuacgugacccagcagcugauccgggcggccgagauccgcgccagcgccaaccucgccgcgaccaagauguccgagugcguccugggccagagcaagcggguggacuucugcgggaagggcuaccaccugauguccuucccccagagcgccccgcacgggguggucuuccuccacgugacguacguccccgcccaggagaagaacuucaccaccgcccccgcgaucugccacgacggcaaggcccacuucccccgcgaggggguguucguguccaacggcacccacugguucgucacgcagcggaacuucuacgagccgcagaucaucaccaccgacaacaccuucgugagcggcaacugcgacguggucaucgggaucgugaacaacacgguguacgacccccugcagcccgagcuggacuccuucaaggaggagcucgacaaguacuucaagaaccacaccagccccgacgucgaccugggcgacaucuccgggaucaacgccagcguggugaacauccagaaggagaucgaccgccugaacgaggucgccaagaaccucaacgagucccugaucgaccugcaggagcucggcaaguacgagcaguacaucaaguggccgugguacaucuggcugggcuucaucgccgggcugaucgcgaucgugaucgugaccaucaugcucugcugcaugaccagcugcugcuccugccugaagggcugcugcagcugcggguccugcugcaaguucgacgaggacgacagcgagcccguccugaagggcgugaagcuccacuacacgugauaauaggcuggagccucgguggccuagcuucuugccccuugggccuccccccagccccuccuccccuuccugcacccguacccccguggucuuugaauaaagucugagugggcggcaaaaaaaaaaaaaaaaaaaaaaaaaaaaaaaaaaaaaaaaaaaaaaaaaaaaaaaaaaaaaaaaaaaaaaaaaaaaaaaaaaaaaaaaaaaaaaaaaaaaucuag

SEQ ID NO: 26517 - RNA, 4094 nt, Artificial Sequence
  SARS-CoV-2/Wuhan/WIV05/2019__EPI_ISL_402128 spike protein mRNA gc (1-1273)(H69del_V70del_A222V_Y453F_S477N_D614G_I692V)
gggaaauaagagagaaaagaagaguaagaagaaauauaagaccccggcgccgccaccauguucguguuccugguccuccugccccuggugagcucccagugcgugaaccucaccacccgcacgcagcugccgcccgccuacaccaacagcuucacccggggcgucuacuaccccgacaagguguuccgcuccagcgugcugcacuccacccaggaccucuuccugcccuucuucagcaacgucacgugguuccacgccaucuccgggaccaacggcaccaagcgguucgacaacccggugcugcccuucaacgacgggguguacuucgcgagcaccgagaaguccaacaucauccgcggcuggaucuucgggacgacccucgacagcaagacccagucccugcugaucgucaacaacgccaccaacguggugaucaaggucugcgaguuccaguucugcaacgaccccuuccucggcguguacuaccacaagaacaacaagagcuggauggaguccgaguuccggguguacagcuccgccaacaacugcacguucgaguacgucagccagcccuuccugauggaccuggagggcaagcaggggaacuucaagaaccuccgcgaguucguguucaagaacaucgacggcuacuucaagaucuacuccaagcacaccccgaucaaccuggugcgggaccugccccagggguucagcguccucgagccccugguggaccugcccaucggcaucaacaucacccgcuuccagacccuccuggcccugcaccgguccuaccucacgccgggggacagcagcuccggcuggaccgccggcgcggccgccuacuacgugggguaccugcagccccgcaccuuccugcucaaguacaacgagaacggcaccaucacggacgccgucgacugcgcgcuggacccccugagcgagaccaagugcacccucaaguccuucaccguggagaaggggaucuaccagacgagcaacuuccgggugcagcccaccgaguccaucguccgcuucccgaacaucaccaaccugugccccuucggcgagguguucaacgccacccgguucgccagcgucuacgccuggaaccgcaagcggaucuccaacugcguggccgacuacagcgugcuguacaacuccgcgagcuucuccacguucaagugcuacggcgucagccccaccaagcucaacgaccugugcuucaccaacguguacgccgacuccuucgugauccgcggggacgagguccggcagaucgcccccggccagaccgggaagaucgccgacuacaacuacaagcugccggacgacuucacgggcugcgugaucgccuggaacagcaacaaccucgacuccaaggucgggggcaacuacaacuaccuguuccgccuguuccgcaagagcaaccucaagcccuucgagcgggacaucuccaccgagaucuaccaggcgggcaacacccccugcaacgggguggagggcuucaacugcuacuucccccugcagagcuacggguuccagccgaccaacggcgugggguaccagcccuaccggguggucgugcuguccuucgagcuccugcacgcccccgccacggugugcggccccaagaaguccaccaaccuggucaagaacaagugcgugaacuucaacuucaacggccucaccgggaccggcgugcugaccgagagcaacaagaaguuccugccguuccagcaguucgggcgcgacaucgccgacacgaccgacgccguccgcgacccccagacccuggagauccucgacaucacccccugcagcuucggcggggugagcgugaucacgccgggcaccaacaccuccaaccaggucgcggugcuguaccagggcgugaacugcaccgagguccccguggccauccacgccgaccagcugacgcccaccuggcggguguacagcaccggguccaacgucuuccagacccgcgccggcugccucaucggggccgagcacgugaacaacagcuacgagugcgacauccccaucggcgcgggcaucugcgccuccuaccagacgcagaccaacagcccgcggcgcgcccgguccguggccagccaguccgucaucgcguacaccaugagccugggggccgagaacuccguggccuacagcaacaacuccaucgccauccccaccaacuucacgaucagcgugaccaccgagauccugcccgucuccaugaccaagacgagcguggacugcaccauguacaucugcggcgacagcaccgagugcuccaaccuccugcugcaguacgggagcuucugcacccagcucaaccgcgcccugacgggcaucgcgguggagcaggacaagaacacccaggaggucuucgcccaggugaagcagaucuacaagacgcccccgaucaaggacuucgggggcuucaacuucucccagauccugcccgaccccagcaagcccuccaagcggagcuucaucgaggaccuccuguucaacaaggugacccuggccgacgccggcuucaucaagcaguacggggacugccucggcgacaucgccgcgcgcgaccugaucugcgcccagaaguucaacgggcugaccguccucccgccccugcugaccgacgagaugaucgcccaguacaccuccgcccuccuggccggcaccaucacgagcggguggaccuucggcgcgggcgccgcccugcagauccccuucgccaugcagauggcguaccgguucaacgggaucggcgugacccagaacgugcucuacgagaaccagaagcugaucgccaaccaguucaacuccgccaucgggaagauccaggacagccuguccagcaccgccuccgcccucggcaagcugcaggacgucgugaaccagaacgcgcaggcccugaacacgcucgugaagcagcugagcuccaacuucggggccaucagcuccguccugaacgacauccucagccgccuggacaagguggaggccgaggugcagaucgaccggcugaucaccggccgccuccagucccugcagaccuacgucacccagcagcugauccgggccgcggagauccgcgccagcgccaaccucgccgccaccaagaugagcgagugcgugcugggccaguccaagcggguggacuucugcgggaagggcuaccaccugaugagcuucccccaguccgcgccgcacggggucguguuccuccacgucacguacgugcccgcccaggagaagaacuucaccaccgcccccgccaucugccacgacggcaaggcgcacuucccccgcgaggggguguucgucagcaacggcacccacugguucgugacgcagcggaacuucuacgagccgcagaucaucaccaccgacaacaccuucguguccggcaacugcgacgucgugaucgggaucgugaacaacacggucuacgacccccugcagcccgagcuggacagcuucaaggaggagcucgacaaguacuucaagaaccacaccucccccgacguggaccugggcgacaucagcgggaucaacgccuccguggucaacauccagaaggagaucgaccgccugaacgagguggccaagaaccucaacgagagccugaucgaccugcaggagcucggcaaguacgagcaguacaucaaguggccgugguacaucuggcugggcuucaucgccgggcugaucgccaucgugauggucaccaucaugcucugcugcaugaccuccugcugcagcugccugaagggcugcugcuccugcgggagcugcugcaaguucgacgaggacgacuccgagcccgugcugaagggcgugaagcuccacuacacgugauaauaggcuggagccucgguggccuagcuucuugccccuugggccuccccccagccccuccuccccuuccugcacccguacccccguggucuuugaauaaagucugagugggcggcaaaaaaaaaaaaaaaaaaaaaaaaaaaaaaaaaaaaaaaaaaaaaaaaaaaaaaaaaaaaaaaaaaaaaaaaaaaaaaaaaaaaaaaaaaaaaaaaaaaaucuag

SEQ ID NO: 26518 - RNA, 4094 nt, Artificial Sequence
  SARS-CoV-2/Wuhan/WIV05/2019__EPI_ISL_402128 spike protein mRNA gc (1-1273)(H69del_V70del_Y453F_D614G_I692V_M1229I)
gggaaauaagagagaaaagaagaguaagaagaaauauaagaccccggcgccgccaccauguucguguuccugguccuccugccccuggugagcucccagugcgugaaccucaccacccgcacgcagcugccgcccgccuacaccaacagcuucacccggggcgucuacuaccccgacaagguguuccgcuccagcgugcugcacuccacccaggaccucuuccugcccuucuucagcaacgucacgugguuccacgccaucuccgggaccaacggcaccaagcgguucgacaacccggugcugcccuucaacgacgggguguacuucgcgagcaccgagaaguccaacaucauccgcggcuggaucuucgggacgacccucgacagcaagacccagucccugcugaucgucaacaacgccaccaacguggugaucaaggucugcgaguuccaguucugcaacgaccccuuccucggcguguacuaccacaagaacaacaagagcuggauggaguccgaguuccggguguacagcuccgccaacaacugcacguucgaguacgucagccagcccuuccugauggaccuggagggcaagcaggggaacuucaagaaccuccgcgaguucguguucaagaacaucgacggcuacuucaagaucuacuccaagcacaccccgaucaaccuggugcgggaccugccccagggguucagcgcccucgagccccuggucgaccugcccaucggcaucaacaucacccgcuuccagacccuccuggcccugcaccgguccuaccucacgccgggggacagcagcuccggcuggaccgcgggcgccgccgccuacuacgugggguaccugcagccccgcaccuuccugcucaaguacaacgagaacggcaccaucacggacgcgguggacugcgcccuggacccccugagcgagaccaagugcacccucaaguccuucaccgucgagaaggggaucuaccagacgagcaacuuccgggugcagcccaccgaguccaucgugcgcuucccgaacaucaccaaccugugccccuucggcgaggucuucaacgccacccgguucgccagcguguacgccuggaaccgcaagcggaucuccaacugcgucgcggacuacagcgugcuguacaacuccgccagcuucuccacguucaagugcuacggcgugagccccaccaagcucaacgaccugugcuucaccaacgucuacgccgacuccuucgugauccgcggggacgaggugcggcagaucgcccccggccagaccgggaagaucgccgacuacaacuacaagcugccggacgacuucacgggcugcgucaucgcguggaacagcaacaaccucgacuccaaggucgggggcaacuacaacuaccuguuccgccuguuccgcaagagcaaccucaagcccuucgagcgggacaucuccaccgagaucuaccaggccggcagcacccccugcaacgggguggagggcuucaacugcuacuucccccugcaguccuacggguuccagccgaccaacggcgugggguaccagcccuaccggguggugguccugagcuucgagcuccugcacgcccccgccacggugugcggccccaagaaguccaccaaccuggugaagaacaagugcgucaacuucaacuucaacggccucaccgggaccggcgugcugaccgagagcaacaagaaguuccugccguuccagcaguucgggcgcgacaucgccgacacgaccgacgcggugcgcgacccccagacccuggagauccucgacaucacccccugcagcuucggcggggucuccgugaucacgccgggcaccaacaccagcaaccagguggccguccuguaccagggcgugaacugcaccgaggugcccgucgccauccacgccgaccagcugacgcccaccuggcggguguacuccaccgggagcaacguguuccagacccgcgccggcugccucaucggggcggagcacgucaacaacuccuacgagugcgacauccccaucggcgccggcaucugcgccagcuaccagacgcagaccaacuccccgcggcgcgcccggagcguggcgucccagagcgugaucgccuacaccaugucccugggggccgagaacagcgucgccuacuccaacaacagcaucgccauccccaccaacuucacgaucuccgugaccaccgagauccugcccgugagcaugaccaagacgagcgucgacugcaccauguacaucugcggcgacuccaccgagugcagcaaccuccugcugcaguacggguccuucugcacccagcucaaccgcgcgcugacgggcaucgccguggagcaggacaagaacacccaggagguguucgcccaggucaagcagaucuacaagacgcccccgaucaaggacuucgggggcuucaacuucagccagauccugcccgaccccuccaagcccagcaagcgguccuucaucgaggaccuccuguucaacaaggugacccuggccgacgccggcuucaucaagcaguacggggacugccucggcgacaucgcggcccgcgaccugaucugcgcccagaaguucaacgggcugaccgugcucccgccccugcugaccgacgagaugaucgcccaguacaccagcgcccuccuggcgggcaccaucacguccggguggaccuucggcgccggcgccgcccugcagauccccuucgcgaugcagauggccuaccgguucaacgggaucggcgucacccagaacgugcucuacgagaaccagaagcugaucgccaaccaguucaacagcgccaucgggaagauccaggacucccugagcuccaccgccagcgcgcucggcaagcugcaggacguggucaaccagaacgcccaggcccugaacacgcucgugaagcagcuguccagcaacuucggggccaucuccagcgugcugaacgacauccucucccgccuggacaaggucgaggccgaggugcagaucgaccggcugaucaccggccgccuccagagccugcagaccuacgugacccagcagcugauccgggcggccgagauccgcgccagcgccaaccucgccgcgaccaagauguccgagugcguccugggccagagcaagcggguggacuucugcgggaagggcuaccaccugauguccuucccccagagcgccccgcacgggguggucuuccuccacgugacguacguccccgcccaggagaagaacuucaccaccgcccccgcgaucugccacgacggcaaggcccacuucccccgcgaggggguguucguguccaacggcacccacugguucgucacgcagcggaacuucuacgagccgcagaucaucaccaccgacaacaccuucgugagcggcaacugcgacguggucaucgggaucgugaacaacacgguguacgacccccugcagcccgagcuggacuccuucaaggaggagcucgacaaguacuucaagaaccacaccagccccgacgucgaccugggcgacaucuccgggaucaacgccagcguggugaacauccagaaggagaucgaccgccugaacgaggucgccaagaaccucaacgagucccugaucgaccugcaggagcucggcaaguacgagcaguacaucaaguggccgugguacaucuggcugggcuucaucgccgggcugaucgcgaucgugaucgugaccaucaugcucugcugcaugaccagcugcugcuccugccugaagggcugcugcagcugcggguccugcugcaaguucgacgaggacgacagcgagcccguccugaagggcgugaagcuccacuacacgugauaauaggcuggagccucgguggccuagcuucuugccccuugggccuccccccagccccuccuccccuuccugcacccguacccccguggucuuugaauaaagucugagugggcggcaaaaaaaaaaaaaaaaaaaaaaaaaaaaaaaaaaaaaaaaaaaaaaaaaaaaaaaaaaaaaaaaaaaaaaaaaaaaaaaaaaaaaaaaaaaaaaaaaaaaucuag

SEQ ID NO: 26519 - RNA, 4091 nt, Artificial Sequence
  SARS-CoV-2/Wuhan/WIV05/2019__EPI_ISL_402128 spike protein mRNA gc (1-1273)(H69del_V70del_Y144del_N501Y_A570D_D614G_P681H_T716I_S982 A_D1118H)
gggaaauaagagagaaaagaagaguaagaagaaauauaagaccccggcgccgccaccauguucguguuccugguccuccugccccuggugagcucccagugcgugaaccucaccacccgcacgcagcugccgcccgccuacaccaacagcuucacccggggcgucuacuaccccgacaagguguuccgcuccagcgugcugcacuccacccaggaccucuuccugcccuucuucagcaacgucacgugguuccacgccaucuccgggaccaacggcaccaagcgguucgacaacccggugcugcccuucaacgacgggguguacuucgcgagcaccgagaaguccaacaucauccgcggcuggaucuucgggacgacccucgacagcaagacccagucccugcugaucgucaacaacgccaccaacguggugaucaaggucugcgaguuccaguucugcaacgaccccuuccucggcguguaccacaagaacaacaagagcuggauggaguccgaguuccggguguacagcuccgccaacaacugcacguucgaguacgucagccagcccuuccugauggaccuggagggcaagcaggggaacuucaagaaccuccgcgaguucguguucaagaacaucgacggcuacuucaagaucuacuccaagcacaccccgaucaaccuggugcgggaccugccccagggguucagcgcccucgagccccuggucgaccugcccaucggcaucaacaucacccgcuuccagacccuccuggcccugcaccgguccuaccucacgccgggggacagcagcuccggcuggaccgcgggcgccgccgccuacuacgugggguaccugcagccccgcaccuuccugcucaaguacaacgagaacggcaccaucacggacgcgguggacugcgcccuggacccccugagcgagaccaagugcacccucaaguccuucaccgucgagaaggggaucuaccagacgagcaacuuccgggugcagcccaccgaguccaucgugcgcuucccgaacaucaccaaccugugccccuucggcgaggucuucaacgccacccgguucgccagcguguacgccuggaaccgcaagcggaucuccaacugcgucgcggacuacagcgugcuguacaacuccgccagcuucuccacguucaagugcuacggcgugagccccaccaagcucaacgaccugugcuucaccaacgucuacgccgacuccuucgugauccgcggggacgaggugcggcagaucgcccccggccagaccgggaagaucgccgacuacaacuacaagcugccggacgacuucacgggcugcgucaucgcguggaacagcaacaaccucgacuccaaggucgggggcaacuacaacuaccuguaccgccuguuccgcaagagcaaccucaagcccuucgagcgggacaucuccaccgagaucuaccaggccggcagcacccccugcaacgggguggagggcuucaacugcuacuucccccugcaguccuacggguuccagccgaccuacggcgugggguaccagcccuaccggguggugguccugagcuucgagcuccugcacgcccccgccacggugugcggccccaagaaguccaccaaccuggugaagaacaagugcgucaacuucaacuucaacggccucaccgggaccggcgugcugaccgagagcaacaagaaguuccugccguuccagcaguucgggcgcgacaucgacgacacgaccgacgccgugcgcgacccccagacccuggagauccucgacaucacccccugcagcuucggcggggucuccgugaucacgccgggcaccaacaccagcaaccagguggcgguccuguaccagggcgugaacugcaccgaggugcccgucgccauccacgccgaccagcugacgcccaccuggcggguguacuccaccgggagcaacguguuccagacccgcgccggcugccucaucggggccgagcacgucaacaacuccuacgagugcgacauccccaucggcgcgggcaucugcgccagcuaccagacgcagaccaacucccaccggcgcgcccggagcguggccucccagagcaucaucgcguacaccaugucccugggggccgagaacagcguggccuacuccaacaacagcaucgccaucccgaucaacuucaccaucuccgucacgaccgagauccugcccgugagcaugaccaagaccagcguggacugcacgauguacaucugcggcgacuccaccgagugcagcaaccuccugcugcaguacggguccuucugcacccagcucaaccgcgcccugaccggcaucgcggucgagcaggacaagaacacgcaggagguguucgcccaggugaagcagaucuacaagaccccgcccaucaaggacuucgggggcuucaacuucagccagauccugcccgaccccuccaagcccagcaagcgguccuucaucgaggaccuccuguucaacaaggucacccuggccgacgccggcuucaucaagcaguacggggacugccucggcgacaucgccgcgcgcgaccugaucugcgcccagaaguucaacgggcugaccgugcugcccccgcuccugacggacgagaugaucgcccaguacaccagcgcccuccuggccggcaccaucaccuccggguggacguucggcgcgggcgccgcccugcagauccccuucgccaugcagauggcguaccgguucaacgggaucggcgugacccagaacguccucuacgagaaccagaagcugaucgccaaccaguucaacagcgccaucgggaagauccaggacucccugagcuccaccgccagcgcccucggcaagcugcaggacguggugaaccagaacgcgcaggcccugaacacccucgucaagcagcuguccagcaacuucggggccaucuccagcgugcugaacgacauccucgcccgccuggacaagguggaggccgagguccagaucgaccggcugaucacgggccgccuccagucccugcagaccuacgugacccagcagcugauccgggcggccgagauccgcgccagcgccaaccucgccgcgaccaagaugagcgagugcgugcugggccaguccaagcgggucgacuucugcgggaagggcuaccaccugaugagcuucccccaguccgcgccccacggggugguguuccuccacgucaccuacgugccggcccaggagaagaacuucacgaccgcccccgccaucugccacgacggcaaggcccacuucccccgcgagggggucuucgugagcaacggcacccacugguucgugacccagcggaacuucuacgagccccagaucaucacgacccacaacaccuucgucuccggcaacugcgacguggugaucgggaucgucaacaacaccguguacgacccgcugcagcccgagcuggacagcuucaaggaggagcucgacaaguacuucaagaaccacacgucccccgacguggaccugggcgacaucagcgggaucaacgccuccgucgugaacauccagaaggagaucgaccgccugaacgagguggccaagaaccucaacgagagccugaucgaccugcaggagcucggcaaguacgagcaguacaucaaguggcccugguacaucuggcugggcuucaucgccgggcugaucgcgaucgucauggugaccaucaugcucugcugcaugaccuccugcugcagcugccugaagggcugcugcuccugcgggagcugcugcaaguucgacgaggacgacuccgagccggugcugaagggcgucaagcuccacuacaccugauaauaggcuggagccucgguggccuagcuucuugccccuugggccuccccccagccccuccuccccuuccugcacccguacccccguggucuuugaauaaagucugagugggcggcaaaaaaaaaaaaaaaaaaaaaaaaaaaaaaaaaaaaaaaaaaaaaaaaaaaaaaaaaaaaaaaaaaaaaaaaaaaaaaaaaaaaaaaaaaaaaaaaaaaaucuag

SEQ ID NO: 26520 - RNA, 4100 nt, Artificial Sequence
  SARS-CoV-2/Wuhan/WIV05/2019__EPI_ISL_402128 spike protein mRNA gc (1-1273)(K417N_E484K_N501Y_D614G)
gggaaauaagagagaaaagaagaguaagaagaaauauaagaccccggcgccgccaccauguucguguuccugguccuccugccccuggugagcucccagugcgugaaccucaccacccgcacgcagcugccgcccgccuacaccaacagcuucacccggggcgucuacuaccccgacaagguguuccgcuccagcgugcugcacuccacccaggaccucuuccugcccuucuucagcaacgucacgugguuccacgccauccacguguccgggaccaacggcaccaagcgguucgacaacccggugcugcccuucaacgacggggucuacuucgcgagcaccgagaaguccaacaucauccgcggcuggaucuucgggacgacccucgacagcaagacccagucccugcugaucgugaacaacgccaccaacguggucaucaaggugugcgaguuccaguucugcaacgaccccuuccucggcguguacuaccacaagaacaacaagagcuggauggaguccgaguuccgggucuacagcuccgccaacaacugcacguucgaguacgugagccagcccuuccugauggaccuggagggcaagcaggggaacuucaagaaccuccgcgaguucguguucaagaacaucgacggcuacuucaagaucuacuccaagcacaccccgaucaaccugguccgggaccugccccagggguucagcgcccucgagccccugguggaccugcccaucggcaucaacaucacccgcuuccagacccuccuggcccugcaccgguccuaccucacgccgggggacagcagcuccggcuggaccgcgggcgccgccgccuacuacgugggguaccugcagccccgcaccuuccugcucaaguacaacgagaacggcaccaucacggacgcggucgacugcgcccuggacccccugagcgagaccaagugcacccucaaguccuucaccguggagaaggggaucuaccagacgagcaacuuccgggugcagcccaccgaguccaucguccgcuucccgaacaucaccaaccugugccccuucggcgagguguucaacgccacccgguucgccagcgucuacgccuggaaccgcaagcggaucuccaacugcguggcggacuacagcgugcuguacaacuccgccagcuucuccacguucaagugcuacggcgucagccccaccaagcucaacgaccugugcuucaccaacguguacgccgacuccuucgugauccgcggggacgagguccggcagaucgcccccggccagaccgggaacaucgccgacuacaacuacaagcugccggacgacuucacgggcugcgugaucgcguggaacagcaacaaccucgacuccaaggucgggggcaacuacaacuaccuguaccgccuguuccgcaagagcaaccucaagcccuucgagcgggacaucuccaccgagaucuaccaggccggcagcacccccugcaacggggugaagggcuucaacugcuacuucccccugcaguccuacggguuccagccgaccuacggcgugggguaccagcccuaccggguggucgugcugagcuucgagcuccugcacgcccccgccacggugugcggccccaagaaguccaccaaccuggucaagaacaagugcgugaacuucaacuucaacggccucaccgggaccggcgugcugaccgagagcaacaagaaguuccugccguuccagcaguucgggcgcgacaucgccgacacgaccgacgcgguccgcgacccccagacccuggagauccucgacaucacccccugcagcuucggcgggguguccgugaucacgccgggcaccaacaccagcaaccaggucgccgugcuguaccagggcgugaacugcaccgagguccccguggccauccacgccgaccagcugacgcccaccuggcggguguacuccaccgggagcaacgucuuccagacccgcgccggcugccucaucggggcggagcacgugaacaacuccuacgagugcgacauccccaucggcgccggcaucugcgccagcuaccagacgcagaccaacuccccgcggcgcgcccggagcguggcgucccagagcaucaucgccuacaccaugucccugggggccgagaacagcgucgccuacuccaacaacagcaucgccauccccaccaacuucacgaucuccgugaccaccgagauccugcccgugagcaugaccaagacgagcgucgacugcaccauguacaucugcggcgacuccaccgagugcagcaaccuccugcugcaguacggguccuucugcacccagcucaaccgcgcgcugacgggcaucgccguggagcaggacaagaacacccaggagguguucgcccaggucaagcagaucuacaagacgcccccgaucaaggacuucgggggcuucaacuucagccagauccugcccgaccccuccaagcccagcaagcgguccuucaucgaggaccuccuguucaacaaggugacccuggccgacgccggcuucaucaagcaguacggggacugccucggcgacaucgcggcccgcgaccugaucugcgcccagaaguucaacgggcugaccgugcucccgccccugcugaccgacgagaugaucgcccaguacaccagcgcccuccuggcgggcaccaucacguccggguggaccuucggcgccggcgccgcccugcagauccccuucgcgaugcagauggccuaccgguucaacgggaucggcgucacccagaacgugcucuacgagaaccagaagcugaucgccaaccaguucaacagcgccaucgggaagauccaggacucccugagcuccaccgccagcgcgcucggcaagcugcaggacguggucaaccagaacgcccaggcccugaacacgcucgugaagcagcuguccagcaacuucggggccaucuccagcgugcugaacgacauccucucccgccuggacaaggucgaggccgaggugcagaucgaccggcugaucaccggccgccuccagagccugcagaccuacgugacccagcagcugauccgggcggccgagauccgcgccagcgccaaccucgccgcgaccaagauguccgagugcguccugggccagagcaagcggguggacuucugcgggaagggcuaccaccugauguccuucccccagagcgccccgcacgggguggucuuccuccacgugacguacguccccgcccaggagaagaacuucaccaccgcccccgcgaucugccacgacggcaaggcccacuucccccgcgaggggguguucguguccaacggcacccacugguucgucacgcagcggaacuucuacgagccgcagaucaucaccaccgacaacaccuucgugagcggcaacugcgacguggucaucgggaucgugaacaacacgguguacgacccccugcagcccgagcuggacuccuucaaggaggagcucgacaaguacuucaagaaccacaccagccccgacgucgaccugggcgacaucuccgggaucaacgccagcguggugaacauccagaaggagaucgaccgccugaacgaggucgccaagaaccucaacgagucccugaucgaccugcaggagcucggcaaguacgagcaguacaucaaguggccgugguacaucuggcugggcuucaucgccgggcugaucgcgaucgugauggugaccaucaugcucugcugcaugaccagcugcugcuccugccugaagggcugcugcagcugcggguccugcugcaaguucgacgaggacgacagcgagcccguccugaagggcgugaagcuccacuacacgugauaauaggcuggagccucgguggccuagcuucuugccccuugggccuccccccagccccuccuccccuuccugcacccguacccccguggucuuugaauaaagucugagugggcggcaaaaaaaaaaaaaaaaaaaaaaaaaaaaaaaaaaaaaaaaaaaaaaaaaaaaaaaaaaaaaaaaaaaaaaaaaaaaaaaaaaaaaaaaaaaaaaaaaaaaucuag
